United States Patent Application Publication US 2022/0211838 A1 - sequence listing, part 12

SEQ ID NO: 23336 - RNA, 4039 nt, Artificial Sequence
  SARS-CoV-2/Wuhan/WIV05/2019__EPI_ISL_402128 spike protein mRNA gc (1-1273)(K986P_V987P_N439K_D614G)
aggagaaagcuuaccauguucguguuccuggugcugcugccccuggugagcagccagugcgugaaccugaccacccggacccagcugccaccagccuacaccaacagcuucacccggggcgucuacuaccccgacaagguguuccggagcagcguccugcacagcacccaggaccuguuccugcccuucuucagcaacgugaccugguuccacgccauccacgugagcggcaccaacggcaccaagcgguucgacaaccccgugcugcccuucaacgacggcguguacuucgccagcaccgagaagagcaacaucauccggggcuggaucuucggcaccacccuggacagcaagacccagagccugcugaucgugaauaacgccaccaacguggugaucaaggugugcgaguuccaguucugcaacgaccccuuccugggcguguacuaccacaagaacaacaagagcuggauggagagcgaguuccggguguacagcagcgccaacaacugcaccuucgaguacgugagccagcccuuccugauggaccuggagggcaagcagggcaacuucaagaaccugcgggaguucguguucaagaacaucgacggcuacuucaagaucuacagcaagcacaccccaaucaaccuggugcgggaucugccccagggcuucucagcccuggagccccugguggaccugcccaucggcaucaacaucacccgguuccagacccugcuggcccugcaccggagcuaccugaccccaggcgacagcagcagcggguggacagcaggcgcggcugcuuacuacgugggcuaccugcagccccggaccuuccugcugaaguacaacgagaacggcaccaucaccgacgccguggacugcgcccuggacccucugagcgagaccaagugcacccugaagagcuucaccguggagaagggcaucuaccagaccagcaacuuccgggugcagcccaccgagagcaucgugcgguuccccaacaucaccaaccugugccccuucggcgagguguucaacgccacccgguucgccagcguguacgccuggaaccggaagcggaucagcaacugcguggccgacuacagcgugcuguacaacagcgccagcuucagcaccuucaagugcuacggcgugagccccaccaagcugaacgaccugugcuucaccaacguguacgccgacagcuucgugauccguggcgacgaggugcggcagaucgcacccggccagacaggcaagaucgccgacuacaacuacaagcugcccgacgacuucaccggcugcgugaucgccuggaacagcaagaaccucgacagcaaggugggcggcaacuacaacuaccuguaccggcuguuccggaagagcaaccugaagcccuucgagcgggacaucagcaccgagaucuaccaagccggcuccaccccuugcaacggcguggagggcuucaacugcuacuucccucugcagagcuacggcuuccagcccaccaacggcgugggcuaccagcccuaccgggugguggugcugagcuucgagcugcugcacgccccagccaccguguguggccccaagaagagcaccaaccuggugaagaacaagugcgugaacuucaacuucaacggccuuaccggcaccggcgugcugaccgagagcaacaagaaauuccugcccuuucagcaguucggccgggacaucgccgacaccaccgacgcugugcgggauccccagacccuggagauccuggacaucaccccuugcagcuucggcggcgugagcgugaucaccccaggcaccaacaccagcaaccagguggccgugcuguaccagggcgugaacugcaccgaggugcccguggccauccacgccgaccagcugacacccaccuggcgggucuacagcaccggcagcaacguguuccagacccgggccgguugccugaucggcgccgagcacgugaacaacagcuacgagugcgacauccccaucggcgccggcaucugugccagcuaccagacccagaccaauucaccccggagggcaaggagcguggccagccagagcaucaucgccuacaccaugagccugggcgccgagaacagcguggccuacagcaacaacagcaucgccauccccaccaacuucaccaucagcgugaccaccgagauucugcccgugagcaugaccaagaccagcguggacugcaccauguacaucugcggcgacagcaccgagugcagcaaccugcugcugcaguacggcagcuucugcacccagcugaaccgggcccugaccggcaucgccguggagcaggacaagaacacccaggagguguucgcccaggugaagcagaucuacaagaccccucccaucaaggacuucggcggcuucaacuucagccagauccugcccgaccccagcaagcccagcaagcggagcuucaucgaggaccugcuguucaacaaggugacccuagccgacgccggcuucaucaagcaguacggcgacugccucggcgacauagccgcccgggaccugaucugcgcccagaaguucaacggccugaccgugcugccuccccugcugaccgacgagaugaucgcccaguacaccagcgcccuguuagccggaaccaucaccagcggcuggacuuucggcgcuggagccgcucugcagauccccuucgccaugcagauggccuaccgguucaacggcaucggcgugacccagaacgugcuguacgagaaccagaagcugaucgccaaccaguucaacagcgccaucggcaagauccaggacagccugagcagcaccgcuagcgcccugggcaagcugcaggacguggugaaccagaacgcccaggcccugaacacccuggugaagcagcugagcagcaacuucggcgccaucagcagcgugcugaacgacauccugagccggcuggacccucccgaggccgaggugcagaucgaccggcugaucacuggccggcugcagagccugcagaccuacgugacccagcagcugauccgggccgccgagauucgggccagcgccaaccuggccgccaccaagaugagcgagugcgugcugggccagagcaagcggguggacuucugcggcaagggcuaccaccugaugagcuuuccccagagcgcaccccacggagugguguuccugcacgugaccuacgugcccgcccaggagaagaacuucaccaccgccccagccaucugccacgacggcaaggcccacuuuccccgggagggcguguucgugagcaacggcacccacugguucgugacccagcggaacuucuacgagccccagaucaucaccaccgacaacaccuucgugagcggcaacugcgacguggugaucggcaucgugaacaacaccguguacgauccccugcagcccgagcuggacagcuucaaggaggagcuggacaaguacuucaagaaucacaccagccccgacguggaccugggcgacaucagcggcaucaacgccagcguggugaacauccagaaggagaucgaucggcugaacgagguggccaagaaccugaacgagagccugaucgaccugcaggagcugggcaaguacgagcaguacaucaaguggcccugguacaucuggcugggcuucaucgccggccugaucgccaucgugauggugaccaucaugcugugcugcaugaccagcugcugcagcugccugaagggcuguugcagcugcggcagcugcugcaaguucgacgaggacgacagcgagcccgugcugaagggcgugaagcugcacuacaccugaggacuaguuauaagacugacuagcccgaugggccucccaacgggcccuccuccccuccuugcaccgagauuaauaaaaaaaaaaaaaaaaaaaaaaaaaaaaaaaaaaaaaaaaaaaaaaaaaaaaaaaaaaaaaaaaugcaucccccccccccccccccccccccccccccccaaaggcucuuuucagagccaccagaauu

SEQ ID NO: 23337 - RNA, 4039 nt, Artificial Sequence
  SARS-CoV-2/Wuhan/WIV05/2019__EPI_ISL_402128 spike protein mRNA gc (1-1273)(K986P_V987P_S477N_D614G)
aggagaaagcuuaccauguucguguuccuggugcugcugccccuggugagcagccagugcgugaaccugaccacccggacccagcugccaccagccuacaccaacagcuucacccggggcgucuacuaccccgacaagguguuccggagcagcguccugcacagcacccaggaccuguuccugcccuucuucagcaacgugaccugguuccacgccauccacgugagcggcaccaacggcaccaagcgguucgacaaccccgugcugcccuucaacgacggcguguacuucgccagcaccgagaagagcaacaucauccggggcuggaucuucggcaccacccuggacagcaagacccagagccugcugaucgugaauaacgccaccaacguggugaucaaggugugcgaguuccaguucugcaacgaccccuuccugggcguguacuaccacaagaacaacaagagcuggauggagagcgaguuccggguguacagcagcgccaacaacugcaccuucgaguacgugagccagcccuuccugauggaccuggagggcaagcagggcaacuucaagaaccugcgggaguucguguucaagaacaucgacggcuacuucaagaucuacagcaagcacaccccaaucaaccuggugcgggaucugccccagggcuucucagcccuggagccccugguggaccugcccaucggcaucaacaucacccgguuccagacccugcuggcccugcaccggagcuaccugaccccaggcgacagcagcagcggguggacagcaggcgcggcugcuuacuacgugggcuaccugcagccccggaccuuccugcugaaguacaacgagaacggcaccaucaccgacgccguggacugcgcccuggacccucugagcgagaccaagugcacccugaagagcuucaccguggagaagggcaucuaccagaccagcaacuuccgggugcagcccaccgagagcaucgugcgguuccccaacaucaccaaccugugccccuucggcgagguguucaacgccacccgguucgccagcguguacgccuggaaccggaagcggaucagcaacugcguggccgacuacagcgugcuguacaacagcgccagcuucagcaccuucaagugcuacggcgugagccccaccaagcugaacgaccugugcuucaccaacguguacgccgacagcuucgugauccguggcgacgaggugcggcagaucgcacccggccagacaggcaagaucgccgacuacaacuacaagcugcccgacgacuucaccggcugcgugaucgccuggaacagcaacaaccucgacagcaaggugggcggcaacuacaacuaccuguaccggcuguuccggaagagcaaccugaagcccuucgagcgggacaucagcaccgagaucuaccaagccggcaacaccccuugcaacggcguggagggcuucaacugcuacuucccucugcagagcuacggcuuccagcccaccaacggcgugggcuaccagcccuaccgggugguggugcugagcuucgagcugcugcacgccccagccaccguguguggccccaagaagagcaccaaccuggugaagaacaagugcgugaacuucaacuucaacggccuuaccggcaccggcgugcugaccgagagcaacaagaaauuccugcccuuucagcaguucggccgggacaucgccgacaccaccgacgcugugcgggauccccagacccuggagauccuggacaucaccccuugcagcuucggcggcgugagcgugaucaccccaggcaccaacaccagcaaccagguggccgugcuguaccagggcgugaacugcaccgaggugcccguggccauccacgccgaccagcugacacccaccuggcgggucuacagcaccggcagcaacguguuccagacccgggccgguugccugaucggcgccgagcacgugaacaacagcuacgagugcgacauccccaucggcgccggcaucugugccagcuaccagacccagaccaauucaccccggagggcaaggagcguggccagccagagcaucaucgccuacaccaugagccugggcgccgagaacagcguggccuacagcaacaacagcaucgccauccccaccaacuucaccaucagcgugaccaccgagauucugcccgugagcaugaccaagaccagcguggacugcaccauguacaucugcggcgacagcaccgagugcagcaaccugcugcugcaguacggcagcuucugcacccagcugaaccgggcccugaccggcaucgccguggagcaggacaagaacacccaggagguguucgcccaggugaagcagaucuacaagaccccucccaucaaggacuucggcggcuucaacuucagccagauccugcccgaccccagcaagcccagcaagcggagcuucaucgaggaccugcuguucaacaaggugacccuagccgacgccggcuucaucaagcaguacggcgacugccucggcgacauagccgcccgggaccugaucugcgcccagaaguucaacggccugaccgugcugccuccccugcugaccgacgagaugaucgcccaguacaccagcgcccuguuagccggaaccaucaccagcggcuggacuuucggcgcuggagccgcucugcagauccccuucgccaugcagauggccuaccgguucaacggcaucggcgugacccagaacgugcuguacgagaaccagaagcugaucgccaaccaguucaacagcgccaucggcaagauccaggacagccugagcagcaccgcuagcgcccugggcaagcugcaggacguggugaaccagaacgcccaggcccugaacacccuggugaagcagcugagcagcaacuucggcgccaucagcagcgugcugaacgacauccugagccggcuggacccucccgaggccgaggugcagaucgaccggcugaucacuggccggcugcagagccugcagaccuacgugacccagcagcugauccgggccgccgagauucgggccagcgccaaccuggccgccaccaagaugagcgagugcgugcugggccagagcaagcggguggacuucugcggcaagggcuaccaccugaugagcuuuccccagagcgcaccccacggagugguguuccugcacgugaccuacgugcccgcccaggagaagaacuucaccaccgccccagccaucugccacgacggcaaggcccacuuuccccgggagggcguguucgugagcaacggcacccacugguucgugacccagcggaacuucuacgagccccagaucaucaccaccgacaacaccuucgugagcggcaacugcgacguggugaucggcaucgugaacaacaccguguacgauccccugcagcccgagcuggacagcuucaaggaggagcuggacaaguacuucaagaaucacaccagccccgacguggaccugggcgacaucagcggcaucaacgccagcguggugaacauccagaaggagaucgaucggcugaacgagguggccaagaaccugaacgagagccugaucgaccugcaggagcugggcaaguacgagcaguacaucaaguggcccugguacaucuggcugggcuucaucgccggccugaucgccaucgugauggugaccaucaugcugugcugcaugaccagcugcugcagcugccugaagggcuguugcagcugcggcagcugcugcaaguucgacgaggacgacagcgagcccgugcugaagggcgugaagcugcacuacaccugaggacuaguuauaagacugacuagcccgaugggccucccaacgggcccuccuccccuccuugcaccgagauuaauaaaaaaaaaaaaaaaaaaaaaaaaaaaaaaaaaaaaaaaaaaaaaaaaaaaaaaaaaaaaaaaaugcaucccccccccccccccccccccccccccccccaaaggcucuuuucagagccaccagaauu

SEQ ID NO: 23338 - RNA, 4039 nt, Artificial Sequence
  SARS-CoV-2/Wuhan/WIV05/2019__EPI_ISL_402128 spike protein mRNA gc (1-1273)(K986P_V987P_N501Y_D614G)
aggagaaagcuuaccauguucguguuccuggugcugcugccccuggugagcagccagugcgugaaccugaccacccggacccagcugccaccagccuacaccaacagcuucacccggggcgucuacuaccccgacaagguguuccggagcagcguccugcacagcacccaggaccuguuccugcccuucuucagcaacgugaccugguuccacgccauccacgugagcggcaccaacggcaccaagcgguucgacaaccccgugcugcccuucaacgacggcguguacuucgccagcaccgagaagagcaacaucauccggggcuggaucuucggcaccacccuggacagcaagacccagagccugcugaucgugaauaacgccaccaacguggugaucaaggugugcgaguuccaguucugcaacgaccccuuccugggcguguacuaccacaagaacaacaagagcuggauggagagcgaguuccggguguacagcagcgccaacaacugcaccuucgaguacgugagccagcccuuccugauggaccuggagggcaagcagggcaacuucaagaaccugcgggaguucguguucaagaacaucgacggcuacuucaagaucuacagcaagcacaccccaaucaaccuggugcgggaucugccccagggcuucucagcccuggagccccugguggaccugcccaucggcaucaacaucacccgguuccagacccugcuggcccugcaccggagcuaccugaccccaggcgacagcagcagcggguggacagcaggcgcggcugcuuacuacgugggcuaccugcagccccggaccuuccugcugaaguacaacgagaacggcaccaucaccgacgccguggacugcgcccuggacccucugagcgagaccaagugcacccugaagagcuucaccguggagaagggcaucuaccagaccagcaacuuccgggugcagcccaccgagagcaucgugcgguuccccaacaucaccaaccugugccccuucggcgagguguucaacgccacccgguucgccagcguguacgccuggaaccggaagcggaucagcaacugcguggccgacuacagcgugcuguacaacagcgccagcuucagcaccuucaagugcuacggcgugagccccaccaagcugaacgaccugugcuucaccaacguguacgccgacagcuucgugauccguggcgacgaggugcggcagaucgcacccggccagacaggcaagaucgccgacuacaacuacaagcugcccgacgacuucaccggcugcgugaucgccuggaacagcaacaaccucgacagcaaggugggcggcaacuacaacuaccuguaccggcuguuccggaagagcaaccugaagcccuucgagcgggacaucagcaccgagaucuaccaagccggcuccaccccuugcaacggcguggagggcuucaacugcuacuucccucugcagagcuacggcuuccagcccaccuacggcgugggcuaccagcccuaccgggugguggugcugagcuucgagcugcugcacgccccagccaccguguguggccccaagaagagcaccaaccuggugaagaacaagugcgugaacuucaacuucaacggccuuaccggcaccggcgugcugaccgagagcaacaagaaauuccugcccuuucagcaguucggccgggacaucgccgacaccaccgacgcugugcgggauccccagacccuggagauccuggacaucaccccuugcagcuucggcggcgugagcgugaucaccccaggcaccaacaccagcaaccagguggccgugcuguaccagggcgugaacugcaccgaggugcccguggccauccacgccgaccagcugacacccaccuggcgggucuacagcaccggcagcaacguguuccagacccgggccgguugccugaucggcgccgagcacgugaacaacagcuacgagugcgacauccccaucggcgccggcaucugugccagcuaccagacccagaccaauucaccccggagggcaaggagcguggccagccagagcaucaucgccuacaccaugagccugggcgccgagaacagcguggccuacagcaacaacagcaucgccauccccaccaacuucaccaucagcgugaccaccgagauucugcccgugagcaugaccaagaccagcguggacugcaccauguacaucugcggcgacagcaccgagugcagcaaccugcugcugcaguacggcagcuucugcacccagcugaaccgggcccugaccggcaucgccguggagcaggacaagaacacccaggagguguucgcccaggugaagcagaucuacaagaccccucccaucaaggacuucggcggcuucaacuucagccagauccugcccgaccccagcaagcccagcaagcggagcuucaucgaggaccugcuguucaacaaggugacccuagccgacgccggcuucaucaagcaguacggcgacugccucggcgacauagccgcccgggaccugaucugcgcccagaaguucaacggccugaccgugcugccuccccugcugaccgacgagaugaucgcccaguacaccagcgcccuguuagccggaaccaucaccagcggcuggacuuucggcgcuggagccgcucugcagauccccuucgccaugcagauggccuaccgguucaacggcaucggcgugacccagaacgugcuguacgagaaccagaagcugaucgccaaccaguucaacagcgccaucggcaagauccaggacagccugagcagcaccgcuagcgcccugggcaagcugcaggacguggugaaccagaacgcccaggcccugaacacccuggugaagcagcugagcagcaacuucggcgccaucagcagcgugcugaacgacauccugagccggcuggacccucccgaggccgaggugcagaucgaccggcugaucacuggccggcugcagagccugcagaccuacgugacccagcagcugauccgggccgccgagauucgggccagcgccaaccuggccgccaccaagaugagcgagugcgugcugggccagagcaagcggguggacuucugcggcaagggcuaccaccugaugagcuuuccccagagcgcaccccacggagugguguuccugcacgugaccuacgugcccgcccaggagaagaacuucaccaccgccccagccaucugccacgacggcaaggcccacuuuccccgggagggcguguucgugagcaacggcacccacugguucgugacccagcggaacuucuacgagccccagaucaucaccaccgacaacaccuucgugagcggcaacugcgacguggugaucggcaucgugaacaacaccguguacgauccccugcagcccgagcuggacagcuucaaggaggagcuggacaaguacuucaagaaucacaccagccccgacguggaccugggcgacaucagcggcaucaacgccagcguggugaacauccagaaggagaucgaucggcugaacgagguggccaagaaccugaacgagagccugaucgaccugcaggagcugggcaaguacgagcaguacaucaaguggcccugguacaucuggcugggcuucaucgccggccugaucgccaucgugauggugaccaucaugcugugcugcaugaccagcugcugcagcugccugaagggcuguugcagcugcggcagcugcugcaaguucgacgaggacgacagcgagcccgugcugaagggcgugaagcugcacuacaccugaggacuaguuauaagacugacuagcccgaugggccucccaacgggcccuccuccccuccuugcaccgagauuaauaaaaaaaaaaaaaaaaaaaaaaaaaaaaaaaaaaaaaaaaaaaaaaaaaaaaaaaaaaaaaaaaugcaucccccccccccccccccccccccccccccccaaaggcucuuuucagagccaccagaauu

SEQ ID NO: 23339 - RNA, 4033 nt, Artificial Sequence
  SARS-CoV-2/Wuhan/WIV05/2019__EPI_ISL_402128 spike protein mRNA gc (1-1273)(K986P_V987P_H69del_V70del_D614G)
aggagaaagcuuaccauguucguguuccuggugcugcugccccuggugagcagccagugcgugaaccugaccacccggacccagcugccaccagccuacaccaacagcuucacccggggcgucuacuaccccgacaagguguuccggagcagcguccugcacagcacccaggaccuguuccugcccuucuucagcaacgugaccugguuccacgccaucagcggcaccaacggcaccaagcgguucgacaaccccgugcugcccuucaacgacggcguguacuucgccagcaccgagaagagcaacaucauccggggcuggaucuucggcaccacccuggacagcaagacccagagccugcugaucgugaauaacgccaccaacguggugaucaaggugugcgaguuccaguucugcaacgaccccuuccugggcguguacuaccacaagaacaacaagagcuggauggagagcgaguuccggguguacagcagcgccaacaacugcaccuucgaguacgugagccagcccuuccugauggaccuggagggcaagcagggcaacuucaagaaccugcgggaguucguguucaagaacaucgacggcuacuucaagaucuacagcaagcacaccccaaucaaccuggugcgggaucugccccagggcuucucagcccuggagccccugguggaccugcccaucggcaucaacaucacccgguuccagacccugcuggcccugcaccggagcuaccugaccccaggcgacagcagcagcggguggacagcaggcgcggcugcuuacuacgugggcuaccugcagccccggaccuuccugcugaaguacaacgagaacggcaccaucaccgacgccguggacugcgcccuggacccucugagcgagaccaagugcacccugaagagcuucaccguggagaagggcaucuaccagaccagcaacuuccgggugcagcccaccgagagcaucgugcgguuccccaacaucaccaaccugugccccuucggcgagguguucaacgccacccgguucgccagcguguacgccuggaaccggaagcggaucagcaacugcguggccgacuacagcgugcuguacaacagcgccagcuucagcaccuucaagugcuacggcgugagccccaccaagcugaacgaccugugcuucaccaacguguacgccgacagcuucgugauccguggcgacgaggugcggcagaucgcacccggccagacaggcaagaucgccgacuacaacuacaagcugcccgacgacuucaccggcugcgugaucgccuggaacagcaacaaccucgacagcaaggugggcggcaacuacaacuaccuguaccggcuguuccggaagagcaaccugaagcccuucgagcgggacaucagcaccgagaucuaccaagccggcuccaccccuugcaacggcguggagggcuucaacugcuacuucccucugcagagcuacggcuuccagcccaccaacggcgugggcuaccagcccuaccgggugguggugcugagcuucgagcugcugcacgccccagccaccguguguggccccaagaagagcaccaaccuggugaagaacaagugcgugaacuucaacuucaacggccuuaccggcaccggcgugcugaccgagagcaacaagaaauuccugcccuuucagcaguucggccgggacaucgccgacaccaccgacgcugugcgggauccccagacccuggagauccuggacaucaccccuugcagcuucggcggcgugagcgugaucaccccaggcaccaacaccagcaaccagguggccgugcuguaccagggcgugaacugcaccgaggugcccguggccauccacgccgaccagcugacacccaccuggcgggucuacagcaccggcagcaacguguuccagacccgggccgguugccugaucggcgccgagcacgugaacaacagcuacgagugcgacauccccaucggcgccggcaucugugccagcuaccagacccagaccaauucaccccggagggcaaggagcguggccagccagagcaucaucgccuacaccaugagccugggcgccgagaacagcguggccuacagcaacaacagcaucgccauccccaccaacuucaccaucagcgugaccaccgagauucugcccgugagcaugaccaagaccagcguggacugcaccauguacaucugcggcgacagcaccgagugcagcaaccugcugcugcaguacggcagcuucugcacccagcugaaccgggcccugaccggcaucgccguggagcaggacaagaacacccaggagguguucgcccaggugaagcagaucuacaagaccccucccaucaaggacuucggcggcuucaacuucagccagauccugcccgaccccagcaagcccagcaagcggagcuucaucgaggaccugcuguucaacaaggugacccuagccgacgccggcuucaucaagcaguacggcgacugccucggcgacauagccgcccgggaccugaucugcgcccagaaguucaacggccugaccgugcugccuccccugcugaccgacgagaugaucgcccaguacaccagcgcccuguuagccggaaccaucaccagcggcuggacuuucggcgcuggagccgcucugcagauccccuucgccaugcagauggccuaccgguucaacggcaucggcgugacccagaacgugcuguacgagaaccagaagcugaucgccaaccaguucaacagcgccaucggcaagauccaggacagccugagcagcaccgcuagcgcccugggcaagcugcaggacguggugaaccagaacgcccaggcccugaacacccuggugaagcagcugagcagcaacuucggcgccaucagcagcgugcugaacgacauccugagccggcuggacccucccgaggccgaggugcagaucgaccggcugaucacuggccggcugcagagccugcagaccuacgugacccagcagcugauccgggccgccgagauucgggccagcgccaaccuggccgccaccaagaugagcgagugcgugcugggccagagcaagcggguggacuucugcggcaagggcuaccaccugaugagcuuuccccagagcgcaccccacggagugguguuccugcacgugaccuacgugcccgcccaggagaagaacuucaccaccgccccagccaucugccacgacggcaaggcccacuuuccccgggagggcguguucgugagcaacggcacccacugguucgugacccagcggaacuucuacgagccccagaucaucaccaccgacaacaccuucgugagcggcaacugcgacguggugaucggcaucgugaacaacaccguguacgauccccugcagcccgagcuggacagcuucaaggaggagcuggacaaguacuucaagaaucacaccagccccgacguggaccugggcgacaucagcggcaucaacgccagcguggugaacauccagaaggagaucgaucggcugaacgagguggccaagaaccugaacgagagccugaucgaccugcaggagcugggcaaguacgagcaguacaucaaguggcccugguacaucuggcugggcuucaucgccggccugaucgccaucgugauggugaccaucaugcugugcugcaugaccagcugcugcagcugccugaagggcuguugcagcugcggcagcugcugcaaguucgacgaggacgacagcgagcccgugcugaagggcgugaagcugcacuacaccugaggacuaguuauaagacugacuagcccgaugggccucccaacgggcccuccuccccuccuugcaccgagauuaauaaaaaaaaaaaaaaaaaaaaaaaaaaaaaaaaaaaaaaaaaaaaaaaaaaaaaaaaaaaaaaaaugcaucccccccccccccccccccccccccccccccaaaggcucuuuucagagccaccagaauu

SEQ ID NO: 23340 - RNA, 4039 nt, Artificial Sequence
  SARS-CoV-2/Wuhan/WIV05/2019__EPI_ISL_402128 spike protein mRNA gc (1-1273)(K986P_V987P_Y453F_D614G)
aggagaaagcuuaccauguucguguuccuggugcugcugccccuggugagcagccagugcgugaaccugaccacccggacccagcugccaccagccuacaccaacagcuucacccggggcgucuacuaccccgacaagguguuccggagcagcguccugcacagcacccaggaccuguuccugcccuucuucagcaacgugaccugguuccacgccauccacgugagcggcaccaacggcaccaagcgguucgacaaccccgugcugcccuucaacgacggcguguacuucgccagcaccgagaagagcaacaucauccggggcuggaucuucggcaccacccuggacagcaagacccagagccugcugaucgugaauaacgccaccaacguggugaucaaggugugcgaguuccaguucugcaacgaccccuuccugggcguguacuaccacaagaacaacaagagcuggauggagagcgaguuccggguguacagcagcgccaacaacugcaccuucgaguacgugagccagcccuuccugauggaccuggagggcaagcagggcaacuucaagaaccugcgggaguucguguucaagaacaucgacggcuacuucaagaucuacagcaagcacaccccaaucaaccuggugcgggaucugccccagggcuucucagcccuggagccccugguggaccugcccaucggcaucaacaucacccgguuccagacccugcuggcccugcaccggagcuaccugaccccaggcgacagcagcagcggguggacagcaggcgcggcugcuuacuacgugggcuaccugcagccccggaccuuccugcugaaguacaacgagaacggcaccaucaccgacgccguggacugcgcccuggacccucugagcgagaccaagugcacccugaagagcuucaccguggagaagggcaucuaccagaccagcaacuuccgggugcagcccaccgagagcaucgugcgguuccccaacaucaccaaccugugccccuucggcgagguguucaacgccacccgguucgccagcguguacgccuggaaccggaagcggaucagcaacugcguggccgacuacagcgugcuguacaacagcgccagcuucagcaccuucaagugcuacggcgugagccccaccaagcugaacgaccugugcuucaccaacguguacgccgacagcuucgugauccguggcgacgaggugcggcagaucgcacccggccagacaggcaagaucgccgacuacaacuacaagcugcccgacgacuucaccggcugcgugaucgccuggaacagcaacaaccucgacagcaaggugggcggcaacuacaacuaccuguuccggcuguuccggaagagcaaccugaagcccuucgagcgggacaucagcaccgagaucuaccaagccggcuccaccccuugcaacggcguggagggcuucaacugcuacuucccucugcagagcuacggcuuccagcccaccaacggcgugggcuaccagcccuaccgggugguggugcugagcuucgagcugcugcacgccccagccaccguguguggccccaagaagagcaccaaccuggugaagaacaagugcgugaacuucaacuucaacggccuuaccggcaccggcgugcugaccgagagcaacaagaaauuccugcccuuucagcaguucggccgggacaucgccgacaccaccgacgcugugcgggauccccagacccuggagauccuggacaucaccccuugcagcuucggcggcgugagcgugaucaccccaggcaccaacaccagcaaccagguggccgugcuguaccagggcgugaacugcaccgaggugcccguggccauccacgccgaccagcugacacccaccuggcgggucuacagcaccggcagcaacguguuccagacccgggccgguugccugaucggcgccgagcacgugaacaacagcuacgagugcgacauccccaucggcgccggcaucugugccagcuaccagacccagaccaauucaccccggagggcaaggagcguggccagccagagcaucaucgccuacaccaugagccugggcgccgagaacagcguggccuacagcaacaacagcaucgccauccccaccaacuucaccaucagcgugaccaccgagauucugcccgugagcaugaccaagaccagcguggacugcaccauguacaucugcggcgacagcaccgagugcagcaaccugcugcugcaguacggcagcuucugcacccagcugaaccgggcccugaccggcaucgccguggagcaggacaagaacacccaggagguguucgcccaggugaagcagaucuacaagaccccucccaucaaggacuucggcggcuucaacuucagccagauccugcccgaccccagcaagcccagcaagcggagcuucaucgaggaccugcuguucaacaaggugacccuagccgacgccggcuucaucaagcaguacggcgacugccucggcgacauagccgcccgggaccugaucugcgcccagaaguucaacggccugaccgugcugccuccccugcugaccgacgagaugaucgcccaguacaccagcgcccuguuagccggaaccaucaccagcggcuggacuuucggcgcuggagccgcucugcagauccccuucgccaugcagauggccuaccgguucaacggcaucggcgugacccagaacgugcuguacgagaaccagaagcugaucgccaaccaguucaacagcgccaucggcaagauccaggacagccugagcagcaccgcuagcgcccugggcaagcugcaggacguggugaaccagaacgcccaggcccugaacacccuggugaagcagcugagcagcaacuucggcgccaucagcagcgugcugaacgacauccugagccggcuggacccucccgaggccgaggugcagaucgaccggcugaucacuggccggcugcagagccugcagaccuacgugacccagcagcugauccgggccgccgagauucgggccagcgccaaccuggccgccaccaagaugagcgagugcgugcugggccagagcaagcggguggacuucugcggcaagggcuaccaccugaugagcuuuccccagagcgcaccccacggagugguguuccugcacgugaccuacgugcccgcccaggagaagaacuucaccaccgccccagccaucugccacgacggcaaggcccacuuuccccgggagggcguguucgugagcaacggcacccacugguucgugacccagcggaacuucuacgagccccagaucaucaccaccgacaacaccuucgugagcggcaacugcgacguggugaucggcaucgugaacaacaccguguacgauccccugcagcccgagcuggacagcuucaaggaggagcuggacaaguacuucaagaaucacaccagccccgacguggaccugggcgacaucagcggcaucaacgccagcguggugaacauccagaaggagaucgaucggcugaacgagguggccaagaaccugaacgagagccugaucgaccugcaggagcugggcaaguacgagcaguacaucaaguggcccugguacaucuggcugggcuucaucgccggccugaucgccaucgugauggugaccaucaugcugugcugcaugaccagcugcugcagcugccugaagggcuguugcagcugcggcagcugcugcaaguucgacgaggacgacagcgagcccgugcugaagggcgugaagcugcacuacaccugaggacuaguuauaagacugacuagcccgaugggccucccaacgggcccuccuccccuccuugcaccgagauuaauaaaaaaaaaaaaaaaaaaaaaaaaaaaaaaaaaaaaaaaaaaaaaaaaaaaaaaaaaaaaaaaaugcaucccccccccccccccccccccccccccccccaaaggcucuuuucagagccaccagaauu

SEQ ID NO: 23341 - RNA, 4039 nt, Artificial Sequence
  SARS-CoV-2/Wuhan/WIV05/2019__EPI_ISL_402128 spike protein mRNA gc (1-1273)(K986P_V987P_D614G_I692V)
aggagaaagcuuaccauguucguguuccuggugcugcugccccuggugagcagccagugcgugaaccugaccacccggacccagcugccaccagccuacaccaacagcuucacccggggcgucuacuaccccgacaagguguuccggagcagcguccugcacagcacccaggaccuguuccugcccuucuucagcaacgugaccugguuccacgccauccacgugagcggcaccaacggcaccaagcgguucgacaaccccgugcugcccuucaacgacggcguguacuucgccagcaccgagaagagcaacaucauccggggcuggaucuucggcaccacccuggacagcaagacccagagccugcugaucgugaauaacgccaccaacguggugaucaaggugugcgaguuccaguucugcaacgaccccuuccugggcguguacuaccacaagaacaacaagagcuggauggagagcgaguuccggguguacagcagcgccaacaacugcaccuucgaguacgugagccagcccuuccugauggaccuggagggcaagcagggcaacuucaagaaccugcgggaguucguguucaagaacaucgacggcuacuucaagaucuacagcaagcacaccccaaucaaccuggugcgggaucugccccagggcuucucagcccuggagccccugguggaccugcccaucggcaucaacaucacccgguuccagacccugcuggcccugcaccggagcuaccugaccccaggcgacagcagcagcggguggacagcaggcgcggcugcuuacuacgugggcuaccugcagccccggaccuuccugcugaaguacaacgagaacggcaccaucaccgacgccguggacugcgcccuggacccucugagcgagaccaagugcacccugaagagcuucaccguggagaagggcaucuaccagaccagcaacuuccgggugcagcccaccgagagcaucgugcgguuccccaacaucaccaaccugugccccuucggcgagguguucaacgccacccgguucgccagcguguacgccuggaaccggaagcggaucagcaacugcguggccgacuacagcgugcuguacaacagcgccagcuucagcaccuucaagugcuacggcgugagccccaccaagcugaacgaccugugcuucaccaacguguacgccgacagcuucgugauccguggcgacgaggugcggcagaucgcacccggccagacaggcaagaucgccgacuacaacuacaagcugcccgacgacuucaccggcugcgugaucgccuggaacagcaacaaccucgacagcaaggugggcggcaacuacaacuaccuguaccggcuguuccggaagagcaaccugaagcccuucgagcgggacaucagcaccgagaucuaccaagccggcuccaccccuugcaacggcguggagggcuucaacugcuacuucccucugcagagcuacggcuuccagcccaccaacggcgugggcuaccagcccuaccgggugguggugcugagcuucgagcugcugcacgccccagccaccguguguggccccaagaagagcaccaaccuggugaagaacaagugcgugaacuucaacuucaacggccuuaccggcaccggcgugcugaccgagagcaacaagaaauuccugcccuuucagcaguucggccgggacaucgccgacaccaccgacgcugugcgggauccccagacccuggagauccuggacaucaccccuugcagcuucggcggcgugagcgugaucaccccaggcaccaacaccagcaaccagguggccgugcuguaccagggcgugaacugcaccgaggugcccguggccauccacgccgaccagcugacacccaccuggcgggucuacagcaccggcagcaacguguuccagacccgggccgguugccugaucggcgccgagcacgugaacaacagcuacgagugcgacauccccaucggcgccggcaucugugccagcuaccagacccagaccaauucaccccggagggcaaggagcguggccagccagagcgugaucgccuacaccaugagccugggcgccgagaacagcguggccuacagcaacaacagcaucgccauccccaccaacuucaccaucagcgugaccaccgagauucugcccgugagcaugaccaagaccagcguggacugcaccauguacaucugcggcgacagcaccgagugcagcaaccugcugcugcaguacggcagcuucugcacccagcugaaccgggcccugaccggcaucgccguggagcaggacaagaacacccaggagguguucgcccaggugaagcagaucuacaagaccccucccaucaaggacuucggcggcuucaacuucagccagauccugcccgaccccagcaagcccagcaagcggagcuucaucgaggaccugcuguucaacaaggugacccuagccgacgccggcuucaucaagcaguacggcgacugccucggcgacauagccgcccgggaccugaucugcgcccagaaguucaacggccugaccgugcugccuccccugcugaccgacgagaugaucgcccaguacaccagcgcccuguuagccggaaccaucaccagcggcuggacuuucggcgcuggagccgcucugcagauccccuucgccaugcagauggccuaccgguucaacggcaucggcgugacccagaacgugcuguacgagaaccagaagcugaucgccaaccaguucaacagcgccaucggcaagauccaggacagccugagcagcaccgcuagcgcccugggcaagcugcaggacguggugaaccagaacgcccaggcccugaacacccuggugaagcagcugagcagcaacuucggcgccaucagcagcgugcugaacgacauccugagccggcuggacccucccgaggccgaggugcagaucgaccggcugaucacuggccggcugcagagccugcagaccuacgugacccagcagcugauccgggccgccgagauucgggccagcgccaaccuggccgccaccaagaugagcgagugcgugcugggccagagcaagcggguggacuucugcggcaagggcuaccaccugaugagcuuuccccagagcgcaccccacggagugguguuccugcacgugaccuacgugcccgcccaggagaagaacuucaccaccgccccagccaucugccacgacggcaaggcccacuuuccccgggagggcguguucgugagcaacggcacccacugguucgugacccagcggaacuucuacgagccccagaucaucaccaccgacaacaccuucgugagcggcaacugcgacguggugaucggcaucgugaacaacaccguguacgauccccugcagcccgagcuggacagcuucaaggaggagcuggacaaguacuucaagaaucacaccagccccgacguggaccugggcgacaucagcggcaucaacgccagcguggugaacauccagaaggagaucgaucggcugaacgagguggccaagaaccugaacgagagccugaucgaccugcaggagcugggcaaguacgagcaguacaucaaguggcccugguacaucuggcugggcuucaucgccggccugaucgccaucgugauggugaccaucaugcugugcugcaugaccagcugcugcagcugccugaagggcuguugcagcugcggcagcugcugcaaguucgacgaggacgacagcgagcccgugcugaagggcgugaagcugcacuacaccugaggacuaguuauaagacugacuagcccgaugggccucccaacgggcccuccuccccuccuugcaccgagauuaauaaaaaaaaaaaaaaaaaaaaaaaaaaaaaaaaaaaaaaaaaaaaaaaaaaaaaaaaaaaaaaaaugcaucccccccccccccccccccccccccccccccaaaggcucuuuucagagccaccagaauu

SEQ ID NO: 23342 - RNA, 4039 nt, Artificial Sequence
  SARS-CoV-2/Wuhan/WIV05/2019__EPI_ISL_402128 spike protein mRNA gc (1-1273)(K986P_V987P_D614G_M1229I)
aggagaaagcuuaccauguucguguuccuggugcugcugccccuggugagcagccagugcgugaaccugaccacccggacccagcugccaccagccuacaccaacagcuucacccggggcgucuacuaccccgacaagguguuccggagcagcguccugcacagcacccaggaccuguuccugcccuucuucagcaacgugaccugguuccacgccauccacgugagcggcaccaacggcaccaagcgguucgacaaccccgugcugcccuucaacgacggcguguacuucgccagcaccgagaagagcaacaucauccggggcuggaucuucggcaccacccuggacagcaagacccagagccugcugaucgugaauaacgccaccaacguggugaucaaggugugcgaguuccaguucugcaacgaccccuuccugggcguguacuaccacaagaacaacaagagcuggauggagagcgaguuccggguguacagcagcgccaacaacugcaccuucgaguacgugagccagcccuuccugauggaccuggagggcaagcagggcaacuucaagaaccugcgggaguucguguucaagaacaucgacggcuacuucaagaucuacagcaagcacaccccaaucaaccuggugcgggaucugccccagggcuucucagcccuggagccccugguggaccugcccaucggcaucaacaucacccgguuccagacccugcuggcccugcaccggagcuaccugaccccaggcgacagcagcagcggguggacagcaggcgcggcugcuuacuacgugggcuaccugcagccccggaccuuccugcugaaguacaacgagaacggcaccaucaccgacgccguggacugcgcccuggacccucugagcgagaccaagugcacccugaagagcuucaccguggagaagggcaucuaccagaccagcaacuuccgggugcagcccaccgagagcaucgugcgguuccccaacaucaccaaccugugccccuucggcgagguguucaacgccacccgguucgccagcguguacgccuggaaccggaagcggaucagcaacugcguggccgacuacagcgugcuguacaacagcgccagcuucagcaccuucaagugcuacggcgugagccccaccaagcugaacgaccugugcuucaccaacguguacgccgacagcuucgugauccguggcgacgaggugcggcagaucgcacccggccagacaggcaagaucgccgacuacaacuacaagcugcccgacgacuucaccggcugcgugaucgccuggaacagcaacaaccucgacagcaaggugggcggcaacuacaacuaccuguaccggcuguuccggaagagcaaccugaagcccuucgagcgggacaucagcaccgagaucuaccaagccggcuccaccccuugcaacggcguggagggcuucaacugcuacuucccucugcagagcuacggcuuccagcccaccaacggcgugggcuaccagcccuaccgggugguggugcugagcuucgagcugcugcacgccccagccaccguguguggccccaagaagagcaccaaccuggugaagaacaagugcgugaacuucaacuucaacggccuuaccggcaccggcgugcugaccgagagcaacaagaaauuccugcccuuucagcaguucggccgggacaucgccgacaccaccgacgcugugcgggauccccagacccuggagauccuggacaucaccccuugcagcuucggcggcgugagcgugaucaccccaggcaccaacaccagcaaccagguggccgugcuguaccagggcgugaacugcaccgaggugcccguggccauccacgccgaccagcugacacccaccuggcgggucuacagcaccggcagcaacguguuccagacccgggccgguugccugaucggcgccgagcacgugaacaacagcuacgagugcgacauccccaucggcgccggcaucugugccagcuaccagacccagaccaauucaccccggagggcaaggagcguggccagccagagcaucaucgccuacaccaugagccugggcgccgagaacagcguggccuacagcaacaacagcaucgccauccccaccaacuucaccaucagcgugaccaccgagauucugcccgugagcaugaccaagaccagcguggacugcaccauguacaucugcggcgacagcaccgagugcagcaaccugcugcugcaguacggcagcuucugcacccagcugaaccgggcccugaccggcaucgccguggagcaggacaagaacacccaggagguguucgcccaggugaagcagaucuacaagaccccucccaucaaggacuucggcggcuucaacuucagccagauccugcccgaccccagcaagcccagcaagcggagcuucaucgaggaccugcuguucaacaaggugacccuagccgacgccggcuucaucaagcaguacggcgacugccucggcgacauagccgcccgggaccugaucugcgcccagaaguucaacggccugaccgugcugccuccccugcugaccgacgagaugaucgcccaguacaccagcgcccuguuagccggaaccaucaccagcggcuggacuuucggcgcuggagccgcucugcagauccccuucgccaugcagauggccuaccgguucaacggcaucggcgugacccagaacgugcuguacgagaaccagaagcugaucgccaaccaguucaacagcgccaucggcaagauccaggacagccugagcagcaccgcuagcgcccugggcaagcugcaggacguggugaaccagaacgcccaggcccugaacacccuggugaagcagcugagcagcaacuucggcgccaucagcagcgugcugaacgacauccugagccggcuggacccucccgaggccgaggugcagaucgaccggcugaucacuggccggcugcagagccugcagaccuacgugacccagcagcugauccgggccgccgagauucgggccagcgccaaccuggccgccaccaagaugagcgagugcgugcugggccagagcaagcggguggacuucugcggcaagggcuaccaccugaugagcuuuccccagagcgcaccccacggagugguguuccugcacgugaccuacgugcccgcccaggagaagaacuucaccaccgccccagccaucugccacgacggcaaggcccacuuuccccgggagggcguguucgugagcaacggcacccacugguucgugacccagcggaacuucuacgagccccagaucaucaccaccgacaacaccuucgugagcggcaacugcgacguggugaucggcaucgugaacaacaccguguacgauccccugcagcccgagcuggacagcuucaaggaggagcuggacaaguacuucaagaaucacaccagccccgacguggaccugggcgacaucagcggcaucaacgccagcguggugaacauccagaaggagaucgaucggcugaacgagguggccaagaaccugaacgagagccugaucgaccugcaggagcugggcaaguacgagcaguacaucaaguggcccugguacaucuggcugggcuucaucgccggccugaucgccaucgugaucgugaccaucaugcugugcugcaugaccagcugcugcagcugccugaagggcuguugcagcugcggcagcugcugcaaguucgacgaggacgacagcgagcccgugcugaagggcgugaagcugcacuacaccugaggacuaguuauaagacugacuagcccgaugggccucccaacgggcccuccuccccuccuugcaccgagauuaauaaaaaaaaaaaaaaaaaaaaaaaaaaaaaaaaaaaaaaaaaaaaaaaaaaaaaaaaaaaaaaaaugcaucccccccccccccccccccccccccccccccaaaggcucuuuucagagccaccagaauu

SEQ ID NO: 23343 - RNA, 4033 nt, Artificial Sequence
  SARS-CoV-2/Wuhan/WIV05/2019__EPI_ISL_402128 spike protein mRNA gc (1-1273)(K986P_V987P_H69del_V70del_A222V_Y453F_S477N_D614G_I692V)
aggagaaagcuuaccauguucguguuccuggugcugcugccccuggugagcagccagugcgugaaccugaccacccggacccagcugccaccagccuacaccaacagcuucacccggggcgucuacuaccccgacaagguguuccggagcagcguccugcacagcacccaggaccuguuccugcccuucuucagcaacgugaccugguuccacgccaucagcggcaccaacggcaccaagcgguucgacaaccccgugcugcccuucaacgacggcguguacuucgccagcaccgagaagagcaacaucauccggggcuggaucuucggcaccacccuggacagcaagacccagagccugcugaucgugaauaacgccaccaacguggugaucaaggugugcgaguuccaguucugcaacgaccccuuccugggcguguacuaccacaagaacaacaagagcuggauggagagcgaguuccggguguacagcagcgccaacaacugcaccuucgaguacgugagccagcccuuccugauggaccuggagggcaagcagggcaacuucaagaaccugcgggaguucguguucaagaacaucgacggcuacuucaagaucuacagcaagcacaccccaaucaaccuggugcgggaucugccccagggcuucucagugcuggagccccugguggaccugcccaucggcaucaacaucacccgguuccagacccugcuggcccugcaccggagcuaccugaccccaggcgacagcagcagcggguggacagcaggcgcggcugcuuacuacgugggcuaccugcagccccggaccuuccugcugaaguacaacgagaacggcaccaucaccgacgccguggacugcgcccuggacccucugagcgagaccaagugcacccugaagagcuucaccguggagaagggcaucuaccagaccagcaacuuccgggugcagcccaccgagagcaucgugcgguuccccaacaucaccaaccugugccccuucggcgagguguucaacgccacccgguucgccagcguguacgccuggaaccggaagcggaucagcaacugcguggccgacuacagcgugcuguacaacagcgccagcuucagcaccuucaagugcuacggcgugagccccaccaagcugaacgaccugugcuucaccaacguguacgccgacagcuucgugauccguggcgacgaggugcggcagaucgcacccggccagacaggcaagaucgccgacuacaacuacaagcugcccgacgacuucaccggcugcgugaucgccuggaacagcaacaaccucgacagcaaggugggcggcaacuacaacuaccuguuccggcuguuccggaagagcaaccugaagcccuucgagcgggacaucagcaccgagaucuaccaagccggcaacaccccuugcaacggcguggagggcuucaacugcuacuucccucugcagagcuacggcuuccagcccaccaacggcgugggcuaccagcccuaccgggugguggugcugagcuucgagcugcugcacgccccagccaccguguguggccccaagaagagcaccaaccuggugaagaacaagugcgugaacuucaacuucaacggccuuaccggcaccggcgugcugaccgagagcaacaagaaauuccugcccuuucagcaguucggccgggacaucgccgacaccaccgacgcugugcgggauccccagacccuggagauccuggacaucaccccuugcagcuucggcggcgugagcgugaucaccccaggcaccaacaccagcaaccagguggccgugcuguaccagggcgugaacugcaccgaggugcccguggccauccacgccgaccagcugacacccaccuggcgggucuacagcaccggcagcaacguguuccagacccgggccgguugccugaucggcgccgagcacgugaacaacagcuacgagugcgacauccccaucggcgccggcaucugugccagcuaccagacccagaccaauucaccccggagggcaaggagcguggccagccagagcgugaucgccuacaccaugagccugggcgccgagaacagcguggccuacagcaacaacagcaucgccauccccaccaacuucaccaucagcgugaccaccgagauucugcccgugagcaugaccaagaccagcguggacugcaccauguacaucugcggcgacagcaccgagugcagcaaccugcugcugcaguacggcagcuucugcacccagcugaaccgggcccugaccggcaucgccguggagcaggacaagaacacccaggagguguucgcccaggugaagcagaucuacaagaccccucccaucaaggacuucggcggcuucaacuucagccagauccugcccgaccccagcaagcccagcaagcggagcuucaucgaggaccugcuguucaacaaggugacccuagccgacgccggcuucaucaagcaguacggcgacugccucggcgacauagccgcccgggaccugaucugcgcccagaaguucaacggccugaccgugcugccuccccugcugaccgacgagaugaucgcccaguacaccagcgcccuguuagccggaaccaucaccagcggcuggacuuucggcgcuggagccgcucugcagauccccuucgccaugcagauggccuaccgguucaacggcaucggcgugacccagaacgugcuguacgagaaccagaagcugaucgccaaccaguucaacagcgccaucggcaagauccaggacagccugagcagcaccgcuagcgcccugggcaagcugcaggacguggugaaccagaacgcccaggcccugaacacccuggugaagcagcugagcagcaacuucggcgccaucagcagcgugcugaacgacauccugagccggcuggacccucccgaggccgaggugcagaucgaccggcugaucacuggccggcugcagagccugcagaccuacgugacccagcagcugauccgggccgccgagauucgggccagcgccaaccuggccgccaccaagaugagcgagugcgugcugggccagagcaagcggguggacuucugcggcaagggcuaccaccugaugagcuuuccccagagcgcaccccacggagugguguuccugcacgugaccuacgugcccgcccaggagaagaacuucaccaccgccccagccaucugccacgacggcaaggcccacuuuccccgggagggcguguucgugagcaacggcacccacugguucgugacccagcggaacuucuacgagccccagaucaucaccaccgacaacaccuucgugagcggcaacugcgacguggugaucggcaucgugaacaacaccguguacgauccccugcagcccgagcuggacagcuucaaggaggagcuggacaaguacuucaagaaucacaccagccccgacguggaccugggcgacaucagcggcaucaacgccagcguggugaacauccagaaggagaucgaucggcugaacgagguggccaagaaccugaacgagagccugaucgaccugcaggagcugggcaaguacgagcaguacaucaaguggcccugguacaucuggcugggcuucaucgccggccugaucgccaucgugauggugaccaucaugcugugcugcaugaccagcugcugcagcugccugaagggcuguugcagcugcggcagcugcugcaaguucgacgaggacgacagcgagcccgugcugaagggcgugaagcugcacuacaccugaggacuaguuauaagacugacuagcccgaugggccucccaacgggcccuccuccccuccuugcaccgagauuaauaaaaaaaaaaaaaaaaaaaaaaaaaaaaaaaaaaaaaaaaaaaaaaaaaaaaaaaaaaaaaaaaugcaucccccccccccccccccccccccccccccccaaaggcucuuuucagagccaccagaauu

SEQ ID NO: 23344 - RNA, 4033 nt, Artificial Sequence
  SARS-CoV-2/Wuhan/WIV05/2019__EPI_ISL_402128 spike protein mRNA gc (1-1273)(K986P_V987P_H69del_V70del_Y453F_D614G_I692V_M1229I)
aggagaaagcuuaccauguucguguuccuggugcugcugccccuggugagcagccagugcgugaaccugaccacccggacccagcugccaccagccuacaccaacagcuucacccggggcgucuacuaccccgacaagguguuccggagcagcguccugcacagcacccaggaccuguuccugcccuucuucagcaacgugaccugguuccacgccaucagcggcaccaacggcaccaagcgguucgacaaccccgugcugcccuucaacgacggcguguacuucgccagcaccgagaagagcaacaucauccggggcuggaucuucggcaccacccuggacagcaagacccagagccugcugaucgugaauaacgccaccaacguggugaucaaggugugcgaguuccaguucugcaacgaccccuuccugggcguguacuaccacaagaacaacaagagcuggauggagagcgaguuccggguguacagcagcgccaacaacugcaccuucgaguacgugagccagcccuuccugauggaccuggagggcaagcagggcaacuucaagaaccugcgggaguucguguucaagaacaucgacggcuacuucaagaucuacagcaagcacaccccaaucaaccuggugcgggaucugccccagggcuucucagcccuggagccccugguggaccugcccaucggcaucaacaucacccgguuccagacccugcuggcccugcaccggagcuaccugaccccaggcgacagcagcagcggguggacagcaggcgcggcugcuuacuacgugggcuaccugcagccccggaccuuccugcugaaguacaacgagaacggcaccaucaccgacgccguggacugcgcccuggacccucugagcgagaccaagugcacccugaagagcuucaccguggagaagggcaucuaccagaccagcaacuuccgggugcagcccaccgagagcaucgugcgguuccccaacaucaccaaccugugccccuucggcgagguguucaacgccacccgguucgccagcguguacgccuggaaccggaagcggaucagcaacugcguggccgacuacagcgugcuguacaacagcgccagcuucagcaccuucaagugcuacggcgugagccccaccaagcugaacgaccugugcuucaccaacguguacgccgacagcuucgugauccguggcgacgaggugcggcagaucgcacccggccagacaggcaagaucgccgacuacaacuacaagcugcccgacgacuucaccggcugcgugaucgccuggaacagcaacaaccucgacagcaaggugggcggcaacuacaacuaccuguuccggcuguuccggaagagcaaccugaagcccuucgagcgggacaucagcaccgagaucuaccaagccggcuccaccccuugcaacggcguggagggcuucaacugcuacuucccucugcagagcuacggcuuccagcccaccaacggcgugggcuaccagcccuaccgggugguggugcugagcuucgagcugcugcacgccccagccaccguguguggccccaagaagagcaccaaccuggugaagaacaagugcgugaacuucaacuucaacggccuuaccggcaccggcgugcugaccgagagcaacaagaaauuccugcccuuucagcaguucggccgggacaucgccgacaccaccgacgcugugcgggauccccagacccuggagauccuggacaucaccccuugcagcuucggcggcgugagcgugaucaccccaggcaccaacaccagcaaccagguggccgugcuguaccagggcgugaacugcaccgaggugcccguggccauccacgccgaccagcugacacccaccuggcgggucuacagcaccggcagcaacguguuccagacccgggccgguugccugaucggcgccgagcacgugaacaacagcuacgagugcgacauccccaucggcgccggcaucugugccagcuaccagacccagaccaauucaccccggagggcaaggagcguggccagccagagcgugaucgccuacaccaugagccugggcgccgagaacagcguggccuacagcaacaacagcaucgccauccccaccaacuucaccaucagcgugaccaccgagauucugcccgugagcaugaccaagaccagcguggacugcaccauguacaucugcggcgacagcaccgagugcagcaaccugcugcugcaguacggcagcuucugcacccagcugaaccgggcccugaccggcaucgccguggagcaggacaagaacacccaggagguguucgcccaggugaagcagaucuacaagaccccucccaucaaggacuucggcggcuucaacuucagccagauccugcccgaccccagcaagcccagcaagcggagcuucaucgaggaccugcuguucaacaaggugacccuagccgacgccggcuucaucaagcaguacggcgacugccucggcgacauagccgcccgggaccugaucugcgcccagaaguucaacggccugaccgugcugccuccccugcugaccgacgagaugaucgcccaguacaccagcgcccuguuagccggaaccaucaccagcggcuggacuuucggcgcuggagccgcucugcagauccccuucgccaugcagauggccuaccgguucaacggcaucggcgugacccagaacgugcuguacgagaaccagaagcugaucgccaaccaguucaacagcgccaucggcaagauccaggacagccugagcagcaccgcuagcgcccugggcaagcugcaggacguggugaaccagaacgcccaggcccugaacacccuggugaagcagcugagcagcaacuucggcgccaucagcagcgugcugaacgacauccugagccggcuggacccucccgaggccgaggugcagaucgaccggcugaucacuggccggcugcagagccugcagaccuacgugacccagcagcugauccgggccgccgagauucgggccagcgccaaccuggccgccaccaagaugagcgagugcgugcugggccagagcaagcggguggacuucugcggcaagggcuaccaccugaugagcuuuccccagagcgcaccccacggagugguguuccugcacgugaccuacgugcccgcccaggagaagaacuucaccaccgccccagccaucugccacgacggcaaggcccacuuuccccgggagggcguguucgugagcaacggcacccacugguucgugacccagcggaacuucuacgagccccagaucaucaccaccgacaacaccuucgugagcggcaacugcgacguggugaucggcaucgugaacaacaccguguacgauccccugcagcccgagcuggacagcuucaaggaggagcuggacaaguacuucaagaaucacaccagccccgacguggaccugggcgacaucagcggcaucaacgccagcguggugaacauccagaaggagaucgaucggcugaacgagguggccaagaaccugaacgagagccugaucgaccugcaggagcugggcaaguacgagcaguacaucaaguggcccugguacaucuggcugggcuucaucgccggccugaucgccaucgugaucgugaccaucaugcugugcugcaugaccagcugcugcagcugccugaagggcuguugcagcugcggcagcugcugcaaguucgacgaggacgacagcgagcccgugcugaagggcgugaagcugcacuacaccugaggacuaguuauaagacugacuagcccgaugggccucccaacgggcccuccuccccuccuugcaccgagauuaauaaaaaaaaaaaaaaaaaaaaaaaaaaaaaaaaaaaaaaaaaaaaaaaaaaaaaaaaaaaaaaaaugcaucccccccccccccccccccccccccccccccaaaggcucuuuucagagccaccagaauu

SEQ ID NO: 23345 - RNA, 4030 nt, Artificial Sequence
  SARS-CoV-2/Wuhan/WIV05/2019__EPI_ISL_402128 spike protein mRNA gc (1-1273)(K986P_V987P_K986P_V987P_H69del_V70del_Y144del_N501Y_A570 D_D614G_P681H_T716I_S982A_D1118H)
aggagaaagcuuaccauguucguguuccuggugcugcugccccuggugagcagccagugcgugaaccugaccacccggacccagcugccaccagccuacaccaacagcuucacccggggcgucuacuaccccgacaagguguuccggagcagcguccugcacagcacccaggaccuguuccugcccuucuucagcaacgugaccugguuccacgccaucagcggcaccaacggcaccaagcgguucgacaaccccgugcugcccuucaacgacggcguguacuucgccagcaccgagaagagcaacaucauccggggcuggaucuucggcaccacccuggacagcaagacccagagccugcugaucgugaauaacgccaccaacguggugaucaaggugugcgaguuccaguucugcaacgaccccuuccugggcguguaccacaagaacaacaagagcuggauggagagcgaguuccggguguacagcagcgccaacaacugcaccuucgaguacgugagccagcccuuccugauggaccuggagggcaagcagggcaacuucaagaaccugcgggaguucguguucaagaacaucgacggcuacuucaagaucuacagcaagcacaccccaaucaaccuggugcgggaucugccccagggcuucucagcccuggagccccugguggaccugcccaucggcaucaacaucacccgguuccagacccugcuggcccugcaccggagcuaccugaccccaggcgacagcagcagcggguggacagcaggcgcggcugcuuacuacgugggcuaccugcagccccggaccuuccugcugaaguacaacgagaacggcaccaucaccgacgccguggacugcgcccuggacccucugagcgagaccaagugcacccugaagagcuucaccguggagaagggcaucuaccagaccagcaacuuccgggugcagcccaccgagagcaucgugcgguuccccaacaucaccaaccugugccccuucggcgagguguucaacgccacccgguucgccagcguguacgccuggaaccggaagcggaucagcaacugcguggccgacuacagcgugcuguacaacagcgccagcuucagcaccuucaagugcuacggcgugagccccaccaagcugaacgaccugugcuucaccaacguguacgccgacagcuucgugauccguggcgacgaggugcggcagaucgcacccggccagacaggcaagaucgccgacuacaacuacaagcugcccgacgacuucaccggcugcgugaucgccuggaacagcaacaaccucgacagcaaggugggcggcaacuacaacuaccuguaccggcuguuccggaagagcaaccugaagcccuucgagcgggacaucagcaccgagaucuaccaagccggcuccaccccuugcaacggcguggagggcuucaacugcuacuucccucugcagagcuacggcuuccagcccaccuacggcgugggcuaccagcccuaccgggugguggugcugagcuucgagcugcugcacgccccagccaccguguguggccccaagaagagcaccaaccuggugaagaacaagugcgugaacuucaacuucaacggccuuaccggcaccggcgugcugaccgagagcaacaagaaauuccugcccuuucagcaguucggccgggacaucgacgacaccaccgacgcugugcgggauccccagacccuggagauccuggacaucaccccuugcagcuucggcggcgugagcgugaucaccccaggcaccaacaccagcaaccagguggccgugcuguaccagggcgugaacugcaccgaggugcccguggccauccacgccgaccagcugacacccaccuggcgggucuacagcaccggcagcaacguguuccagacccgggccgguugccugaucggcgccgagcacgugaacaacagcuacgagugcgacauccccaucggcgccggcaucugugccagcuaccagacccagaccaauucacaccggagggcaaggagcguggccagccagagcaucaucgccuacaccaugagccugggcgccgagaacagcguggccuacagcaacaacagcaucgccauccccaucaacuucaccaucagcgugaccaccgagauucugcccgugagcaugaccaagaccagcguggacugcaccauguacaucugcggcgacagcaccgagugcagcaaccugcugcugcaguacggcagcuucugcacccagcugaaccgggcccugaccggcaucgccguggagcaggacaagaacacccaggagguguucgcccaggugaagcagaucuacaagaccccucccaucaaggacuucggcggcuucaacuucagccagauccugcccgaccccagcaagcccagcaagcggagcuucaucgaggaccugcuguucaacaaggugacccuagccgacgccggcuucaucaagcaguacggcgacugccucggcgacauagccgcccgggaccugaucugcgcccagaaguucaacggccugaccgugcugccuccccugcugaccgacgagaugaucgcccaguacaccagcgcccuguuagccggaaccaucaccagcggcuggacuuucggcgcuggagccgcucugcagauccccuucgccaugcagauggccuaccgguucaacggcaucggcgugacccagaacgugcuguacgagaaccagaagcugaucgccaaccaguucaacagcgccaucggcaagauccaggacagccugagcagcaccgcuagcgcccugggcaagcugcaggacguggugaaccagaacgcccaggcccugaacacccuggugaagcagcugagcagcaacuucggcgccaucagcagcgugcugaacgacauccuggcccggcuggacccucccgaggccgaggugcagaucgaccggcugaucacuggccggcugcagagccugcagaccuacgugacccagcagcugauccgggccgccgagauucgggccagcgccaaccuggccgccaccaagaugagcgagugcgugcugggccagagcaagcggguggacuucugcggcaagggcuaccaccugaugagcuuuccccagagcgcaccccacggagugguguuccugcacgugaccuacgugcccgcccaggagaagaacuucaccaccgccccagccaucugccacgacggcaaggcccacuuuccccgggagggcguguucgugagcaacggcacccacugguucgugacccagcggaacuucuacgagccccagaucaucaccacccacaacaccuucgugagcggcaacugcgacguggugaucggcaucgugaacaacaccguguacgauccccugcagcccgagcuggacagcuucaaggaggagcuggacaaguacuucaagaaucacaccagccccgacguggaccugggcgacaucagcggcaucaacgccagcguggugaacauccagaaggagaucgaucggcugaacgagguggccaagaaccugaacgagagccugaucgaccugcaggagcugggcaaguacgagcaguacaucaaguggcccugguacaucuggcugggcuucaucgccggccugaucgccaucgugauggugaccaucaugcugugcugcaugaccagcugcugcagcugccugaagggcuguugcagcugcggcagcugcugcaaguucgacgaggacgacagcgagcccgugcugaagggcgugaagcugcacuacaccugaggacuaguuauaagacugacuagcccgaugggccucccaacgggcccuccuccccuccuugcaccgagauuaauaaaaaaaaaaaaaaaaaaaaaaaaaaaaaaaaaaaaaaaaaaaaaaaaaaaaaaaaaaaaaaaaugcaucccccccccccccccccccccccccccccccaaaggcucuuuucagagccaccagaauu

SEQ ID NO: 23346 - RNA, 4039 nt, Artificial Sequence
  SARS-CoV-2/Wuhan/WIV05/2019__EPI_ISL_402128 spike protein mRNA gc (1-1273)(K986P_V987P_K986P_V987P_K417N_E484K_N501Y_D614G)
aggagaaagcuuaccauguucguguuccuggugcugcugccccuggugagcagccagugcgugaaccugaccacccggacccagcugccaccagccuacaccaacagcuucacccggggcgucuacuaccccgacaagguguuccggagcagcguccugcacagcacccaggaccuguuccugcccuucuucagcaacgugaccugguuccacgccauccacgugagcggcaccaacggcaccaagcgguucgacaaccccgugcugcccuucaacgacggcguguacuucgccagcaccgagaagagcaacaucauccggggcuggaucuucggcaccacccuggacagcaagacccagagccugcugaucgugaauaacgccaccaacguggugaucaaggugugcgaguuccaguucugcaacgaccccuuccugggcguguacuaccacaagaacaacaagagcuggauggagagcgaguuccggguguacagcagcgccaacaacugcaccuucgaguacgugagccagcccuuccugauggaccuggagggcaagcagggcaacuucaagaaccugcgggaguucguguucaagaacaucgacggcuacuucaagaucuacagcaagcacaccccaaucaaccuggugcgggaucugccccagggcuucucagcccuggagccccugguggaccugcccaucggcaucaacaucacccgguuccagacccugcuggcccugcaccggagcuaccugaccccaggcgacagcagcagcggguggacagcaggcgcggcugcuuacuacgugggcuaccugcagccccggaccuuccugcugaaguacaacgagaacggcaccaucaccgacgccguggacugcgcccuggacccucugagcgagaccaagugcacccugaagagcuucaccguggagaagggcaucuaccagaccagcaacuuccgggugcagcccaccgagagcaucgugcgguuccccaacaucaccaaccugugccccuucggcgagguguucaacgccacccgguucgccagcguguacgccuggaaccggaagcggaucagcaacugcguggccgacuacagcgugcuguacaacagcgccagcuucagcaccuucaagugcuacggcgugagccccaccaagcugaacgaccugugcuucaccaacguguacgccgacagcuucgugauccguggcgacgaggugcggcagaucgcacccggccagacaggcaacaucgccgacuacaacuacaagcugcccgacgacuucaccggcugcgugaucgccuggaacagcaacaaccucgacagcaaggugggcggcaacuacaacuaccuguaccggcuguuccggaagagcaaccugaagcccuucgagcgggacaucagcaccgagaucuaccaagccggcuccaccccuugcaacggcgugaagggcuucaacugcuacuucccucugcagagcuacggcuuccagcccaccuacggcgugggcuaccagcccuaccgggugguggugcugagcuucgagcugcugcacgccccagccaccguguguggccccaagaagagcaccaaccuggugaagaacaagugcgugaacuucaacuucaacggccuuaccggcaccggcgugcugaccgagagcaacaagaaauuccugcccuuucagcaguucggccgggacaucgccgacaccaccgacgcugugcgggauccccagacccuggagauccuggacaucaccccuugcagcuucggcggcgugagcgugaucaccccaggcaccaacaccagcaaccagguggccgugcuguaccagggcgugaacugcaccgaggugcccguggccauccacgccgaccagcugacacccaccuggcgggucuacagcaccggcagcaacguguuccagacccgggccgguugccugaucggcgccgagcacgugaacaacagcuacgagugcgacauccccaucggcgccggcaucugugccagcuaccagacccagaccaauucaccccggagggcaaggagcguggccagccagagcaucaucgccuacaccaugagccugggcgccgagaacagcguggccuacagcaacaacagcaucgccauccccaccaacuucaccaucagcgugaccaccgagauucugcccgugagcaugaccaagaccagcguggacugcaccauguacaucugcggcgacagcaccgagugcagcaaccugcugcugcaguacggcagcuucugcacccagcugaaccgggcccugaccggcaucgccguggagcaggacaagaacacccaggagguguucgcccaggugaagcagaucuacaagaccccucccaucaaggacuucggcggcuucaacuucagccagauccugcccgaccccagcaagcccagcaagcggagcuucaucgaggaccugcuguucaacaaggugacccuagccgacgccggcuucaucaagcaguacggcgacugccucggcgacauagccgcccgggaccugaucugcgcccagaaguucaacggccugaccgugcugccuccccugcugaccgacgagaugaucgcccaguacaccagcgcccuguuagccggaaccaucaccagcggcuggacuuucggcgcuggagccgcucugcagauccccuucgccaugcagauggccuaccgguucaacggcaucggcgugacccagaacgugcuguacgagaaccagaagcugaucgccaaccaguucaacagcgccaucggcaagauccaggacagccugagcagcaccgcuagcgcccugggcaagcugcaggacguggugaaccagaacgcccaggcccugaacacccuggugaagcagcugagcagcaacuucggcgccaucagcagcgugcugaacgacauccugagccggcuggacccucccgaggccgaggugcagaucgaccggcugaucacuggccggcugcagagccugcagaccuacgugacccagcagcugauccgggccgccgagauucgggccagcgccaaccuggccgccaccaagaugagcgagugcgugcugggccagagcaagcggguggacuucugcggcaagggcuaccaccugaugagcuuuccccagagcgcaccccacggagugguguuccugcacgugaccuacgugcccgcccaggagaagaacuucaccaccgccccagccaucugccacgacggcaaggcccacuuuccccgggagggcguguucgugagcaacggcacccacugguucgugacccagcggaacuucuacgagccccagaucaucaccaccgacaacaccuucgugagcggcaacugcgacguggugaucggcaucgugaacaacaccguguacgauccccugcagcccgagcuggacagcuucaaggaggagcuggacaaguacuucaagaaucacaccagccccgacguggaccugggcgacaucagcggcaucaacgccagcguggugaacauccagaaggagaucgaucggcugaacgagguggccaagaaccugaacgagagccugaucgaccugcaggagcugggcaaguacgagcaguacaucaaguggcccugguacaucuggcugggcuucaucgccggccugaucgccaucgugauggugaccaucaugcugugcugcaugaccagcugcugcagcugccugaagggcuguugcagcugcggcagcugcugcaaguucgacgaggacgacagcgagcccgugcugaagggcgugaagcugcacuacaccugaggacuaguuauaagacugacuagcccgaugggccucccaacgggcccuccuccccuccuugcaccgagauuaauaaaaaaaaaaaaaaaaaaaaaaaaaaaaaaaaaaaaaaaaaaaaaaaaaaaaaaaaaaaaaaaaugcaucccccccccccccccccccccccccccccccaaaggcucuuuucagagccaccagaauu

SEQ ID NO: 23347 - RNA, 4030 nt, Artificial Sequence
  SARS-CoV-2/Wuhan/WIV05/2019__EPI_ISL_402128 spike protein mRNA gc (1-1273)(K986P_V987P_K986P_V987P_L18F_D80A_D215G_L242del_A243del_ L244del_R246I_K417N_E484K_N501Y_D614G_A701V)
aggagaaagcuuaccauguucguguuccuggugcugcugccccuggugagcagccagugcgugaacuucaccacccggacccagcugccaccagccuacaccaacagcuucacccggggcgucuacuaccccgacaagguguuccggagcagcguccugcacagcacccaggaccuguuccugcccuucuucagcaacgugaccugguuccacgccauccacgugagcggcaccaacggcaccaagcgguucgccaaccccgugcugcccuucaacgacggcguguacuucgccagcaccgagaagagcaacaucauccggggcuggaucuucggcaccacccuggacagcaagacccagagccugcugaucgugaauaacgccaccaacguggugaucaaggugugcgaguuccaguucugcaacgaccccuuccugggcguguacuaccacaagaacaacaagagcuggauggagagcgaguuccggguguacagcagcgccaacaacugcaccuucgaguacgugagccagcccuuccugauggaccuggagggcaagcagggcaacuucaagaaccugcgggaguucguguucaagaacaucgacggcuacuucaagaucuacagcaagcacaccccaaucaaccuggugcggggccugccccagggcuucucagcccuggagccccugguggaccugcccaucggcaucaacaucacccgguuccagacccugcacaucagcuaccugaccccaggcgacagcagcagcggguggacagcaggcgcggcugcuuacuacgugggcuaccugcagccccggaccuuccugcugaaguacaacgagaacggcaccaucaccgacgccguggacugcgcccuggacccucugagcgagaccaagugcacccugaagagcuucaccguggagaagggcaucuaccagaccagcaacuuccgggugcagcccaccgagagcaucgugcgguuccccaacaucaccaaccugugccccuucggcgagguguucaacgccacccgguucgccagcguguacgccuggaaccggaagcggaucagcaacugcguggccgacuacagcgugcuguacaacagcgccagcuucagcaccuucaagugcuacggcgugagccccaccaagcugaacgaccugugcuucaccaacguguacgccgacagcuucgugauccguggcgacgaggugcggcagaucgcacccggccagacaggcaacaucgccgacuacaacuacaagcugcccgacgacuucaccggcugcgugaucgccuggaacagcaacaaccucgacagcaaggugggcggcaacuacaacuaccuguaccggcuguuccggaagagcaaccugaagcccuucgagcgggacaucagcaccgagaucuaccaagccggcuccaccccuugcaacggcgugaagggcuucaacugcuacuucccucugcagagcuacggcuuccagcccaccuacggcgugggcuaccagcccuaccgggugguggugcugagcuucgagcugcugcacgccccagccaccguguguggccccaagaagagcaccaaccuggugaagaacaagugcgugaacuucaacuucaacggccuuaccggcaccggcgugcugaccgagagcaacaagaaauuccugcccuuucagcaguucggccgggacaucgccgacaccaccgacgcugugcgggauccccagacccuggagauccuggacaucaccccuugcagcuucggcggcgugagcgugaucaccccaggcaccaacaccagcaaccagguggccgugcuguaccagggcgugaacugcaccgaggugcccguggccauccacgccgaccagcugacacccaccuggcgggucuacagcaccggcagcaacguguuccagacccgggccgguugccugaucggcgccgagcacgugaacaacagcuacgagugcgacauccccaucggcgccggcaucugugccagcuaccagacccagaccaauucaccccggagggcaaggagcguggccagccagagcaucaucgccuacaccaugagccugggcguggagaacagcguggccuacagcaacaacagcaucgccauccccaccaacuucaccaucagcgugaccaccgagauucugcccgugagcaugaccaagaccagcguggacugcaccauguacaucugcggcgacagcaccgagugcagcaaccugcugcugcaguacggcagcuucugcacccagcugaaccgggcccugaccggcaucgccguggagcaggacaagaacacccaggagguguucgcccaggugaagcagaucuacaagaccccucccaucaaggacuucggcggcuucaacuucagccagauccugcccgaccccagcaagcccagcaagcggagcuucaucgaggaccugcuguucaacaaggugacccuagccgacgccggcuucaucaagcaguacggcgacugccucggcgacauagccgcccgggaccugaucugcgcccagaaguucaacggccugaccgugcugccuccccugcugaccgacgagaugaucgcccaguacaccagcgcccuguuagccggaaccaucaccagcggcuggacuuucggcgcuggagccgcucugcagauccccuucgccaugcagauggccuaccgguucaacggcaucggcgugacccagaacgugcuguacgagaaccagaagcugaucgccaaccaguucaacagcgccaucggcaagauccaggacagccugagcagcaccgcuagcgcccugggcaagcugcaggacguggugaaccagaacgcccaggcccugaacacccuggugaagcagcugagcagcaacuucggcgccaucagcagcgugcugaacgacauccugagccggcuggacccucccgaggccgaggugcagaucgaccggcugaucacuggccggcugcagagccugcagaccuacgugacccagcagcugauccgggccgccgagauucgggccagcgccaaccuggccgccaccaagaugagcgagugcgugcugggccagagcaagcggguggacuucugcggcaagggcuaccaccugaugagcuuuccccagagcgcaccccacggagugguguuccugcacgugaccuacgugcccgcccaggagaagaacuucaccaccgccccagccaucugccacgacggcaaggcccacuuuccccgggagggcguguucgugagcaacggcacccacugguucgugacccagcggaacuucuacgagccccagaucaucaccaccgacaacaccuucgugagcggcaacugcgacguggugaucggcaucgugaacaacaccguguacgauccccugcagcccgagcuggacagcuucaaggaggagcuggacaaguacuucaagaaucacaccagccccgacguggaccugggcgacaucagcggcaucaacgccagcguggugaacauccagaaggagaucgaucggcugaacgagguggccaagaaccugaacgagagccugaucgaccugcaggagcugggcaaguacgagcaguacaucaaguggcccugguacaucuggcugggcuucaucgccggccugaucgccaucgugauggugaccaucaugcugugcugcaugaccagcugcugcagcugccugaagggcuguugcagcugcggcagcugcugcaaguucgacgaggacgacagcgagcccgugcugaagggcgugaagcugcacuacaccugaggacuaguuauaagacugacuagcccgaugggccucccaacgggcccuccuccccuccuugcaccgagauuaauaaaaaaaaaaaaaaaaaaaaaaaaaaaaaaaaaaaaaaaaaaaaaaaaaaaaaaaaaaaaaaaaugcaucccccccccccccccccccccccccccccccaaaggcucuuuucagagccaccagaauu

SEQ ID NO: 23348 - RNA, 4039 nt, Artificial Sequence
  SARS-CoV-2/Wuhan/WIV05/2019__EPI_ISL_402128 spike protein mRNA gc (1-1273)(K986P_V987P_K986P_V987P_E484K_D614G)
aggagaaagcuuaccauguucguguuccuggugcugcugccccuggugagcagccagugcgugaaccugaccacccggacccagcugccaccagccuacaccaacagcuucacccggggcgucuacuaccccgacaagguguuccggagcagcguccugcacagcacccaggaccuguuccugcccuucuucagcaacgugaccugguuccacgccauccacgugagcggcaccaacggcaccaagcgguucgacaaccccgugcugcccuucaacgacggcguguacuucgccagcaccgagaagagcaacaucauccggggcuggaucuucggcaccacccuggacagcaagacccagagccugcugaucgugaauaacgccaccaacguggugaucaaggugugcgaguuccaguucugcaacgaccccuuccugggcguguacuaccacaagaacaacaagagcuggauggagagcgaguuccggguguacagcagcgccaacaacugcaccuucgaguacgugagccagcccuuccugauggaccuggagggcaagcagggcaacuucaagaaccugcgggaguucguguucaagaacaucgacggcuacuucaagaucuacagcaagcacaccccaaucaaccuggugcgggaucugccccagggcuucucagcccuggagccccugguggaccugcccaucggcaucaacaucacccgguuccagacccugcuggcccugcaccggagcuaccugaccccaggcgacagcagcagcggguggacagcaggcgcggcugcuuacuacgugggcuaccugcagccccggaccuuccugcugaaguacaacgagaacggcaccaucaccgacgccguggacugcgcccuggacccucugagcgagaccaagugcacccugaagagcuucaccguggagaagggcaucuaccagaccagcaacuuccgggugcagcccaccgagagcaucgugcgguuccccaacaucaccaaccugugccccuucggcgagguguucaacgccacccgguucgccagcguguacgccuggaaccggaagcggaucagcaacugcguggccgacuacagcgugcuguacaacagcgccagcuucagcaccuucaagugcuacggcgugagccccaccaagcugaacgaccugugcuucaccaacguguacgccgacagcuucgugauccguggcgacgaggugcggcagaucgcacccggccagacaggcaagaucgccgacuacaacuacaagcugcccgacgacuucaccggcugcgugaucgccuggaacagcaacaaccucgacagcaaggugggcggcaacuacaacuaccuguaccggcuguuccggaagagcaaccugaagcccuucgagcgggacaucagcaccgagaucuaccaagccggcuccaccccuugcaacggcgugaagggcuucaacugcuacuucccucugcagagcuacggcuuccagcccaccaacggcgugggcuaccagcccuaccgggugguggugcugagcuucgagcugcugcacgccccagccaccguguguggccccaagaagagcaccaaccuggugaagaacaagugcgugaacuucaacuucaacggccuuaccggcaccggcgugcugaccgagagcaacaagaaauuccugcccuuucagcaguucggccgggacaucgccgacaccaccgacgcugugcgggauccccagacccuggagauccuggacaucaccccuugcagcuucggcggcgugagcgugaucaccccaggcaccaacaccagcaaccagguggccgugcuguaccagggcgugaacugcaccgaggugcccguggccauccacgccgaccagcugacacccaccuggcgggucuacagcaccggcagcaacguguuccagacccgggccgguugccugaucggcgccgagcacgugaacaacagcuacgagugcgacauccccaucggcgccggcaucugugccagcuaccagacccagaccaauucaccccggagggcaaggagcguggccagccagagcaucaucgccuacaccaugagccugggcgccgagaacagcguggccuacagcaacaacagcaucgccauccccaccaacuucaccaucagcgugaccaccgagauucugcccgugagcaugaccaagaccagcguggacugcaccauguacaucugcggcgacagcaccgagugcagcaaccugcugcugcaguacggcagcuucugcacccagcugaaccgggcccugaccggcaucgccguggagcaggacaagaacacccaggagguguucgcccaggugaagcagaucuacaagaccccucccaucaaggacuucggcggcuucaacuucagccagauccugcccgaccccagcaagcccagcaagcggagcuucaucgaggaccugcuguucaacaaggugacccuagccgacgccggcuucaucaagcaguacggcgacugccucggcgacauagccgcccgggaccugaucugcgcccagaaguucaacggccugaccgugcugccuccccugcugaccgacgagaugaucgcccaguacaccagcgcccuguuagccggaaccaucaccagcggcuggacuuucggcgcuggagccgcucugcagauccccuucgccaugcagauggccuaccgguucaacggcaucggcgugacccagaacgugcuguacgagaaccagaagcugaucgccaaccaguucaacagcgccaucggcaagauccaggacagccugagcagcaccgcuagcgcccugggcaagcugcaggacguggugaaccagaacgcccaggcccugaacacccuggugaagcagcugagcagcaacuucggcgccaucagcagcgugcugaacgacauccugagccggcuggacccucccgaggccgaggugcagaucgaccggcugaucacuggccggcugcagagccugcagaccuacgugacccagcagcugauccgggccgccgagauucgggccagcgccaaccuggccgccaccaagaugagcgagugcgugcugggccagagcaagcggguggacuucugcggcaagggcuaccaccugaugagcuuuccccagagcgcaccccacggagugguguuccugcacgugaccuacgugcccgcccaggagaagaacuucaccaccgccccagccaucugccacgacggcaaggcccacuuuccccgggagggcguguucgugagcaacggcacccacugguucgugacccagcggaacuucuacgagccccagaucaucaccaccgacaacaccuucgugagcggcaacugcgacguggugaucggcaucgugaacaacaccguguacgauccccugcagcccgagcuggacagcuucaaggaggagcuggacaaguacuucaagaaucacaccagccccgacguggaccugggcgacaucagcggcaucaacgccagcguggugaacauccagaaggagaucgaucggcugaacgagguggccaagaaccugaacgagagccugaucgaccugcaggagcugggcaaguacgagcaguacaucaaguggcccugguacaucuggcugggcuucaucgccggccugaucgccaucgugauggugaccaucaugcugugcugcaugaccagcugcugcagcugccugaagggcuguugcagcugcggcagcugcugcaaguucgacgaggacgacagcgagcccgugcugaagggcgugaagcugcacuacaccugaggacuaguuauaagacugacuagcccgaugggccucccaacgggcccuccuccccuccuugcaccgagauuaauaaaaaaaaaaaaaaaaaaaaaaaaaaaaaaaaaaaaaaaaaaaaaaaaaaaaaaaaaaaaaaaaugcaucccccccccccccccccccccccccccccccaaaggcucuuuucagagccaccagaauu

SEQ ID NO: 23349 - RNA, 4039 nt, Artificial Sequence
  SARS-CoV-2/Wuhan/WIV05/2019__EPI_ISL_402128 spike protein mRNA gc (1-1273)(K986P_V987P_K986P_V987P_L18F_T20N_P26S_D138Y_R190S_K417T _E484K_N501Y_D614G_H655Y_T1027I)
aggagaaagcuuaccauguucguguuccuggugcugcugccccuggugagcagccagugcgugaacuucaccaaccggacccagcugccaagcgccuacaccaacagcuucacccggggcgucuacuaccccgacaagguguuccggagcagcguccugcacagcacccaggaccuguuccugcccuucuucagcaacgugaccugguuccacgccauccacgugagcggcaccaacggcaccaagcgguucgacaaccccgugcugcccuucaacgacggcguguacuucgccagcaccgagaagagcaacaucauccggggcuggaucuucggcaccacccuggacagcaagacccagagccugcugaucgugaauaacgccaccaacguggugaucaaggugugcgaguuccaguucugcaacuaccccuuccugggcguguacuaccacaagaacaacaagagcuggauggagagcgaguuccggguguacagcagcgccaacaacugcaccuucgaguacgugagccagcccuuccugauggaccuggagggcaagcagggcaacuucaagaaccugagcgaguucguguucaagaacaucgacggcuacuucaagaucuacagcaagcacaccccaaucaaccuggugcgggaucugccccagggcuucucagcccuggagccccugguggaccugcccaucggcaucaacaucacccgguuccagacccugcuggcccugcaccggagcuaccugaccccaggcgacagcagcagcggguggacagcaggcgcggcugcuuacuacgugggcuaccugcagccccggaccuuccugcugaaguacaacgagaacggcaccaucaccgacgccguggacugcgcccuggacccucugagcgagaccaagugcacccugaagagcuucaccguggagaagggcaucuaccagaccagcaacuuccgggugcagcccaccgagagcaucgugcgguuccccaacaucaccaaccugugccccuucggcgagguguucaacgccacccgguucgccagcguguacgccuggaaccggaagcggaucagcaacugcguggccgacuacagcgugcuguacaacagcgccagcuucagcaccuucaagugcuacggcgugagccccaccaagcugaacgaccugugcuucaccaacguguacgccgacagcuucgugauccguggcgacgaggugcggcagaucgcacccggccagacaggcaccaucgccgacuacaacuacaagcugcccgacgacuucaccggcugcgugaucgccuggaacagcaacaaccucgacagcaaggugggcggcaacuacaacuaccuguaccggcuguuccggaagagcaaccugaagcccuucgagcgggacaucagcaccgagaucuaccaagccggcuccaccccuugcaacggcgugaagggcuucaacugcuacuucccucugcagagcuacggcuuccagcccaccuacggcgugggcuaccagcccuaccgggugguggugcugagcuucgagcugcugcacgccccagccaccguguguggccccaagaagagcaccaaccuggugaagaacaagugcgugaacuucaacuucaacggccuuaccggcaccggcgugcugaccgagagcaacaagaaauuccugcccuuucagcaguucggccgggacaucgccgacaccaccgacgcugugcgggauccccagacccuggagauccuggacaucaccccuugcagcuucggcggcgugagcgugaucaccccaggcaccaacaccagcaaccagguggccgugcuguaccagggcgugaacugcaccgaggugcccguggccauccacgccgaccagcugacacccaccuggcgggucuacagcaccggcagcaacguguuccagacccgggccgguugccugaucggcgccgaguacgugaacaacagcuacgagugcgacauccccaucggcgccggcaucugugccagcuaccagacccagaccaauucaccccggagggcaaggagcguggccagccagagcaucaucgccuacaccaugagccugggcgccgagaacagcguggccuacagcaacaacagcaucgccauccccaccaacuucaccaucagcgugaccaccgagauucugcccgugagcaugaccaagaccagcguggacugcaccauguacaucugcggcgacagcaccgagugcagcaaccugcugcugcaguacggcagcuucugcacccagcugaaccgggcccugaccggcaucgccguggagcaggacaagaacacccaggagguguucgcccaggugaagcagaucuacaagaccccucccaucaaggacuucggcggcuucaacuucagccagauccugcccgaccccagcaagcccagcaagcggagcuucaucgaggaccugcuguucaacaaggugacccuagccgacgccggcuucaucaagcaguacggcgacugccucggcgacauagccgcccgggaccugaucugcgcccagaaguucaacggccugaccgugcugccuccccugcugaccgacgagaugaucgcccaguacaccagcgcccuguuagccggaaccaucaccagcggcuggacuuucggcgcuggagccgcucugcagauccccuucgccaugcagauggccuaccgguucaacggcaucggcgugacccagaacgugcuguacgagaaccagaagcugaucgccaaccaguucaacagcgccaucggcaagauccaggacagccugagcagcaccgcuagcgcccugggcaagcugcaggacguggugaaccagaacgcccaggcccugaacacccuggugaagcagcugagcagcaacuucggcgccaucagcagcgugcugaacgacauccugagccggcuggacccucccgaggccgaggugcagaucgaccggcugaucacuggccggcugcagagccugcagaccuacgugacccagcagcugauccgggccgccgagauucgggccagcgccaaccuggccgccaucaagaugagcgagugcgugcugggccagagcaagcggguggacuucugcggcaagggcuaccaccugaugagcuuuccccagagcgcaccccacggagugguguuccugcacgugaccuacgugcccgcccaggagaagaacuucaccaccgccccagccaucugccacgacggcaaggcccacuuuccccgggagggcguguucgugagcaacggcacccacugguucgugacccagcggaacuucuacgagccccagaucaucaccaccgacaacaccuucgugagcggcaacugcgacguggugaucggcaucgugaacaacaccguguacgauccccugcagcccgagcuggacagcuucaaggaggagcuggacaaguacuucaagaaucacaccagccccgacguggaccugggcgacaucagcggcaucaacgccagcguggugaacauccagaaggagaucgaucggcugaacgagguggccaagaaccugaacgagagccugaucgaccugcaggagcugggcaaguacgagcaguacaucaaguggcccugguacaucuggcugggcuucaucgccggccugaucgccaucgugauggugaccaucaugcugugcugcaugaccagcugcugcagcugccugaagggcuguugcagcugcggcagcugcugcaaguucgacgaggacgacagcgagcccgugcugaagggcgugaagcugcacuacaccugaggacuaguuauaagacugacuagcccgaugggccucccaacgggcccuccuccccuccuugcaccgagauuaauaaaaaaaaaaaaaaaaaaaaaaaaaaaaaaaaaaaaaaaaaaaaaaaaaaaaaaaaaaaaaaaaugcaucccccccccccccccccccccccccccccccaaaggcucuuuucagagccaccagaauu

SEQ ID NO: 23350 - RNA, 4039 nt, Artificial Sequence
  SARS-CoV-2/Wuhan/WIV05/2019__EPI_ISL_402128 spike protein mRNA gc (1-1273)(K986P_V987P_K986P_V987P_S13I_W152C_L452R_D614G)
aggagaaagcuuaccauguucguguuccuggugcugcugccccuggugagcauccagugcgugaaccugaccacccggacccagcugccaccagccuacaccaacagcuucacccggggcgucuacuaccccgacaagguguuccggagcagcguccugcacagcacccaggaccuguuccugcccuucuucagcaacgugaccugguuccacgccauccacgugagcggcaccaacggcaccaagcgguucgacaaccccgugcugcccuucaacgacggcguguacuucgccagcaccgagaagagcaacaucauccggggcuggaucuucggcaccacccuggacagcaagacccagagccugcugaucgugaauaacgccaccaacguggugaucaaggugugcgaguuccaguucugcaacgaccccuuccugggcguguacuaccacaagaacaacaagagcugcauggagagcgaguuccggguguacagcagcgccaacaacugcaccuucgaguacgugagccagcccuuccugauggaccuggagggcaagcagggcaacuucaagaaccugcgggaguucguguucaagaacaucgacggcuacuucaagaucuacagcaagcacaccccaaucaaccuggugcgggaucugccccagggcuucucagcccuggagccccugguggaccugcccaucggcaucaacaucacccgguuccagacccugcuggcccugcaccggagcuaccugaccccaggcgacagcagcagcggguggacagcaggcgcggcugcuuacuacgugggcuaccugcagccccggaccuuccugcugaaguacaacgagaacggcaccaucaccgacgccguggacugcgcccuggacccucugagcgagaccaagugcacccugaagagcuucaccguggagaagggcaucuaccagaccagcaacuuccgggugcagcccaccgagagcaucgugcgguuccccaacaucaccaaccugugccccuucggcgagguguucaacgccacccgguucgccagcguguacgccuggaaccggaagcggaucagcaacugcguggccgacuacagcgugcuguacaacagcgccagcuucagcaccuucaagugcuacggcgugagccccaccaagcugaacgaccugugcuucaccaacguguacgccgacagcuucgugauccguggcgacgaggugcggcagaucgcacccggccagacaggcaagaucgccgacuacaacuacaagcugcccgacgacuucaccggcugcgugaucgccuggaacagcaacaaccucgacagcaaggugggcggcaacuacaacuaccgcuaccggcuguuccggaagagcaaccugaagcccuucgagcgggacaucagcaccgagaucuaccaagccggcuccaccccuugcaacggcguggagggcuucaacugcuacuucccucugcagagcuacggcuuccagcccaccaacggcgugggcuaccagcccuaccgggugguggugcugagcuucgagcugcugcacgccccagccaccguguguggccccaagaagagcaccaaccuggugaagaacaagugcgugaacuucaacuucaacggccuuaccggcaccggcgugcugaccgagagcaacaagaaauuccugcccuuucagcaguucggccgggacaucgccgacaccaccgacgcugugcgggauccccagacccuggagauccuggacaucaccccuugcagcuucggcggcgugagcgugaucaccccaggcaccaacaccagcaaccagguggccgugcuguaccagggcgugaacugcaccgaggugcccguggccauccacgccgaccagcugacacccaccuggcgggucuacagcaccggcagcaacguguuccagacccgggccgguugccugaucggcgccgagcacgugaacaacagcuacgagugcgacauccccaucggcgccggcaucugugccagcuaccagacccagaccaauucaccccggagggcaaggagcguggccagccagagcaucaucgccuacaccaugagccugggcgccgagaacagcguggccuacagcaacaacagcaucgccauccccaccaacuucaccaucagcgugaccaccgagauucugcccgugagcaugaccaagaccagcguggacugcaccauguacaucugcggcgacagcaccgagugcagcaaccugcugcugcaguacggcagcuucugcacccagcugaaccgggcccugaccggcaucgccguggagcaggacaagaacacccaggagguguucgcccaggugaagcagaucuacaagaccccucccaucaaggacuucggcggcuucaacuucagccagauccugcccgaccccagcaagcccagcaagcggagcuucaucgaggaccugcuguucaacaaggugacccuagccgacgccggcuucaucaagcaguacggcgacugccucggcgacauagccgcccgggaccugaucugcgcccagaaguucaacggccugaccgugcugccuccccugcugaccgacgagaugaucgcccaguacaccagcgcccuguuagccggaaccaucaccagcggcuggacuuucggcgcuggagccgcucugcagauccccuucgccaugcagauggccuaccgguucaacggcaucggcgugacccagaacgugcuguacgagaaccagaagcugaucgccaaccaguucaacagcgccaucggcaagauccaggacagccugagcagcaccgcuagcgcccugggcaagcugcaggacguggugaaccagaacgcccaggcccugaacacccuggugaagcagcugagcagcaacuucggcgccaucagcagcgugcugaacgacauccugagccggcuggacccucccgaggccgaggugcagaucgaccggcugaucacuggccggcugcagagccugcagaccuacgugacccagcagcugauccgggccgccgagauucgggccagcgccaaccuggccgccaccaagaugagcgagugcgugcugggccagagcaagcggguggacuucugcggcaagggcuaccaccugaugagcuuuccccagagcgcaccccacggagugguguuccugcacgugaccuacgugcccgcccaggagaagaacuucaccaccgccccagccaucugccacgacggcaaggcccacuuuccccgggagggcguguucgugagcaacggcacccacugguucgugacccagcggaacuucuacgagccccagaucaucaccaccgacaacaccuucgugagcggcaacugcgacguggugaucggcaucgugaacaacaccguguacgauccccugcagcccgagcuggacagcuucaaggaggagcuggacaaguacuucaagaaucacaccagccccgacguggaccugggcgacaucagcggcaucaacgccagcguggugaacauccagaaggagaucgaucggcugaacgagguggccaagaaccugaacgagagccugaucgaccugcaggagcugggcaaguacgagcaguacaucaaguggcccugguacaucuggcugggcuucaucgccggccugaucgccaucgugauggugaccaucaugcugugcugcaugaccagcugcugcagcugccugaagggcuguugcagcugcggcagcugcugcaaguucgacgaggacgacagcgagcccgugcugaagggcgugaagcugcacuacaccugaggacuaguuauaagacugacuagcccgaugggccucccaacgggcccuccuccccuccuugcaccgagauuaauaaaaaaaaaaaaaaaaaaaaaaaaaaaaaaaaaaaaaaaaaaaaaaaaaaaaaaaaaaaaaaaaugcaucccccccccccccccccccccccccccccccaaaggcucuuuucagagccaccagaauu

SEQ ID NO: 23351 - RNA, 4039 nt, Artificial Sequence
  SARS-CoV-2/Wuhan/WIV05/2019__EPI_ISL_402128 spike protein mRNA gc (1-1273)(K986P_V987P)
aggagaaagcuuaccauguucguguuccuggugcugcugccccuggugagcagccagugcgugaaccugaccacccggacccagcugcccccugccuacaccaacagcuucacccggggcguguacuaccccgacaagguguuccggagcagcgugcugcacagcacccaggaccuguuccugcccuucuucagcaacgugaccugguuccacgccauccacgugagcggcaccaacggcaccaagcgguucgacaacccagugcugcccuucaacgacggcguguacuucgccagcaccgagaagucaaacaucauccggggcuggaucuucggcaccacccuggacagcaagacacagagccugcugaucgugaacaacgccaccaacguggugaucaaggugugcgaguuucaguucugcaacgaccccuuccugggcguguacuaccacaagaacaacaagagcuggauggagagcgaguuccgggucuacagcagcgcuaacaauugcaccuucgaguacgugagccagcccuuccugauggaccucgagggcaagcagggcaacuucaagaaccugcgggaguucguguucaagaacaucgauggcuacuucaagaucuacagcaagcacacccccaucaaccuggugcgggaccugccccagggauucagcgcccuggagccucugguggaccugcccaucggcaucaacaucaccagguuccagacccugcuggcccugcaccggagcuaccugacccccggcgacagcagcagcggcuggaccgccggcgccgccgcauacuacgugggcuaccugcagccacggaccuuccugcugaaguacaacgagaacggcaccaucaccgacgccguggacugcgcccuggacccccugagcgagaccaagugcacccuaaagagcuucaccguggagaagggcaucuaccagaccagcaacuuccgggugcagcccacugagagcaucgugcgguuccccaacauuaccaaccugugucccuucggcgagguguucaacgccacccgguucgccagcguguacgccuggaaccggaagcggaucagcaacugcguggccgacuacagcgugcuguacaacagcgccagcuucagcaccuucaagugcuacggcgugagcccuaccaagcugaacgaccugugcuucaccaacguguacgcugacagcuucgugauccggggcgacgaggugcggcagaucgcccccggccagaccggcaagaucgccgacuacaacuacaagcugcccgacgacuucaccggcugcgugaucgccuggaacagcaacaaccuggacagcaaggugggcggcaacuacaacuaccuguaccggcuguuccguaagagcaaccugaagccauucgagcgggacaucagcaccgagaucuaccaggccggcagcacccccugcaacgguguggagggcuuuaacugcuacuucccccugcagagcuacggcuuccagcccaccaacggcgugggcuaccagcccuaccgggugguggugcugagcuucgagcugcugcacgcccccgccaccgugugcggcccuaaaaagagcaccaaccuggugaagaacaagugcgugaacuucaauuucaacggccugaccggcaccggcgugcugaccgagagcaacaagaaguuccugcccuuccagcaguucggccgggauaucgccgacaccaccgacgcagugcgggacccccagacccuggagauccuggacaucaccccaugcagcuucggcggcgugagcgucaucacccccggcacaaacaccagcaaccagguggccgugcuguaccaggacgugaacugcaccgaggugcccguggccauccacgccgaccagcugacccccaccuggcggguguacagcaccggaagcaacguguuccagacccgggccggcugccugaucggcgccgagcacgugaacaacuccuacgagugcgacauccccaucggcgcuggcaucugcgccagcuaccagacccagaccaacagcccccggcgggcccggagcguggccagccagagcaucaucgccuacaccaugagcuuaggcgccgagaacagcguggccuacagcaacaacagcaucgcgaucccuaccaacuucaccaucagcgugaccaccgagauacugcccgugagcaugaccaagaccagcguggacuguaccauguacaucugcggcgacagcaccgagugcagcaaccugcugcugcaguacggcagcuucugcacccagcugaaccgggcccugaccggcaucgccguggagcaggacaagaacacccaagagguguucgcccaggugaagcagaucuacaagacucccccaaucaaggacuucggcggcuucaacuucagccagauccugcccgaccccagcaagcccagcaagcggagcuucaucgaggaccugcuguucaacaaggugacccuggccgacgccggcuucaucaagcaguacggcgauugccugggcgacaucgccgcucgggaccugaucugcgcccagaaguucaacgggcugaccgugcugcccccucugcugaccgacgagaugaucgcccaguacaccagcgcccugcuugccggcaccaucaccagcggcuggaccuucggcgccggcgcagcccugcagauccccuucgccaugcagauggccuaccgguucaacggcaucggcgugacccagaacgugcuguacgagaaccagaagcugaucgccaaccaguucaacagcgccaucggcaagauccaggacagccugagcagcaccgccagcgcccugggcaagcugcaggacguggugaaccagaacgcucaggcccugaacacccuggugaagcagcugagcagcaacuucggcgccaucagcucagugcugaaugacauccugagcaggcuggaucccccagaggccgaggugcagaucgaccggcugaucaccggccggcugcagagccugcagaccuacgugacccagcagcugauccgggccgccgagauccgggccagcgccaaccuggcagccaccaagaugagcgagugcgugcugggccagagcaagcggguggacuuuugcggcaagggcuaccaccugaugagcuucccccagagcgcuccccacggcgugguguuccuccacgugacauacguccccgcccaggagaagaacuucaccaccgcccccgccauuugccacgacggcaaggcccacuucccccgggagggcguguucgugagcaacggaacccacugguucgugacccagcggaacuucuacgagccucagaucaucaccaccgacaacaccuucgugagcggcaacugcgacguggugaucggcaucgugaacaacaccguguacgacccccugcagcccgagcuggacagcuucaaggaggagcuggacaaguacuucaagaaccacaccagcccagacguggaccugggcgacaucagcggcaucaacgccagcguggugaacauccagaaggagaucgaccggcugaacgagguggccaagaaccugaacgagagccugaucgaccugcaggagcugggcaaguacgagcaguacaucaaguggcccugguacaucuggcugggcuucaucgccggccugaucgccaucgugauggugaccaucaugcugugcugcaugaccagcugcuguagcugccugaagggcugcugcagcugcggcagcugcugcaaguucgacgaggacgacagcgagcccgugcugaagggcgugaagcugcacuacaccugaggacuaguuauaagacugacuagcccgaugggccucccaacgggcccuccuccccuccuugcaccgagauuaauaaaaaaaaaaaaaaaaaaaaaaaaaaaaaaaaaaaaaaaaaaaaaaaaaaaaaaaaaaaaaaaaugcaucccccccccccccccccccccccccccccccaaaggcucuuuucagagccaccagaauu

SEQ ID NO: 23352 - RNA, 4039 nt, Artificial Sequence
  SARS-CoV-2/Wuhan/WIV05/2019__EPI_ISL_402128 spike protein mRNA gc (1-1273)(K986P_V987P_ D614G)
aggagaaagcuuaccauguucguguuccuggugcugcugccccuggugagcagccagugcgugaaccugaccacccggacccagcugcccccugccuacaccaacagcuucacccggggcguguacuaccccgacaagguguuccggagcagcgugcugcacagcacccaggaccuguuccugcccuucuucagcaacgugaccugguuccacgccauccacgugagcggcaccaacggcaccaagcgguucgacaacccagugcugcccuucaacgacggcguguacuucgccagcaccgagaagucaaacaucauccggggcuggaucuucggcaccacccuggacagcaagacacagagccugcugaucgugaacaacgccaccaacguggugaucaaggugugcgaguuucaguucugcaacgaccccuuccugggcguguacuaccacaagaacaacaagagcuggauggagagcgaguuccgggucuacagcagcgcuaacaauugcaccuucgaguacgugagccagcccuuccugauggaccucgagggcaagcagggcaacuucaagaaccugcgggaguucguguucaagaacaucgauggcuacuucaagaucuacagcaagcacacccccaucaaccuggugcgggaccugccccagggauucagcgcccuggagccucugguggaccugcccaucggcaucaacaucaccagguuccagacccugcuggcccugcaccggagcuaccugacccccggcgacagcagcagcggcuggaccgccggcgccgccgcauacuacgugggcuaccugcagccacggaccuuccugcugaaguacaacgagaacggcaccaucaccgacgccguggacugcgcccuggacccccugagcgagaccaagugcacccuaaagagcuucaccguggagaagggcaucuaccagaccagcaacuuccgggugcagcccacugagagcaucgugcgguuccccaacauuaccaaccugugucccuucggcgagguguucaacgccacccgguucgccagcguguacgccuggaaccggaagcggaucagcaacugcguggccgacuacagcgugcuguacaacagcgccagcuucagcaccuucaagugcuacggcgugagcccuaccaagcugaacgaccugugcuucaccaacguguacgcugacagcuucgugauccggggcgacgaggugcggcagaucgcccccggccagaccggcaagaucgccgacuacaacuacaagcugcccgacgacuucaccggcugcgugaucgccuggaacagcaacaaccuggacagcaaggugggcggcaacuacaacuaccuguaccggcuguuccguaagagcaaccugaagccauucgagcgggacaucagcaccgagaucuaccaggccggcagcacccccugcaacgguguggagggcuuuaacugcuacuucccccugcagagcuacggcuuccagcccaccaacggcgugggcuaccagcccuaccgggugguggugcugagcuucgagcugcugcacgcccccgccaccgugugcggcccuaaaaagagcaccaaccuggugaagaacaagugcgugaacuucaauuucaacggccugaccggcaccggcgugcugaccgagagcaacaagaaguuccugcccuuccagcaguucggccgggauaucgccgacaccaccgacgcagugcgggacccccagacccuggagauccuggacaucaccccaugcagcuucggcggcgugagcgucaucacccccggcacaaacaccagcaaccagguggccgugcuguaccagggagugaacugcaccgaggugcccguggccauccacgccgaccagcugacccccaccuggcggguguacagcaccggcagcaacguguuccagacccgggccggcugccugaucggcgccgagcacgugaacaacuccuacgagugcgacauccccaucggcgcuggcaucugcgccagcuaccagacccagaccaacagcccccggcgggcccggagcguggccagccagagcaucaucgccuacaccaugagcuuaggcgccgagaacagcguggccuacagcaacaacagcaucgcgaucccuaccaacuucaccaucagcgugaccaccgagauacugcccgugagcaugaccaagaccagcguggacuguaccauguacaucugcggcgacagcaccgagugcagcaaccugcugcugcaguacggcagcuucugcacccagcugaaccgggcccugaccggcaucgccguggagcaggacaagaacacccaagagguguucgcccaggugaagcagaucuacaagacucccccaaucaaggacuucggcggcuucaacuucagccagauccugcccgaccccagcaagcccagcaagcggagcuucaucgaggaccugcuguucaacaaggugacccuggccgacgccggcuucaucaagcaguacggcgacugccugggggauaucgccgcucgggaccugaucugcgcccagaaguucaacggccugaccgugcugcccccucugcugaccgacgagaugaucgcccaguacaccagcgcccugcuugccggcaccaucaccagcggcuggaccuucggcgccggcgcagcccugcagauccccuucgccaugcagauggccuaccgguucaacggcaucggcgugacccagaacgugcuguacgagaaccagaagcugaucgccaaccaguucaacagcgccaucggcaagauccaggacagccugagcagcaccgccagcgcccugggcaagcugcaggacguggugaaccagaacgcucaggcccugaacacccuggugaagcagcugagcagcaacuucggcgccaucagcucagugcugaaugacauccugagcaggcuggaucccccagaggccgaggugcagaucgaccggcugaucaccggccggcugcagagccugcagaccuacgugacccagcagcugauccgggccgccgagauccgggccagcgccaaccuggcagccaccaagaugagcgagugcgugcugggccagagcaagcggguggacuuuugcggcaagggcuaccaccugaugagcuucccccagagcgcuccccacggcgugguguuccuccacgugacauacguccccgcccaggagaagaacuucaccaccgcccccgccauuugccacgacggcaaggcccacuucccccgggagggaguguucgugagcaacggcacccacugguucgugacccagcggaacuucuacgagccucagaucaucaccaccgacaacaccuucgugagcggcaacugcgacguggugaucggcaucgugaacaacaccguguacgacccccugcagcccgagcuggacagcuucaaggaggagcuggacaaguacuucaagaaccacaccagcccagacguggaccugggcgacaucagcggcaucaacgccagcguggugaacauccagaaggagaucgaccggcugaacgagguggccaagaaccugaacgagagccugaucgaccugcaggagcugggcaaguacgagcaguacaucaaguggcccugguacaucuggcugggcuucaucgccggccugaucgccaucgugauggugaccaucaugcugugcugcaugaccagcugcuguagcugccugaagggcugcugcagcugcggcagcugcugcaaguucgacgaggacgacagcgagcccgugcugaagggcgugaagcugcacuacaccugaggacuaguuauaagacugacuagcccgaugggccucccaacgggcccuccuccccuccuugcaccgagauuaauaaaaaaaaaaaaaaaaaaaaaaaaaaaaaaaaaaaaaaaaaaaaaaaaaaaaaaaaaaaaaaaaugcaucccccccccccccccccccccccccccccccaaaggcucuuuucagagccaccagaauu

SEQ ID NO: 23353 - RNA, 4039 nt, Artificial Sequence
  SARS-CoV-2/Wuhan/WIV05/2019__EPI_ISL_402128 spike protein mRNA gc (1-1273)(K986P_V987P_A222V_D614G)
aggagaaagcuuaccauguucguguuccuggugcugcugccccuggugagcagccagugcgugaaccugaccacccggacccagcugcccccugccuacaccaacagcuucacccggggcguguacuaccccgacaagguguuccggagcagcgugcugcacagcacccaggaccuguuccugcccuucuucagcaacgugaccugguuccacgccauccacgugagcggcaccaacggcaccaagcgguucgacaacccagugcugcccuucaacgacggcguguacuucgccagcaccgagaagucaaacaucauccggggcuggaucuucggcaccacccuggacagcaagacacagagccugcugaucgugaacaacgccaccaacguggugaucaaggugugcgaguuucaguucugcaacgaccccuuccugggcguguacuaccacaagaacaacaagagcuggauggagagcgaguuccgggucuacagcagcgcuaacaauugcaccuucgaguacgugagccagcccuuccugauggaccucgagggcaagcagggcaacuucaagaaccugcgggaguucguguucaagaacaucgauggcuacuucaagaucuacagcaagcacacccccaucaaccuggugcgggaccugccccagggauucagcgugcuggagccucugguggaccugcccaucggcaucaacaucaccagguuccagacccugcuggcccugcaccggagcuaccugacccccggcgacagcagcagcggcuggaccgccggcgccgccgccuacuacgugggcuaccugcagccacggaccuuccugcugaaguacaacgagaacggcaccaucaccgacgcaguggacugcgcccuggacccccugagcgagaccaagugcacccuaaagagcuucaccguggagaagggcaucuaccagaccagcaacuuccgggugcagcccacugagagcaucgugcgguuccccaacauuaccaaccugugucccuucggcgagguguucaacgccacccgguucgccagcguguacgccuggaaccggaagcggaucagcaacugcguggccgacuacagcgugcuguacaacagcgccagcuucagcaccuucaagugcuacggcgugagcccuaccaagcugaacgaccugugcuucaccaacguguacgccgacagcuucgugauccggggcgacgaggugcggcagaucgcucccggccagaccggcaagaucgccgacuacaacuacaagcugcccgacgacuucaccggcugcgugaucgccuggaacagcaacaaccuggacagcaaggugggcggcaacuacaacuaccuguaccggcuguuccguaagagcaaccugaagccauucgagcgggacaucagcaccgagaucuaccaggccggcagcacccccugcaacgguguggagggcuuuaacugcuacuucccccugcagagcuacggcuuccagcccaccaacggcgugggcuaccagcccuaccgggugguggugcugagcuucgagcugcugcacgcccccgccaccgugugcggcccuaaaaagagcaccaaccuggugaagaacaagugcgugaacuucaauuucaacggccugaccggcaccggcgugcugaccgagagcaacaagaaguuccugcccuuccagcaguucggccgggauaucgccgacaccaccgacgccgugcgggacccccagacccuggagauccuggacaucaccccaugcagcuucggcggcgucagcgugaucacccccggcacaaacaccagcaaccagguggcagugcuguaccagggagugaacugcaccgaggugcccguggccauccacgccgaccagcugacccccaccuggcggguguacagcaccggcagcaacguguuccagacccgggccggcugccugaucggcgccgagcacgugaacaacuccuacgagugcgacauccccaucggcgccggcaucugcgcuagcuaccagacccagaccaacagcccccggcgggcccggagcguggccagccagagcaucaucgccuacaccaugagcuuaggcgccgagaacagcguggccuacagcaacaacagcaucgccaucccuaccaacuucaccaucagcgugaccaccgagauacugcccgugagcaugaccaagaccagcguggacuguaccauguacaucugcggcgacagcaccgagugcagcaaccugcugcugcaguacggcagcuucugcacccagcugaaccgggcgcugaccggcaucgccguggagcaggacaagaacacccaagagguguucgcccaggugaagcagaucuacaagacucccccaaucaaggacuucggcggcuucaacuucagccagauccugcccgaccccagcaagcccagcaagcggagcuucaucgaggaccugcuguucaacaaggugacccuggccgacgccggcuucaucaagcaguacggcgacugccugggggauaucgccgcccgggaccugaucugcgcucagaaguucaacggccugaccgugcugcccccucugcugaccgacgagaugaucgcccaguacaccagcgcccugcuugccggcaccaucaccagcggcuggaccuucggcgccggcgccgcacugcagauccccuucgccaugcagauggccuaccgguucaacggcaucggcgugacccagaacgugcuguacgagaaccagaagcugaucgccaaccaguucaacagcgccaucggcaagauccaggacagccugagcagcaccgccagcgcccugggcaagcugcaggacguggugaaccagaacgcccaggcucugaacacccuggugaagcagcugagcagcaacuucggcgccaucagcucagugcugaaugacauccugagcaggcuggaucccccagaggccgaggugcagaucgaccggcugaucaccggccggcugcagagccugcagaccuacgugacccagcagcugauccgggccgccgagauccgggccagcgccaaccuggccgcaaccaagaugagcgagugcgugcugggccagagcaagcggguggacuuuugcggcaagggcuaccaccugaugagcuucccccagagcgcuccccacggcgugguguuccuccacgucacauacgugcccgcccaggagaagaacuucaccaccgcccccgccauuugccacgacggcaaggcccacuucccccgggagggaguguucgugagcaacggcacccacugguucgugacccagcggaacuucuacgagccucagaucaucaccaccgacaacaccuucgugagcggcaacugcgacguggugaucggcaucgugaacaacaccguguacgacccccugcagcccgagcuggacagcuucaaggaggagcuggacaaguacuucaagaaccacaccagcccagacguggaccugggcgacaucagcggcaucaacgccagcguggugaacauccagaaggagaucgaccggcugaacgagguggccaagaaccugaacgagagccugaucgaccugcaggagcugggcaaguacgagcaguacaucaaguggcccugguacaucuggcugggcuucaucgccggccugaucgccaucgugauggugaccaucaugcugugcugcaugaccagcugcuguagcugccugaagggcugcugcagcugcggcagcugcugcaaguucgacgaggacgacagcgagcccgugcugaagggcgugaagcugcacuacaccugaggacuaguuauaagacugacuagcccgaugggccucccaacgggcccuccuccccuccuugcaccgagauuaauaaaaaaaaaaaaaaaaaaaaaaaaaaaaaaaaaaaaaaaaaaaaaaaaaaaaaaaaaaaaaaaaugcaucccccccccccccccccccccccccccccccaaaggcucuuuucagagccaccagaauu

SEQ ID NO: 23354 - RNA, 4039 nt, Artificial Sequence
  SARS-CoV-2/Wuhan/WIV05/2019__EPI_ISL_402128 spike protein mRNA gc (1-1273)(K986P_V987P_N439K_D614G)
aggagaaagcuuaccauguucguguuccuggugcugcugccccuggugagcagccagugcgugaaccugaccacccggacccagcugcccccugccuacaccaacagcuucacccggggcguguacuaccccgacaagguguuccggagcagcgugcugcacagcacccaggaccuguuccugcccuucuucagcaacgugaccugguuccacgccauccacgugagcggcaccaacggcaccaagcgguucgacaacccagugcugcccuucaacgacggcguguacuucgccagcaccgagaagucaaacaucauccggggcuggaucuucggcaccacccuggacagcaagacacagagccugcugaucgugaacaacgccaccaacguggugaucaaggugugcgaguuucaguucugcaacgaccccuuccugggcguguacuaccacaagaacaacaagagcuggauggagagcgaguuccgggucuacagcagcgcuaacaauugcaccuucgaguacgugagccagcccuuccugauggaccucgagggcaagcagggcaacuucaagaaccugcgggaguucguguucaagaacaucgauggcuacuucaagaucuacagcaagcacacccccaucaaccuggugcgggaccugccccagggauucagcgcccuggagccucugguggaccugcccaucggcaucaacaucaccagguuccagacccugcuggcccugcaccggagcuaccugacccccggcgacagcagcagcggcuggaccgccggcgccgccgcauacuacgugggcuaccugcagccacggaccuuccugcugaaguacaacgagaacggcaccaucaccgacgccguggacugcgcccuggacccccugagcgagaccaagugcacccuaaagagcuucaccguggagaagggcaucuaccagaccagcaacuuccgggugcagcccacugagagcaucgugcgguuccccaacauuaccaaccugugucccuucggcgagguguucaacgccacccgguucgccagcguguacgccuggaaccggaagcggaucagcaacugcguggccgacuacagcgugcuguacaacagcgccagcuucagcaccuucaagugcuacggcgugagcccuaccaagcugaacgaccugugcuucaccaacguguacgcugacagcuucgugauccggggcgacgaggugcggcagaucgcccccggccagaccggcaagaucgccgacuacaacuacaagcugcccgacgacuucaccggcugcgugaucgccuggaacagcaagaaccuggacagcaaggugggcggcaacuacaacuaccuguaccggcuguuccguaagagcaaccugaagccauucgagcgggacaucagcaccgagaucuaccaggccggcagcacccccugcaacgguguggagggcuuuaacugcuacuucccccugcagagcuacggcuuccagcccaccaacggcgugggcuaccagcccuaccgggugguggugcugagcuucgagcugcugcacgcccccgccaccgugugcggcccuaaaaagagcaccaaccuggugaagaacaagugcgugaacuucaacuucaauggccugaccggcaccggcgugcugaccgagagcaacaagaaguuccugcccuuccagcaguucggccgggauaucgccgacaccaccgacgcagugcgggacccccagacccuggagauccuggacaucaccccaugcagcuucggcggcgugagcgucaucacccccggcacaaacaccagcaaccagguggccgugcuguaccagggagugaacugcaccgaggugcccguggccauccacgccgaccagcugacccccaccuggcggguguacagcaccggcagcaacguguuccagacccgggccggcugccugaucggcgccgagcacgugaacaacuccuacgagugcgacauccccaucggcgcuggcaucugcgccagcuaccagacccagaccaacagcccccggcgggcccggagcguggccagccagagcaucaucgccuacaccaugagcuuaggcgccgagaacagcguggccuacagcaacaacagcaucgcgaucccuaccaacuucaccaucagcgugaccaccgagauacugcccgugagcaugaccaagaccagcguggacuguaccauguacaucugcggcgacagcaccgagugcagcaaccugcugcugcaguacggcagcuucugcacccagcugaaccgggcccugaccggcaucgccguggagcaggacaagaacacccaagagguguucgcccaggugaagcagaucuacaagacucccccaaucaaggacuucggcggcuucaacuucagccagauccugcccgaccccagcaagcccagcaagcggagcuucaucgaggaccugcuguucaacaaggugacccuggccgacgccggcuucaucaagcaguacggcgacugccugggggauaucgccgcucgggaccugaucugcgcccagaaguucaacggccugaccgugcugcccccucugcugaccgacgagaugaucgcccaguacaccagcgcccugcuugccggcaccaucaccagcggcuggaccuucggcgccggcgcagcccugcagauccccuucgccaugcagauggccuaccgguucaacggcaucggcgugacccagaacgugcuguacgagaaccagaagcugaucgccaaccaguucaacagcgccaucggcaagauccaggacagccugagcagcaccgccagcgcccugggcaagcugcaggacguggugaaccagaacgcucaggcccugaacacccuggugaagcagcugagcagcaacuucggcgccaucagcucagugcugaacgacauccugagcaggcuggaucccccagaggccgaggugcagaucgaccggcugaucaccggccggcugcagagccugcagaccuacgugacccagcagcugauccgggccgccgagauccgggccagcgccaaucuggcagccaccaagaugagcgagugcgugcugggccagagcaagcggguggacuuuugcggcaagggcuaccaccugaugagcuucccccagagcgcuccccacggcgugguguuccuccacgugacauacguccccgcccaggagaagaacuucaccaccgcccccgccauuugccacgacggcaaggcccacuucccccgggagggaguguucgugagcaacggcacccacugguucgugacccagcggaacuucuacgagccucagaucaucaccaccgacaacaccuucgugagcggcaacugcgacguggugaucggcaucgugaacaacaccguguacgacccccugcagcccgagcuggacagcuucaaggaggagcuggacaaguacuucaagaaccacaccagcccagacguggaccugggcgacaucagcggcaucaacgccagcguggugaacauccagaaggagaucgaccggcugaacgagguggccaagaaccugaacgagagccugaucgaccugcaggagcugggcaaguacgagcaguacaucaaguggcccugguacaucuggcugggcuucaucgccggccugaucgccaucgugauggugaccaucaugcugugcugcaugaccagcugcuguagcugccugaagggcugcugcagcugcggcagcugcugcaaguucgacgaggacgacagcgagcccgugcugaagggcgugaagcugcacuacaccugaggacuaguuauaagacugacuagcccgaugggccucccaacgggcccuccuccccuccuugcaccgagauuaauaaaaaaaaaaaaaaaaaaaaaaaaaaaaaaaaaaaaaaaaaaaaaaaaaaaaaaaaaaaaaaaaugcaucccccccccccccccccccccccccccccccaaaggcucuuuucagagccaccagaauu

SEQ ID NO: 23355 - RNA, 4039 nt, Artificial Sequence
  SARS-CoV-2/Wuhan/WIV05/2019__EPI_ISL_402128 spike protein mRNA gc (1-1273)(K986P_V987P_S477N_D614G)
aggagaaagcuuaccauguucguguuccuggugcugcugccccuggugagcagccagugcgugaaccugaccacccggacccagcugcccccugccuacaccaacagcuucacccggggcguguacuaccccgacaagguguuccggagcagcgugcugcacagcacccaggaccuguuccugcccuucuucagcaacgugaccugguuccacgccauccacgugagcggcaccaacggcaccaagcgguucgacaacccagugcugcccuucaacgacggcguguacuucgccagcaccgagaagucaaacaucauccggggcuggaucuucggcaccacccuggacagcaagacacagagccugcugaucgugaacaacgccaccaacguggugaucaaggugugcgaguuucaguucugcaacgaccccuuccugggcguguacuaccacaagaacaacaagagcuggauggagagcgaguuccgggucuacagcagcgcuaacaauugcaccuucgaguacgugagccagcccuuccugauggaccucgagggcaagcagggcaacuucaagaaccugcgggaguucguguucaagaacaucgauggcuacuucaagaucuacagcaagcacacccccaucaaccuggugcgggaccugccccagggauucagcgcccuggagccucugguggaccugcccaucggcaucaacaucaccagguuccagacccugcuggcccugcaccggagcuaccugacccccggcgacagcagcagcggcuggaccgccggcgccgccgcauacuacgugggcuaccugcagccacggaccuuccugcugaaguacaacgagaacggcaccaucaccgacgccguggacugcgcccuggacccccugagcgagaccaagugcacccuaaagagcuucaccguggagaagggcaucuaccagaccagcaacuuccgggugcagcccacugagagcaucgugcgguuccccaacauuaccaaccugugucccuucggcgagguguucaacgccacccgguucgccagcguguacgccuggaaccggaagcggaucagcaacugcguggccgacuacagcgugcuguacaacagcgccagcuucagcaccuucaagugcuacggcgugagcccuaccaagcugaacgaccugugcuucaccaacguguacgcugacagcuucgugauccggggcgacgaggugcggcagaucgcccccggccagaccggcaagaucgccgacuacaacuacaagcugcccgacgacuucaccggcugcgugaucgccuggaacagcaacaaccuggacagcaaggugggcggcaacuacaacuaccuguaccggcuguuccguaagagcaaccugaagccauucgagcgggacaucagcaccgagaucuaccaggccggcaacacccccugcaacgguguggagggcuuuaacugcuacuucccccugcagagcuacggcuuccagcccaccaacggcgugggcuaccagcccuaccgggugguggugcugagcuucgagcugcugcacgcccccgccaccgugugcggcccuaaaaagagcaccaaccuggugaagaacaagugcgugaauuucaacuucaacggccugaccggcaccggcgugcugaccgagagcaacaagaaguuccugcccuuccagcaguucggccgggauaucgccgacaccaccgacgcagugcgggacccccagacccuggagauccuggacaucaccccaugcagcuucggcggcgugagcgucaucacccccggcacaaacaccagcaaccagguggccgugcuguaccagggagugaacugcaccgaggugcccguggccauccacgccgaccagcugacccccaccuggcggguguacagcaccggcagcaacguguuccagacccgggccggcugccugaucggcgccgagcacgugaacaacagcuacgagugcgacauccccaucggcgcuggcaucugcgccuccuaccagacccagaccaacagcccccggcgggcccggagcguggccagccagagcaucaucgccuacaccaugagcuuaggcgccgagaacagcguggccuacagcaacaacagcaucgcgaucccuaccaacuucaccaucagcgugaccaccgagauacugcccgugagcaugaccaagaccagcguggacuguaccauguacaucugcggcgacagcaccgagugcagcaaccugcugcugcaguacggcagcuucugcacccagcugaaccgggcccugaccggcaucgccguggagcaggacaagaacacccaagagguguucgcccaggugaagcagaucuacaagacucccccaaucaaggacuucggcggcuucaacuucagccagauccugcccgaccccagcaagcccagcaagcggagcuucaucgaggaccugcuguucaacaaggugacccuggccgacgccggcuucaucaagcaguacggcgacugccugggggauaucgccgcucgggaccugaucugcgcccagaaguucaacggccugaccgugcugcccccucugcugaccgacgagaugaucgcccaguacaccagcgcccugcuugccggcaccaucaccagcggcuggaccuucggcgccggcgcagcccugcagauccccuucgccaugcagauggccuaccgguucaacggcaucggcgugacccagaacgugcuguacgagaaccagaagcugaucgccaaccaguucaacagcgccaucggcaagauccaggacagccugagcagcaccgccagcgcccugggcaagcugcaggacguggugaaccagaacgcucaggcccugaacacccuggugaagcagcugagcagcaauuucggcgccaucagcagcgugcugaacgacauccugucaaggcuggaucccccagaggccgaggugcagaucgaccggcugaucaccggccggcugcagagccugcagaccuacgugacccagcagcugauccgggccgccgagauccgggccagcgccaaccuggcagccaccaagaugagcgagugcgugcugggccagagcaagcggguggacuuuugcggcaagggcuaccaccugaugagcuucccccagagcgcuccccacggcgugguguuccuccacgugacauacguccccgcccaggagaagaacuucaccaccgcccccgccauuugccacgacggcaaggcccacuucccccgggagggaguguucgugagcaacggcacccacugguucgugacccagcggaacuucuacgagccucagaucaucaccaccgacaacaccuucgugagcggcaacugcgacguggugaucggcaucgugaacaacaccguguacgacccccugcagcccgagcuggacagcuucaaggaggagcuggacaaguacuucaagaaccacaccagcccagacguggaccugggcgacaucagcggcaucaacgccagcguggugaacauccagaaggagaucgaccggcugaacgagguggccaagaaccugaacgagagccugaucgaccugcaggagcugggcaaguacgagcaguacaucaaguggcccugguacaucuggcugggcuucaucgccggccugaucgccaucgugauggugaccaucaugcugugcugcaugaccagcugcuguagcugccugaagggcugcugcagcugcggcagcugcugcaaguucgacgaggacgacagcgagcccgugcugaagggcgugaagcugcacuacaccugaggacuaguuauaagacugacuagcccgaugggccucccaacgggcccuccuccccuccuugcaccgagauuaauaaaaaaaaaaaaaaaaaaaaaaaaaaaaaaaaaaaaaaaaaaaaaaaaaaaaaaaaaaaaaaaaugcaucccccccccccccccccccccccccccccccaaaggcucuuuucagagccaccagaauu

SEQ ID NO: 23356 - RNA, 4039 nt, Artificial Sequence
  SARS-CoV-2/Wuhan/WIV05/2019__EPI_ISL_402128 spike protein mRNA gc (1-1273)(K986P_V987P_N501Y_D614G)
aggagaaagcuuaccauguucguguuccuggugcugcugccccuggugagcagccagugcgugaaccugaccacccggacccagcugcccccugccuacaccaacagcuucacccggggcguguacuaccccgacaagguguuccggagcagcgugcugcacagcacccaggaccuguuccugcccuucuucagcaacgugaccugguuccacgccauccacgugagcggcaccaacggcaccaagcgguucgacaacccagugcugcccuucaacgacggcguguacuucgccagcaccgagaagucaaacaucauccggggcuggaucuucggcaccacccuggacagcaagacacagagccugcugaucgugaacaacgccaccaacguggugaucaaggugugcgaguuucaguucugcaacgaccccuuccugggcguguacuaccacaagaacaacaagagcuggauggagagcgaguuccgggucuacagcagcgcuaacaauugcaccuucgaguacgugagccagcccuuccugauggaccucgagggcaagcagggcaacuucaagaaccugcgggaguucguguucaagaacaucgauggcuacuucaagaucuacagcaagcacacccccaucaaccuggugcgggaccugccccagggauucagcgcccuggagccucugguggaccugcccaucggcaucaacaucaccagguuccagacccugcuggcccugcaccggagcuaccugacccccggcgacagcagcagcggcuggaccgccggcgccgccgcauacuacgugggcuaccugcagccacggaccuuccugcugaaguacaacgagaacggcaccaucaccgacgccguggacugcgcccuggacccccugagcgagaccaagugcacccuaaagagcuucaccguggagaagggcaucuaccagaccagcaacuuccgggugcagcccacugagagcaucgugcgguuccccaacauuaccaaccugugucccuucggcgagguguucaacgccacccgguucgccagcguguacgccuggaaccggaagcggaucagcaacugcguggccgacuacagcgugcuguacaacagcgccagcuucagcaccuucaagugcuacggcgugagcccuaccaagcugaacgaccugugcuucaccaacguguacgcugacagcuucgugauccggggcgacgaggugcggcagaucgcccccggccagaccggcaagaucgccgacuacaacuacaagcugcccgacgacuucaccggcugcgugaucgccuggaacagcaacaaccuggacagcaaggugggcggcaacuacaacuaccuguaccggcuguuccguaagagcaaccugaagccauucgagcgggacaucagcaccgagaucuaccaggccggcagcacccccugcaacgguguggagggcuuuaacugcuacuucccccugcagagcuacggcuuccagcccaccuacggcgugggcuaccagcccuaccgggugguggugcugagcuucgagcugcugcacgcccccgccaccgugugcggcccuaaaaagagcaccaaccuggugaagaacaagugcgugaacuucaacuucaauggccugaccggcaccggcgugcugaccgagagcaacaagaaguuccugcccuuccagcaguucggccgggauaucgccgacaccaccgacgcagugcgggacccccagacccuggagauccuggacaucaccccaugcagcuucggcggcgugagcgucaucacccccggcacaaacaccagcaaccagguggccgugcuguaccagggagugaacugcaccgaggugcccguggccauccacgccgaccagcugacccccaccuggcggguguacagcaccggcagcaacguguuccagacccgggccggcugccugaucggcgccgagcacgugaacaacuccuacgagugcgacauccccaucggcgcuggcaucugcgccagcuaccagacccagaccaacagcccccggcgggcccggagcguggccagccagagcaucaucgccuacaccaugagcuuaggcgccgagaacagcguggccuacagcaacaacagcaucgcgaucccuaccaacuucaccaucagcgugaccaccgagauacugcccgugagcaugaccaagaccagcguggacuguaccauguacaucugcggcgacagcaccgagugcagcaaccugcugcugcaguacggcagcuucugcacccagcugaaccgggcccugaccggcaucgccguggagcaggacaagaacacccaagagguguucgcccaggugaagcagaucuacaagacucccccaaucaaggacuucggcggcuucaacuucagccagauccugcccgaccccagcaagcccagcaagcggagcuucaucgaggaccugcuguucaacaaggugacccuggccgacgccggcuucaucaagcaguacggcgacugccugggggauaucgccgcucgggaccugaucugcgcccagaaguucaacggccugaccgugcugcccccucugcugaccgacgagaugaucgcccaguacaccagcgcccugcuugccggcaccaucaccagcggcuggaccuucggcgccggcgcagcccugcagauccccuucgccaugcagauggccuaccgguucaacggcaucggcgugacccagaacgugcuguacgagaaccagaagcugaucgccaaccaguucaacagcgccaucggcaagauccaggacagccugagcagcaccgccagcgcccugggcaagcugcaggacguggugaaccagaacgcucaggcccugaacacccuggugaagcagcugagcagcaacuucggcgccaucagcucagugcugaacgacauccugagcaggcuggaucccccagaggccgaggugcagaucgaccggcugaucaccggccggcugcagagccugcagaccuacgugacccagcagcugauccgggccgccgagauccgggccagcgccaaucuggcagccaccaagaugagcgagugcgugcugggccagagcaagcggguggacuuuugcggcaagggcuaccaccugaugagcuucccccagagcgcuccccacggcgugguguuccuccacgugacauacguccccgcccaggagaagaacuucaccaccgcccccgccauuugccacgacggcaaggcccacuucccccgggagggaguguucgugagcaacggcacccacugguucgugacccagcggaacuucuacgagccucagaucaucaccaccgacaacaccuucgugagcggcaacugcgacguggugaucggcaucgugaacaacaccguguacgacccccugcagcccgagcuggacagcuucaaggaggagcuggacaaguacuucaagaaccacaccagcccagacguggaccugggcgacaucagcggcaucaacgccagcguggugaacauccagaaggagaucgaccggcugaacgagguggccaagaaccugaacgagagccugaucgaccugcaggagcugggcaaguacgagcaguacaucaaguggcccugguacaucuggcugggcuucaucgccggccugaucgccaucgugauggugaccaucaugcugugcugcaugaccagcugcuguagcugccugaagggcugcugcagcugcggcagcugcugcaaguucgacgaggacgacagcgagcccgugcugaagggcgugaagcugcacuacaccugaggacuaguuauaagacugacuagcccgaugggccucccaacgggcccuccuccccuccuugcaccgagauuaauaaaaaaaaaaaaaaaaaaaaaaaaaaaaaaaaaaaaaaaaaaaaaaaaaaaaaaaaaaaaaaaaugcaucccccccccccccccccccccccccccccccaaaggcucuuuucagagccaccagaauu

SEQ ID NO: 23357 - RNA, 4033 nt, Artificial Sequence
  SARS-CoV-2/Wuhan/WIV05/2019__EPI_ISL_402128 spike protein mRNA gc (1-1273)(K986P_V987P_H69del_V70del_D614G)
aggagaaagcuuaccauguucguguuccuggugcugcugccccuggugagcagccagugcgugaaccugaccacccggacccagcugcccccugccuacaccaacagcuucacccggggcguguacuaccccgacaagguguuccggagcagcgugcugcacagcacccaggaccuguuccugcccuucuucagcaacgugaccugguuccacgccaucagcggcaccaacggcaccaagcgguucgacaacccagugcugcccuucaacgacggcguguacuucgccagcaccgagaagucaaacaucauccggggcuggaucuucggcaccacccuggacagcaagacacagagccugcugaucgugaacaacgccaccaacguggugaucaaggugugcgaguuucaguucugcaacgaccccuuccugggcguguacuaccacaagaacaacaagagcuggauggagagcgaguuccggguguacagcagcgcuaacaauugcaccuucgaguacgucagccagcccuuccugauggaccucgagggcaagcagggcaacuucaagaaccugcgggaguucguguucaagaacaucgauggcuacuucaagaucuacagcaagcacacccccaucaaccuggugcgggaccugccccagggauucagcgcccuggagccucugguggaccugcccaucggcaucaacaucaccagguuccagacccugcuggcccugcaccggagcuaccugacccccggcgacagcagcagcggcuggaccgccggcgccgccgcauacuacgugggcuaccugcagccacggaccuuccugcugaaguacaacgagaacggcaccaucaccgacgccguggacugcgcccuggacccccugagcgagaccaagugcacccuaaagagcuucaccguggagaagggcaucuaccagaccagcaacuuccgggugcagcccacugagagcaucgugcgguuccccaacauuaccaaccugugucccuucggcgagguguucaacgccacccgguucgccagcguguacgccuggaaccggaagcggaucagcaacugcguggccgacuacagcgugcuguacaacagcgccagcuucagcaccuucaagugcuacggcgugagcccuaccaagcugaacgaccugugcuucaccaacguguacgcugacagcuucgugauccggggcgacgaggugcggcagaucgcccccggccagaccggcaagaucgccgacuacaacuacaagcugcccgacgacuucaccggcugcgugaucgccuggaacagcaacaaccuggacagcaaggugggcggcaacuacaacuaccuguaccggcuguuccguaagagcaaccugaagccauucgagcgggacaucagcaccgagaucuaccaggccggcagcacccccugcaacgguguggagggcuuuaacugcuacuucccccugcagagcuacggcuuccagcccaccaacggcgugggcuaccagcccuaccgggugguggugcugagcuucgagcugcugcacgcccccgccaccgugugcggcccuaaaaagagcaccaaccuggugaagaacaagugcgugaacuucaauuucaacggccugaccggcaccggcgugcugaccgagagcaacaagaaguuccugcccuuccagcaguucggccgggauaucgccgacaccaccgacgcagugcgggacccccagacccuggagauccuggacaucaccccaugcagcuucggcggcgugagcgugaucacccccggcacaaacaccagcaaccaggucgccgugcuguaccagggagugaacugcaccgaggugcccguggccauccacgccgaccagcugacccccaccuggcggguguacagcaccggcagcaacguguuccagacccgggccggcugccugaucggcgccgagcacgugaacaacuccuacgagugcgacauccccaucggcgcuggcaucugcgccagcuaccagacccagaccaacagcccccggcgggcccggagcguggccagccagagcaucaucgccuacaccaugagcuuaggcgccgagaacagcguggccuacagcaacaacagcaucgcgaucccuaccaacuucaccaucagcgugaccaccgagauacugcccgugagcaugaccaagaccagcguggacuguaccauguacaucugcggcgacagcaccgagugcagcaaccugcugcugcaguacggcagcuucugcacccagcugaaccgggcccugaccggcaucgccguggagcaggacaagaacacccaagagguguucgcccaggugaagcagaucuacaagacucccccaaucaaggacuucggcggcuucaacuucagccagauccugcccgaccccagcaagcccagcaagcggagcuucaucgaggaccugcuguucaacaaggugacccuggccgacgccggcuucaucaagcaguacggcgacugccugggggauaucgccgcucgggaccugaucugcgcccagaaguucaacggccugaccgugcugcccccucugcugaccgacgagaugaucgcccaguacaccagcgcccugcuugccggcaccaucaccagcggcuggaccuucggcgccggcgcagcccugcagauccccuucgccaugcagauggccuaccgguucaacggcaucggcgugacccagaacgugcuguacgagaaccagaagcugaucgccaaccaguucaacagcgccaucggcaagauccaggacagccugagcagcaccgccagcgcccugggcaagcugcaggacguggugaaccagaacgcucaggcccugaacacccuggugaagcagcugagcagcaacuucggcgccaucagcucagugcugaaugacauccugagcaggcuggaucccccagaggccgaggugcagaucgaccggcugaucaccggccggcugcagagccugcagaccuacgugacccagcagcugauccgggccgccgagauccgggccagcgccaaccuggcagccaccaagaugagcgagugcgugcugggccagagcaagcggguggacuuuugcggcaagggcuaccaccugaugagcuucccccagagcgcuccccacggcgugguguuccuccacgugacauacgugcccgcccaggagaagaacuucaccaccgcccccgccauuugccacgacggcaaggcccacuucccccgggagggagucuucgugagcaacggcacccacugguucgugacccagcggaacuucuacgagccucagaucaucaccaccgacaacaccuucgugagcggcaacugcgacguggugaucggcaucgugaacaacaccguguacgacccccugcagcccgagcuggacagcuucaaggaggagcuggacaaguacuucaagaaccacaccagcccagacguggaccugggcgacaucagcggcaucaacgccagcguggugaacauccagaaggagaucgaccggcugaacgagguggccaagaaccugaacgagagccugaucgaccugcaggagcugggcaaguacgagcaguacaucaaguggcccugguacaucuggcugggcuucaucgccggccugaucgccaucgugauggugaccaucaugcugugcugcaugaccagcugcuguagcugccugaagggcugcugcagcugcggcagcugcugcaaguucgacgaggacgacagcgagcccgugcugaagggcgugaagcugcacuacaccugaggacuaguuauaagacugacuagcccgaugggccucccaacgggcccuccuccccuccuugcaccgagauuaauaaaaaaaaaaaaaaaaaaaaaaaaaaaaaaaaaaaaaaaaaaaaaaaaaaaaaaaaaaaaaaaaugcaucccccccccccccccccccccccccccccccaaaggcucuuuucagagccaccagaauu

SEQ ID NO: 23358 - RNA, 4039 nt, Artificial Sequence
  SARS-CoV-2/Wuhan/WIV05/2019__EPI_ISL_402128 spike protein mRNA gc (1-1273)(K986P_V987P_Y453F_D614G)
aggagaaagcuuaccauguucguguuccuggugcugcugccccuggugagcagccagugcgugaaccugaccacccggacccagcugcccccugccuacaccaacagcuucacccggggcguguacuaccccgacaagguguuccggagcagcgugcugcacagcacccaggaccuguuccugcccuucuucagcaacgugaccugguuccacgccauccacgugagcggcaccaacggcaccaagcgguucgacaacccagugcugcccuucaacgacggcguguacuucgccagcaccgagaagucaaacaucauccggggcuggaucuucggcaccacccuggacagcaagacacagagccugcugaucgugaacaacgccaccaacguggugaucaaggugugcgaguuucaguucugcaacgaccccuuccugggcguguacuaccacaagaacaacaagagcuggauggagagcgaguuccgggucuacagcagcgcuaacaauugcaccuucgaguacgugagccagcccuuccugauggaccucgagggcaagcagggcaacuucaagaaccugcgggaguucguguucaagaacaucgauggcuacuucaagaucuacagcaagcacacccccaucaaccuggugcgggaccugccccagggauucagcgcccuggagccucugguggaccugcccaucggcaucaacaucaccagguuccagacccugcuggcccugcaccggagcuaccugacccccggcgacagcagcagcggcuggaccgccggcgccgccgcauacuacgugggcuaccugcagccacggaccuuccugcugaaguacaacgagaacggcaccaucaccgacgccguggacugcgcccuggacccccugagcgagaccaagugcacccuaaagagcuucaccguggagaagggcaucuaccagaccagcaacuuccgggugcagcccacugagagcaucgugcgguuccccaacauuaccaaccugugucccuucggcgagguguucaacgccacccgguucgccagcguguacgccuggaaccggaagcggaucagcaacugcguggccgacuacagcgugcuguacaacagcgccagcuucagcaccuucaagugcuacggcgugagcccuaccaagcugaacgaccugugcuucaccaacguguacgcugacagcuucgugauccggggcgacgaggugcggcagaucgcccccggccagaccggcaagaucgccgacuacaacuacaagcugcccgacgacuucaccggcugcgugaucgccuggaacagcaacaaccuggacagcaaggugggcggcaacuacaacuaccuguuccggcuguuccguaagagcaaccugaagccauuugagcgggacaucagcaccgagaucuaccaggccggcagcacccccugcaacgguguggagggcuucaacugcuacuucccccugcagagcuacggcuuccagcccaccaacggcgugggcuaccagcccuaccgggugguggugcugagcuucgagcugcugcacgcccccgccaccgugugcggcccuaaaaagagcaccaaccuggugaagaacaagugcgugaacuucaauuucaacggccugaccggcaccggcgugcugaccgagagcaacaagaaguuccugcccuuccagcaguucggccgggauaucgccgacaccaccgacgcagugcgggacccccagacccuggagauccuggacaucaccccaugcagcuucggcggcgugagcgucaucacccccggcacaaacaccagcaaccagguggccgugcuguaccagggagugaacugcaccgaggugcccguggccauccacgccgaccagcugacccccaccuggcggguguacagcaccggcagcaacguguuccagacccgggccggcugccugaucggcgccgagcacgugaacaacuccuacgagugcgacauccccaucggcgcuggcaucugcgccagcuaccagacccagaccaacagcccccggcgggcccggagcguggccagccagagcaucaucgccuacaccaugagcuuaggcgccgagaacagcguggccuacagcaacaacagcaucgcgaucccuaccaacuucaccaucagcgugaccaccgagauacugcccgugagcaugaccaagaccagcguggacuguaccauguacaucugcggcgacagcaccgagugcagcaaccugcugcugcaguacggcagcuucugcacccagcugaaccgggcccugaccggcaucgccguggagcaggacaagaacacccaagagguguucgcccaggugaagcagaucuacaagacucccccaaucaaggacuucggcggcuucaacuucagccagauccugcccgaccccagcaagcccagcaagcggagcuucaucgaggaccugcuguucaacaaggugacccuggccgacgccggcuucaucaagcaguacggcgacugccugggggauaucgccgcucgggaccugaucugcgcccagaaguucaacggccugaccgugcugcccccucugcugaccgacgagaugaucgcccaguacaccagcgcccugcuugccggcaccaucaccagcggcuggaccuucggcgccggcgcagcccugcagauccccuucgccaugcagauggccuaccgguucaacggcaucggcgugacccagaacgugcuguacgagaaccagaagcugaucgccaaccaguucaacagcgccaucggcaagauccaggacagccugagcagcaccgccagcgcccugggcaagcugcaggacguggugaaccagaacgcucaggcccugaacacccuggugaagcagcugagcagcaacuuuggcgccaucagcucagugcugaaugacauccugagcaggcuggaucccccagaggccgaggugcagaucgaccggcugaucaccggccggcugcagagccugcagaccuacgugacccagcagcugauccgggccgccgagauccgggccagcgccaaccuggcagccaccaagaugagcgagugcgugcugggccagagcaagcggguggacuucugcggcaagggcuaccaccugaugagcuucccccagagcgcuccccacggcgugguguuccuccacgugacauacguccccgcccaggagaagaacuucaccaccgcccccgccauuugccacgacggcaaggcccacuucccccgggagggaguguucgugagcaacggcacccacugguucgugacccagcggaacuucuacgagccucagaucaucaccaccgacaacaccuucgugagcggcaacugcgacguggugaucggcaucgugaacaacaccguguacgacccccugcagcccgagcuggacagcuucaaggaggagcuggacaaguacuucaagaaccacaccagcccagacguggaccugggcgacaucagcggcaucaacgccagcguggugaacauccagaaggagaucgaccggcugaacgagguggccaagaaccugaacgagagccugaucgaccugcaggagcugggcaaguacgagcaguacaucaaguggcccugguacaucuggcugggcuucaucgccggccugaucgccaucgugauggugaccaucaugcugugcugcaugaccagcugcuguagcugccugaagggcugcugcagcugcggcagcugcugcaaguucgacgaggacgacagcgagcccgugcugaagggcgugaagcugcacuacaccugaggacuaguuauaagacugacuagcccgaugggccucccaacgggcccuccuccccuccuugcaccgagauuaauaaaaaaaaaaaaaaaaaaaaaaaaaaaaaaaaaaaaaaaaaaaaaaaaaaaaaaaaaaaaaaaaugcaucccccccccccccccccccccccccccccccaaaggcucuuuucagagccaccagaauu

SEQ ID NO: 23359 - RNA, 4039 nt, Artificial Sequence
  SARS-CoV-2/Wuhan/WIV05/2019__EPI_ISL_402128 spike protein mRNA gc (1-1273)(K986P_V987P_D614G_I692V)
aggagaaagcuuaccauguucguguuccuggugcugcugccccuggugagcagccagugcgugaaccugaccacccggacccagcugcccccugccuacaccaacagcuucacccggggcguguacuaccccgacaagguguuccggagcagcgugcugcacagcacccaggaccuguuccugcccuucuucagcaacgugaccugguuccacgccauccacgugagcggcaccaacggcaccaagcgguucgacaacccagugcugcccuucaacgacggcguguacuucgccagcaccgagaagucaaacaucauccggggcuggaucuucggcaccacccuggacagcaagacacagagccugcugaucgugaacaacgccaccaacguggugaucaaggugugcgaguuucaguucugcaacgaccccuuccugggcguguacuaccacaagaacaacaagagcuggauggagagcgaguuccgggucuacagcagcgcuaacaauugcaccuucgaguacgugagccagcccuuccugauggaccucgagggcaagcagggcaacuucaagaaccugcgggaguucguguucaagaacaucgauggcuacuucaagaucuacagcaagcacacccccaucaaccuggugcgggaccugccccagggauucagcgcccuggagccucugguggaccugcccaucggcaucaacaucaccagguuccagacccugcuggcccugcaccggagcuaccugacccccggcgacagcagcagcggcuggaccgccggcgccgccgcauacuacgugggcuaccugcagccacggaccuuccugcugaaguacaacgagaacggcaccaucaccgacgccguggacugcgcccuggacccccugagcgagaccaagugcacccuaaagagcuucaccguggagaagggcaucuaccagaccagcaacuuccgggugcagcccacugagagcaucgugcgguuccccaacauuaccaaccugugucccuucggcgagguguucaacgccacccgguucgccagcguguacgccuggaaccggaagcggaucagcaacugcguggccgacuacagcgugcuguacaacagcgccagcuucagcaccuucaagugcuacggcgugagcccuaccaagcugaacgaccugugcuucaccaacguguacgcugacagcuucgugauccggggcgacgaggugcggcagaucgcccccggccagaccggcaagaucgccgacuacaacuacaagcugcccgacgacuucaccggcugcgugaucgccuggaacagcaacaaccuggacagcaaggugggcggcaacuacaacuaccuguaccggcuguuccguaagagcaaccugaagccauucgagcgggacaucagcaccgagaucuaccaggccggcagcacccccugcaacgguguggagggcuuuaacugcuacuucccccugcagagcuacggcuuccagcccaccaacggcgugggcuaccagcccuaccgggugguggugcugagcuucgagcugcugcacgcccccgccaccgugugcggcccuaaaaagagcaccaaccuggugaagaacaagugcgugaacuucaauuucaacggccugaccggcaccggcgugcugaccgagagcaacaagaaguuccugcccuuccagcaguucggccgggauaucgccgacaccaccgacgcagugcgggacccccagacccuggagauccuggacaucaccccaugcagcuucggcggcgugagcgucaucacccccggcacaaacaccagcaaccagguggccgugcuguaccagggagugaacugcaccgaggugcccguggccauccacgccgaccagcugacccccaccuggcggguguacagcaccggcagcaacguguuccagacccgggccggcugccugaucggcgccgagcacgugaacaacuccuacgagugcgacauccccaucggcgcuggcaucugcgccagcuaccagacccagaccaacagcccccggcgggcccggagcguggccagccagagcgugaucgccuacaccaugagcuuaggcgccgagaacagcguggccuacagcaacaacagcaucgcgaucccuaccaacuucaccaucagcgugaccaccgagauccugcccgugagcaugaccaagaccagcguggacuguaccauguacauaugcggcgacagcaccgagugcagcaaccugcugcugcaguacggcagcuucugcacccagcugaaccgggcccugaccggcaucgccguggagcaggacaagaacacccaagagguguucgcccaggugaagcagaucuacaagacucccccaaucaaggacuucggcggcuucaacuucagccagauccugcccgaccccagcaagcccagcaagcggagcuucaucgaggaccugcuguucaacaaggugacccuggccgacgccggcuucaucaagcaguacggcgacugccugggggauaucgccgcucgggaccugaucugcgcccagaaguucaacggccugaccgugcugcccccucugcugaccgacgagaugaucgcccaguacaccagcgcccugcuugccggcaccaucaccagcggcuggaccuucggcgccggcgcagcccugcagauccccuucgccaugcagauggccuaccgguucaacggcaucggcgugacccagaacgugcuguacgagaaccagaagcugaucgccaaccaguucaacagcgccaucggcaagauccaggacagccugagcagcaccgccagcgcccugggcaagcugcaggacguggugaaccagaacgcucaggcccugaacacccuggugaagcagcugagcagcaacuucggcgccaucagcucagugcugaaugacauccugagcaggcuggaucccccagaggccgaggugcagaucgaccggcugaucaccggccggcugcagagccugcagaccuacgugacccagcagcugauccgggccgccgagauccgggccagcgccaaccuggcagccaccaagaugagcgagugcgugcugggccagagcaagcggguggacuuuugcggcaagggcuaccaccugaugagcuucccccagagcgcuccccacggcgugguguuccuccacgucacauacgugcccgcccaggagaagaacuucaccaccgcccccgccaucugccacgacggcaaggcccacuucccccgggagggaguguucgugagcaacggcacccacugguucgugacccagcggaacuucuacgagccucagauuaucaccaccgacaacaccuucgugagcggcaacugcgacguggugaucggcaucgugaacaacaccguguacgacccccugcagcccgagcuggacagcuucaaggaggagcuggacaaguacuucaagaaccacaccagcccagacguggaccugggcgacaucagcggcaucaacgccagcguggugaacauccagaaggagaucgaccggcugaacgagguggccaagaaccugaacgagagccugaucgaccugcaggagcugggcaaguacgagcaguacaucaaguggcccugguacaucuggcugggcuucaucgccggccugaucgccaucgugauggugaccaucaugcugugcugcaugaccagcugcuguagcugccugaagggcugcugcagcugcggcagcugcugcaaguucgacgaggacgacagcgagcccgugcugaagggcgugaagcugcacuacaccugaggacuaguuauaagacugacuagcccgaugggccucccaacgggcccuccuccccuccuugcaccgagauuaauaaaaaaaaaaaaaaaaaaaaaaaaaaaaaaaaaaaaaaaaaaaaaaaaaaaaaaaaaaaaaaaaugcaucccccccccccccccccccccccccccccccaaaggcucuuuucagagccaccagaauu

SEQ ID NO: 23360 - RNA, 4039 nt, Artificial Sequence
  SARS-CoV-2/Wuhan/WIV05/2019__EPI_ISL_402128 spike protein mRNA gc (1-1273)(K986P_V987P_D614G_M1229I)
aggagaaagcuuaccauguucguguuccuggugcugcugccccuggugagcagccagugcgugaaccugaccacccggacccagcugcccccugccuacaccaacagcuucacccggggcguguacuaccccgacaagguguuccggagcagcgugcugcacagcacccaggaccuguuccugcccuucuucagcaacgugaccugguuccacgccauccacgugagcggcaccaacggcaccaagcgguucgacaacccagugcugcccuucaacgacggcguguacuucgccagcaccgagaagucaaacaucauccggggcuggaucuucggcaccacccuggacagcaagacacagagccugcugaucgugaacaacgccaccaacguggugaucaaggugugcgaguuucaguucugcaacgaccccuuccugggcguguacuaccacaagaacaacaagagcuggauggagagcgaguuccgggucuacagcagcgcuaacaauugcaccuucgaguacgugagccagcccuuccugauggaccucgagggcaagcagggcaacuucaagaaccugcgggaguucguguucaagaacaucgauggcuacuucaagaucuacagcaagcacacccccaucaaccuggugcgggaccugccccagggauucagcgcccuggagccucugguggaccugcccaucggcaucaacaucaccagguuccagacccugcuggcccugcaccggagcuaccugacccccggcgacagcagcagcggcuggaccgccggcgccgccgcauacuacgugggcuaccugcagccacggaccuuccugcugaaguacaacgagaacggcaccaucaccgacgccguggacugcgcccuggacccccugagcgagaccaagugcacccuaaagagcuucaccguggagaagggcaucuaccagaccagcaacuuccgggugcagcccacugagagcaucgugcgguuccccaacauuaccaaccugugucccuucggcgagguguucaacgccacccgguucgccagcguguacgccuggaaccggaagcggaucagcaacugcguggccgacuacagcgugcuguacaacagcgccagcuucagcaccuucaagugcuacggcgugagcccuaccaagcugaacgaccugugcuucaccaacguguacgcugacagcuucgugauccggggcgacgaggugcggcagaucgcccccggccagaccggcaagaucgccgacuacaacuacaagcugcccgacgacuucaccggcugcgugaucgccuggaacagcaacaaccuggacagcaaggugggcggcaacuacaacuaccuguaccggcuguuccguaagagcaaccugaagccauucgagcgggacaucagcaccgagaucuaccaggccggcagcacccccugcaacgguguggagggcuuuaacugcuacuucccccugcagagcuacggcuuccagcccaccaacggcgugggcuaccagcccuaccgggugguggugcugagcuucgagcugcugcacgcccccgccaccgugugcggcccuaaaaagagcaccaaccuggugaagaacaagugcgugaacuucaauuucaacggccugaccggcaccggcgugcugaccgagagcaacaagaaguuccugcccuuccagcaguucggccgggauaucgccgacaccaccgacgcagugcgggacccccagacccuggagauccuggacaucaccccaugcagcuucggcggcgugagcgucaucacccccggcacaaacaccagcaaccagguggccgugcuguaccagggagugaacugcaccgaggugcccguggccauccacgccgaccagcugacccccaccuggcggguguacagcaccggcagcaacguguuccagacccgggccggcugccugaucggcgccgagcacgugaacaacuccuacgagugcgacauccccaucggcgcuggcaucugcgccagcuaccagacccagaccaacagcccccggcgggcccggagcguggccagccagagcaucaucgccuacaccaugagcuuaggcgccgagaacagcguggccuacagcaacaacagcaucgcgaucccuaccaacuucaccaucagcgugaccaccgagauacugcccgugagcaugaccaagaccagcguggacuguaccauguacaucugcggcgacagcaccgagugcagcaaccugcugcugcaguacggcagcuucugcacccagcugaaccgggcccugaccggcaucgccguggagcaggacaagaacacccaagagguguucgcccaggugaagcagaucuacaagacucccccaaucaaggacuucggcggcuucaacuucagccagauccugcccgaccccagcaagcccagcaagcggagcuucaucgaggaccugcuguucaacaaggugacccuggccgacgccggcuucaucaagcaguacggcgacugccugggggauaucgccgcucgggaccugaucugcgcccagaaguucaacggccugaccgugcugcccccucugcugaccgacgagaugaucgcccaguacaccagcgcccugcuugccggcaccaucaccagcggcuggaccuucggcgccggcgcagcccugcagauccccuucgccaugcagauggccuaccgguucaacggcaucggcgugacccagaacgugcuguacgagaaccagaagcugaucgccaaccaguucaacagcgccaucggcaagauccaggacagccugagcagcaccgccagcgcccugggcaagcugcaggacguggugaaccagaacgcucaggcccugaacacccuggugaagcagcugagcagcaacuucggcgccaucagcucagugcugaaugacauccugagcaggcuggaucccccagaggccgaggugcagaucgaccggcugaucaccggccggcugcagagccugcagaccuacgugacccagcagcugauccgggccgccgagauccgggccagcgccaaccuggcagccaccaagaugagcgagugcgugcugggccagagcaagcggguggacuuuugcggcaagggcuaccaccugaugagcuucccccagagcgcuccccacggcgugguguuccuccacgugacauacguccccgcccaggagaagaacuucaccaccgcccccgccauuugccacgacggcaaggcccacuucccccgggagggaguguucgugagcaacggcacccacugguucgugacccagcggaacuucuacgagccucagaucaucaccaccgacaacaccuucgugagcggcaacugcgacguggugaucggcaucgugaacaacaccguguacgacccccugcagcccgagcuggacagcuucaaggaggagcuggacaaguacuucaagaaccacaccagcccagacguggaccugggcgacaucagcggcaucaacgccagcguggugaacauccagaaggagaucgaccggcugaacgagguggccaagaaccugaacgagagccugaucgaccugcaggagcugggcaaguacgagcaguacaucaaguggcccugguacaucuggcugggcuucaucgccggccugaucgccaucgugaucgugaccaucaugcugugcugcaugaccagcugcuguagcugccugaagggcugcugcagcugcggcagcugcugcaaguucgacgaggacgacagcgagcccgugcugaagggcgugaagcugcacuacaccugaggacuaguuauaagacugacuagcccgaugggccucccaacgggcccuccuccccuccuugcaccgagauuaauaaaaaaaaaaaaaaaaaaaaaaaaaaaaaaaaaaaaaaaaaaaaaaaaaaaaaaaaaaaaaaaaugcaucccccccccccccccccccccccccccccccaaaggcucuuuucagagccaccagaauu

SEQ ID NO: 23361 - RNA, 4033 nt, Artificial Sequence
  SARS-CoV-2/Wuhan/WIV05/2019__EPI_ISL_402128 spike protein mRNA gc (1-1273)(K986P_V987P_H69del_V70del_A222V_Y453F_S477N_D614G_I692V)
aggagaaagcuuaccauguucguguuccuggugcugcugccccuggugagcagccagugcgugaaccugaccacccggacccagcugcccccugccuacaccaacagcuucacccggggcguguacuaccccgacaagguguuccggagcagcgugcugcacagcacccaggaccuguuccugcccuucuucagcaacgugaccugguuccacgccaucagcggcaccaacggcaccaagcgguucgacaacccagugcugcccuucaacgacggcguguacuucgccagcaccgagaagucaaacaucauccggggcuggaucuucggcaccacccuggacagcaagacacagagccugcugaucgugaacaacgccaccaacguggugaucaaggugugcgaguuucaguucugcaacgaccccuuccugggcguguacuaccacaagaacaacaagagcuggauggagagcgaguuccggguguacagcagcgcuaacaauugcaccuucgaguacgucagccagcccuuccugauggaccucgagggcaagcagggcaacuucaagaaccugcgggaguucguguucaagaacaucgauggcuacuucaagaucuacagcaagcacacccccaucaaccuggugcgggaccugccccagggauucagcgugcuggagccucugguggaccugcccaucggcaucaacaucaccagguuccagacccugcuggcccugcaccggagcuaccugacccccggcgacagcagcagcggcuggaccgccggcgccgccgccuacuacgugggcuaccugcagccacggaccuuccugcugaaguacaacgagaacggcaccaucaccgacgcaguggacugcgcccuggacccccugagcgagaccaagugcacccuaaagagcuucaccguggagaagggcaucuaccagaccagcaacuuccgggugcagcccacugagagcaucgugcgguuccccaacauuaccaaccugugucccuucggcgagguguucaacgccacccgguucgccagcguguacgccuggaaccggaagcggaucagcaacugcguggccgacuacagcgugcuguacaacagcgccagcuucagcaccuucaagugcuacggcgugagcccuaccaagcugaacgaccugugcuucaccaacguguacgccgacagcuucgugauccggggcgacgaggugcggcagaucgcucccggccagaccggcaagaucgccgacuacaacuacaagcugcccgacgacuucaccggcugcgugaucgccuggaacagcaacaaccuggacagcaaggugggcggcaacuacaacuaccuguuccggcuguuccguaagagcaaccugaagccauuugagcgggacaucagcaccgagaucuaccaggccggcaacacccccugcaacgguguggagggcuucaacugcuacuucccccugcagagcuacggcuuccagcccaccaacggcgugggcuaccagcccuaccgggugguggugcugagcuucgagcugcugcacgcccccgccaccgugugcggcccuaaaaagagcaccaaccuggugaagaacaagugcgugaauuucaacuucaacggccugaccggcaccggcgugcugaccgagagcaacaagaaguuccugcccuuccagcaguucggccgggauaucgccgacaccaccgacgccgugcgggacccccagacccuggagauccuggacaucaccccaugcagcuucggcggcgugagcgucaucacccccggcacaaacaccagcaaccagguggcagugcuguaccagggagugaacugcaccgaggugcccguggccauccacgccgaccagcugacccccaccuggcggguguacagcaccggcagcaacguguuccagacccgggccggcugccugaucggcgccgagcacgugaacaacagcuacgagugcgacauccccaucggcgccggcaucugcgcuuccuaccagacccagaccaacagcccccggcgggcccggagcguggccagccagagcgugaucgccuacaccaugagcuuaggcgccgagaacagcguggccuacagcaacaacagcaucgccaucccuaccaacuucaccaucagcgugaccaccgagauccugcccgugagcaugaccaagaccagcguggacuguaccauguacauaugcggcgacagcaccgagugcagcaaccugcugcugcaguacggcagcuucugcacccagcugaaccgggcgcugaccggcaucgccguggagcaggacaagaacacccaagagguguucgcccaggugaagcagaucuacaagacucccccaaucaaggacuucggcggcuucaacuucagccagauccugcccgaccccagcaagcccagcaagcggagcuucaucgaggaccugcuguucaacaaggugacccuggccgacgccggcuucaucaagcaguacggcgacugccugggggauaucgccgcccgggaccugaucugcgcucagaaguucaacggccugaccgugcugcccccucugcugaccgacgagaugaucgcccaguacaccagcgcccugcuugccggcaccaucaccagcggcuggaccuucggcgccggcgccgcacugcagauccccuucgccaugcagauggccuaccgguucaacggcaucggcgugacccagaacgugcuguacgagaaccagaagcugaucgccaaccaguucaacagcgccaucggcaagauccaggacagccugagcagcaccgccagcgcccugggcaagcugcaggacguggugaaccagaacgcccaggcucugaacacccuggugaagcagcugagcagcaauuuuggcgccaucagcagcgugcugaacgacauccugucaaggcuggaucccccagaggccgaggugcagaucgaccggcugaucaccggccggcugcagagccugcagaccuacgugacccagcagcugauccgggccgccgagauccgggccagcgccaaccuggccgcaaccaagaugagcgagugcgugcugggccagagcaagcggguggacuucugcggcaagggcuaccaccugaugagcuucccccagagcgcuccccacggcgugguguuccuccacgucacauacgugcccgcccaggagaagaacuucaccaccgcccccgccaucugccacgacggcaaggcccacuucccccgggagggaguguucgugagcaacggcacccacugguucgugacccagcggaacuucuacgagccucagauuaucaccaccgacaacaccuucgugagcggcaacugcgacguggugaucggcaucgugaacaacaccguguacgacccccugcagcccgagcuggacagcuucaaggaggagcuggacaaguacuucaagaaccacaccagcccagacguggaccugggcgacaucagcggcaucaacgccagcguggugaacauccagaaggagaucgaccggcugaacgagguggccaagaaccugaacgagagccugaucgaccugcaggagcugggcaaguacgagcaguacaucaaguggcccugguacaucuggcugggcuucaucgccggccugaucgccaucgugauggugaccaucaugcugugcugcaugaccagcugcuguagcugccugaagggcugcugcagcugcggcagcugcugcaaguucgacgaggacgacagcgagcccgugcugaagggcgugaagcugcacuacaccugaggacuaguuauaagacugacuagcccgaugggccucccaacgggcccuccuccccuccuugcaccgagauuaauaaaaaaaaaaaaaaaaaaaaaaaaaaaaaaaaaaaaaaaaaaaaaaaaaaaaaaaaaaaaaaaaugcaucccccccccccccccccccccccccccccccaaaggcucuuuucagagccaccagaauu

SEQ ID NO: 23362 - RNA, 4033 nt, Artificial Sequence
  SARS-CoV-2/Wuhan/WIV05/2019__EPI_ISL_402128 spike protein mRNA gc (1-1273)(K986P_V987P_H69del_V70del_Y453F_D614G_I692V_M1229I)
aggagaaagcuuaccauguucguguuccuggugcugcugccccuggugagcagccagugcgugaaccugaccacccggacccagcugcccccugccuacaccaacagcuucacccggggcguguacuaccccgacaagguguuccggagcagcgugcugcacagcacccaggaccuguuccugcccuucuucagcaacgugaccugguuccacgccaucagcggcaccaacggcaccaagcgguucgacaacccagugcugcccuucaacgacggcguguacuucgccagcaccgagaagucaaacaucauccggggcuggaucuucggcaccacccuggacagcaagacacagagccugcugaucgugaacaacgccaccaacguggugaucaaggugugcgaguuucaguucugcaacgaccccuuccugggcguguacuaccacaagaacaacaagagcuggauggagagcgaguuccggguguacagcagcgcuaacaauugcaccuucgaguacgucagccagcccuuccugauggaccucgagggcaagcagggcaacuucaagaaccugcgggaguucguguucaagaacaucgauggcuacuucaagaucuacagcaagcacacccccaucaaccuggugcgggaccugccccagggauucagcgcccuggagccucugguggaccugcccaucggcaucaacaucaccagguuccagacccugcuggcccugcaccggagcuaccugacccccggcgacagcagcagcggcuggaccgccggcgccgccgcauacuacgugggcuaccugcagccacggaccuuccugcugaaguacaacgagaacggcaccaucaccgacgccguggacugcgcccuggacccccugagcgagaccaagugcacccuaaagagcuucaccguggagaagggcaucuaccagaccagcaacuuccgggugcagcccacugagagcaucgugcgguuccccaacauuaccaaccugugucccuucggcgagguguucaacgccacccgguucgccagcguguacgccuggaaccggaagcggaucagcaacugcguggccgacuacagcgugcuguacaacagcgccagcuucagcaccuucaagugcuacggcgugagcccuaccaagcugaacgaccugugcuucaccaacguguacgcugacagcuucgugauccggggcgacgaggugcggcagaucgcccccggccagaccggcaagaucgccgacuacaacuacaagcugcccgacgacuucaccggcugcgugaucgccuggaacagcaacaaccuggacagcaaggugggcggcaacuacaacuaccuguuccggcuguuccguaagagcaaccugaagccauuugagcgggacaucagcaccgagaucuaccaggccggcagcacccccugcaacgguguggagggcuucaacugcuacuucccccugcagagcuacggcuuccagcccaccaacggcgugggcuaccagcccuaccgggugguggugcugagcuucgagcugcugcacgcccccgccaccgugugcggcccuaaaaagagcaccaaccuggugaagaacaagugcgugaacuucaauuucaacggccugaccggcaccggcgugcugaccgagagcaacaagaaguuccugcccuuccagcaguucggccgggauaucgccgacaccaccgacgcagugcgggacccccagacccuggagauccuggacaucaccccaugcagcuucggcggcgugagcgugaucacccccggcacaaacaccagcaaccaggucgccgugcuguaccagggagugaacugcaccgaggugcccguggccauccacgccgaccagcugacccccaccuggcggguguacagcaccggcagcaacguguuccagacccgggccggcugccugaucggcgccgagcacgugaacaacuccuacgagugcgacauccccaucggcgcuggcaucugcgccagcuaccagacccagaccaacagcccccggcgggcccggagcguggccagccagagcgugaucgccuacaccaugagcuuaggcgccgagaacagcguggccuacagcaacaacagcaucgcgaucccuaccaacuucaccaucagcgugaccaccgagauccugcccgugagcaugaccaagaccagcguggacuguaccauguacauaugcggcgacagcaccgagugcagcaaccugcugcugcaguacggcagcuucugcacccagcugaaccgggcccugaccggcaucgccguggagcaggacaagaacacccaagagguguucgcccaggugaagcagaucuacaagacucccccaaucaaggacuucggcggcuucaacuucagccagauccugcccgaccccagcaagcccagcaagcggagcuucaucgaggaccugcuguucaacaaggugacccuggccgacgccggcuucaucaagcaguacggcgacugccugggggauaucgccgcucgggaccugaucugcgcccagaaguucaacggccugaccgugcugcccccucugcugaccgacgagaugaucgcccaguacaccagcgcccugcuugccggcaccaucaccagcggcuggaccuucggcgccggcgcagcccugcagauccccuucgccaugcagauggccuaccgguucaacggcaucggcgugacccagaacgugcuguacgagaaccagaagcugaucgccaaccaguucaacagcgccaucggcaagauccaggacagccugagcagcaccgccagcgcccugggcaagcugcaggacguggugaaccagaacgcucaggcccugaacacccuggugaagcagcugagcagcaacuuuggcgccaucagcucagugcugaaugacauccugagcaggcuggaucccccagaggccgaggugcagaucgaccggcugaucaccggccggcugcagagccugcagaccuacgugacccagcagcugauccgggccgccgagauccgggccagcgccaaccuggcagccaccaagaugagcgagugcgugcugggccagagcaagcggguggacuucugcggcaagggcuaccaccugaugagcuucccccagagcgcuccccacggcgugguguuccuccacgugacauacguccccgcccaggagaagaacuucaccaccgcccccgccaucugccacgacggcaaggcccacuucccccgggagggaguguucgugagcaacggcacccacugguucgugacccagcggaacuucuacgagccucagauuaucaccaccgacaacaccuucgugagcggcaacugcgacguggugaucggcaucgugaacaacaccguguacgacccccugcagcccgagcuggacagcuucaaggaggagcuggacaaguacuucaagaaccacaccagcccagacguggaccugggcgacaucagcggcaucaacgccagcguggugaacauccagaaggagaucgaccggcugaacgagguggccaagaaccugaacgagagccugaucgaccugcaggagcugggcaaguacgagcaguacaucaaguggcccugguacaucuggcugggcuucaucgccggccugaucgccaucgugaucgugaccaucaugcugugcugcaugaccagcugcuguagcugccugaagggcugcugcagcugcggcagcugcugcaaguucgacgaggacgacagcgagcccgugcugaagggcgugaagcugcacuacaccugaggacuaguuauaagacugacuagcccgaugggccucccaacgggcccuccuccccuccuugcaccgagauuaauaaaaaaaaaaaaaaaaaaaaaaaaaaaaaaaaaaaaaaaaaaaaaaaaaaaaaaaaaaaaaaaaugcaucccccccccccccccccccccccccccccccaaaggcucuuuucagagccaccagaauu

SEQ ID NO: 23363 - RNA, 4030 nt, Artificial Sequence
  SARS-CoV-2/Wuhan/WIV05/2019__EPI_ISL_402128 spike protein mRNA gc (1-1273)(K986P_V987P_K986P_V987P_H69del_V70del_Y144del_N501Y_A570 D_D614G_P681H_T716I_S982A_D1118H)
aggagaaagcuuaccauguucguguuccuggugcugcugccccuggugagcagccagugcgugaaccugaccacccggacccagcugcccccugccuacaccaacagcuucacccggggcguguacuaccccgacaagguguuccggagcagcgugcugcacagcacccaggaccuguuccugcccuucuucagcaacgugaccugguuccacgccaucagcggcaccaacggcaccaagcgguucgacaacccagugcugcccuucaacgacggcguguacuucgccagcaccgagaagucaaacaucauccggggcuggaucuucggcaccacccuggacagcaagacacagagccugcugaucgugaacaacgccaccaacguggugaucaaggugugcgaguuucaguucugcaacgaccccuuccugggcguguaccacaagaacaacaagagcuggauggagagcgaguuccggguguacagcagcgcuaacaauugcaccuucgaguacgucagccagcccuuccugauggaccucgagggcaagcagggcaacuucaagaaccugcgggaguucguguucaagaacaucgauggcuacuucaagaucuacagcaagcacacccccaucaaccuggugcgggaccugccccagggauucagcgcccuggagccucugguggaccugcccaucggcaucaacaucaccagguuccagacccugcuggcccugcaccggagcuaccugacccccggcgacagcagcagcggcuggaccgccggcgccgccgcauacuacgugggcuaccugcagccacggaccuuccugcugaaguacaacgagaacggcaccaucaccgacgccguggacugcgcccuggacccccugagcgagaccaagugcacccuaaagagcuucaccguggagaagggcaucuaccagaccagcaacuuccgggugcagcccacugagagcaucgugcgguuccccaacauuaccaaccugugucccuucggcgagguguucaacgccacccgguucgccagcguguacgccuggaaccggaagcggaucagcaacugcguggccgacuacagcgugcuguacaacagcgccagcuucagcaccuucaagugcuacggcgugagcccuaccaagcugaacgaccugugcuucaccaacguguacgcugacagcuucgugauccggggcgacgaggugcggcagaucgcccccggccagaccggcaagaucgccgacuacaacuacaagcugcccgacgacuucaccggcugcgugaucgccuggaacagcaacaaccuggacagcaaggugggcggcaacuacaacuaccuguaccggcuguuccguaagagcaaccugaagccauucgagcgggacaucagcaccgagaucuaccaggccggcagcacccccugcaacgguguggagggcuuuaacugcuacuucccccugcagagcuacggcuuccagcccaccuacggcgugggcuaccagcccuaccgggugguggugcugagcuucgagcugcugcacgcccccgccaccgugugcggcccuaaaaagagcaccaaccuggugaagaacaagugcgugaacuucaacuucaauggccugaccggcaccggcgugcugaccgagagcaacaagaaguuccugcccuuccagcaguucggccgggauaucgacgacaccaccgacgccgugcgggacccccagacccuggagauccuggacaucaccccaugcagcuucggcggcgugagcgugaucacccccggcacaaacaccagcaaccaggucgcagugcuguaccagggagugaacugcaccgaggugcccguggccauccacgccgaccagcugacccccaccuggcggguguacagcaccggcagcaacguguuccagacccgggccggcugccugaucggcgccgagcacgugaacaacuccuacgagugcgacauccccaucggcgccggcaucugcgcuagcuaccagacccagaccaacagccaccggcgggcccggagcguggccagccagagcaucaucgccuacaccaugagcuuaggcgccgagaacagcguggccuacagcaacaacagcaucgccauccccaucaacuucaccauaagcgugaccaccgagauccugccugugagcaugaccaagaccagcguggacuguaccauguacaucugcggcgacagcaccgagugcagcaaccugcugcugcaguacggcagcuucugcacccagcugaaccgggcgcugaccggcaucgccguggagcaggacaagaacacccaagagguguucgcccaggugaagcagaucuacaagaccccacccaucaaggacuucggcggcuucaacuucagccagauccugcccgaccccagcaagcccagcaagcggagcuucaucgaggaccugcuguucaacaaggugacucuggccgacgccggcuucaucaagcaguacggcgauugccugggggacaucgccgcccgggaccugaucugcgcucagaaguucaacggccugaccgugcugccuccccugcugaccgacgagaugaucgcccaguacaccagcgcccugcuugccggcaccaucaccagcggcuggaccuucggcgccggcgccgcacugcagauccccuucgccaugcagauggccuaccgguucaacggcaucggcgugacccagaacgugcuguacgagaaccagaagcugaucgccaaccaguucaacagcgccaucggcaagauccaggacagccugagcagcaccgccagcgcccugggcaagcugcaggacguggugaaccagaacgcccaggcucugaacacccuggugaagcagcugagcagcaacuucggcgccaucagcucagugcugaacgacauccuggccaggcuggacccacccgaggccgaggugcagaucgaccggcugaucaccggccggcugcagagccugcagaccuacgugacccagcagcugauccgggccgccgagauucgggccagcgccaaucuggcagccaccaagaugagcgagugcgugcugggccagagcaagcggguggacuuuugcggcaagggcuaccaccugaugagcuucccccagagcgcuccccacggcgugguguuccuccacgugaccuacgugcccgcccaggagaagaacuucacaaccgcccccgccaucugccacgacggcaaggcccacuucccccgggagggagucuucgugagcaacggcacccacugguucgugacccagcggaacuucuacgagccccagaucaucaccacccacaacaccuucgugagcggcaacugcgacguggugaucggcaucgugaacaacaccguguacgacccucugcagcccgagcuggacagcuucaaggaggagcuggacaaguacuucaagaaccacaccagccccgacguggaucugggcgacaucagcggcaucaacgccagcguggugaacauccagaaggagaucgaccggcugaacgagguggccaagaaccugaacgagagccugaucgaccugcaggagcugggcaaguacgagcaguacaucaaguggccaugguacaucuggcugggcuucaucgccggccugaucgccaucgugauggugaccaucaugcugugcugcaugaccagcugcuguagcugccugaagggcugcugcagcugcggcagcugcugcaaguucgacgaggacgacagcgagcccgugcugaagggcgugaagcugcacuacaccugaggacuaguuauaagacugacuagcccgaugggccucccaacgggcccuccuccccuccuugcaccgagauuaauaaaaaaaaaaaaaaaaaaaaaaaaaaaaaaaaaaaaaaaaaaaaaaaaaaaaaaaaaaaaaaaaugcaucccccccccccccccccccccccccccccccaaaggcucuuuucagagccaccagaauu

SEQ ID NO: 23364 - RNA, 4039 nt, Artificial Sequence
  SARS-CoV-2/Wuhan/WIV05/2019__EPI_ISL_402128 spike protein mRNA gc (1-1273)(K986P_V987P_K986P_V987P_K417N_E484K_N501Y_D614G)
aggagaaagcuuaccauguucguguuccuggugcugcugccccuggugagcagccagugcgugaaccugaccacccggacccagcugcccccugccuacaccaacagcuucacccggggcguguacuaccccgacaagguguuccggagcagcgugcugcacagcacccaggaccuguuccugcccuucuucagcaacgugaccugguuccacgccauccacgugagcggcaccaacggcaccaagcgguucgacaacccagugcugcccuucaacgacggcguguacuucgccagcaccgagaagucaaacaucauccggggcuggaucuucggcaccacccuggacagcaagacacagagccugcugaucgugaacaacgccaccaacguggugaucaaggugugcgaguuucaguucugcaacgaccccuuccugggcguguacuaccacaagaacaacaagagcuggauggagagcgaguuccgggucuacagcagcgcuaacaauugcaccuucgaguacgugagccagcccuuccugauggaccucgagggcaagcagggcaacuucaagaaccugcgggaguucguguucaagaacaucgauggcuacuucaagaucuacagcaagcacacccccaucaaccuggugcgggaccugccccagggauucagcgcccuggagccucugguggaccugcccaucggcaucaacaucaccagguuccagacccugcuggcccugcaccggagcuaccugacccccggcgacagcagcagcggcuggaccgccggcgccgccgcauacuacgugggcuaccugcagccacggaccuuccugcugaaguacaacgagaacggcaccaucaccgacgccguggacugcgcccuggacccccugagcgagaccaagugcacccuaaagagcuucaccguggagaagggcaucuaccagaccagcaacuuccgggugcagcccacugagagcaucgugcgguuccccaacauuaccaaccugugucccuucggcgagguguucaacgccacccgguucgccagcguguacgccuggaaccggaagcggaucagcaacugcguggccgacuacagcgugcuguacaacagcgccagcuucagcaccuucaagugcuacggcgugagcccuaccaagcugaacgaccugugcuucaccaacguguacgcugacagcuucgugauccggggcgacgaggugcggcagaucgcccccggccagaccggcaacaucgccgacuacaacuacaagcugcccgacgacuucaccggcugcgugaucgccuggaacagcaacaaccuggacagcaaggugggcggcaacuacaacuaccuguaccggcuguuccguaagagcaaccugaagccauucgagcgggacaucagcaccgagaucuaccaggccggcagcacccccugcaacggugugaagggcuuuaacugcuacuucccccugcagagcuacggcuuccagcccaccuacggcgugggcuaccagcccuaccgggugguggugcugagcuucgagcugcugcacgcccccgccaccgugugcggcccuaaaaagagcaccaaccuggugaagaacaagugcgugaacuucaauuucaacggccugaccggcaccggcgugcugaccgagagcaacaagaaguuccugcccuuccagcaguucggccgggauaucgccgacaccaccgacgcagugcgggacccccagacccuggagauccuggacaucaccccaugcagcuucggcggcgugagcgucaucacccccggcacaaacaccagcaaccagguggccgugcuguaccagggagugaacugcaccgaggugcccguggccauccacgccgaccagcugacccccaccuggcggguguacagcaccggcagcaacguguuccagacccgggccggcugccugaucggcgccgagcacgugaacaacuccuacgagugcgacauccccaucggcgcuggcaucugcgccagcuaccagacccagaccaacagcccccggcgggcccggagcguggccagccagagcaucaucgccuacaccaugagcuuaggcgccgagaacagcguggccuacagcaacaacagcaucgcgaucccuaccaacuucaccaucagcgugaccaccgagauacugcccgugagcaugaccaagaccagcguggacuguaccauguacaucugcggcgacagcaccgagugcagcaaccugcugcugcaguacggcagcuucugcacccagcugaaccgggcccugaccggcaucgccguggagcaggacaagaacacccaagagguguucgcccaggugaagcagaucuacaagacucccccaaucaaggacuucggcggcuucaacuucagccagauccugcccgaccccagcaagcccagcaagcggagcuucaucgaggaccugcuguucaacaaggugacccuggccgacgccggcuucaucaagcaguacggcgacugccugggggauaucgccgcucgggaccugaucugcgcccagaaguucaacggccugaccgugcugcccccucugcugaccgacgagaugaucgcccaguacaccagcgcccugcuugccggcaccaucaccagcggcuggaccuucggcgccggcgcagcccugcagauccccuucgccaugcagauggccuaccgguucaacggcaucggcgugacccagaacgugcuguacgagaaccagaagcugaucgccaaccaguucaacagcgccaucggcaagauccaggacagccugagcagcaccgccagcgcccugggcaagcugcaggacguggugaaccagaacgcucaggcccugaacacccuggugaagcagcugagcagcaacuucggcgccaucagcucagugcugaaugacauccugagcaggcuggaucccccagaggccgaggugcagaucgaccggcugaucaccggccggcugcagagccugcagaccuacgugacccagcagcugauccgggccgccgagauccgggccagcgccaaccuggcagccaccaagaugagcgagugcgugcugggccagagcaagcggguggacuuuugcggcaagggcuaccaccugaugagcuucccccagagcgcuccccacggcgugguguuccuccacgugacauacguccccgcccaggagaagaacuucaccaccgcccccgccauuugccacgacggcaaggcccacuucccccgggagggaguguucgugagcaacggcacccacugguucgugacccagcggaacuucuacgagccucagaucaucaccaccgacaacaccuucgugagcggcaacugcgacguggugaucggcaucgugaacaacaccguguacgacccccugcagcccgagcuggacagcuucaaggaggagcuggacaaguacuucaagaaccacaccagcccagacguggaccugggcgacaucagcggcaucaacgccagcguggugaacauccagaaggagaucgaccggcugaacgagguggccaagaaccugaacgagagccugaucgaccugcaggagcugggcaaguacgagcaguacaucaaguggcccugguacaucuggcugggcuucaucgccggccugaucgccaucgugauggugaccaucaugcugugcugcaugaccagcugcuguagcugccugaagggcugcugcagcugcggcagcugcugcaaguucgacgaggacgacagcgagcccgugcugaagggcgugaagcugcacuacaccugaggacuaguuauaagacugacuagcccgaugggccucccaacgggcccuccuccccuccuugcaccgagauuaauaaaaaaaaaaaaaaaaaaaaaaaaaaaaaaaaaaaaaaaaaaaaaaaaaaaaaaaaaaaaaaaaugcaucccccccccccccccccccccccccccccccaaaggcucuuuucagagccaccagaauu

SEQ ID NO: 23365 - RNA, 4030 nt, Artificial Sequence
  SARS-CoV-2/Wuhan/WIV05/2019__EPI_ISL_402128 spike protein mRNA gc (1-1273)(K986P_V987P_K986P_V987P_L18F_D80A_D215G_L242del_A243del_ L244del_R246I_K417N_E484K_N501Y_D614G_A701V)
aggagaaagcuuaccauguucguguuccuggugcugcugccccuggugagcagccagugcgugaacuucaccacccggacccagcugcccccugccuacaccaacagcuucacccggggcguguacuaccccgacaagguguuccggagcagcgugcugcacagcacccaggaccuguuccugcccuucuucagcaacgugaccugguuccacgccauccacgugagcggcaccaacggcaccaagcgguucgccaacccagugcugcccuucaacgacggcguguacuucgccagcaccgagaagucaaacaucauccggggcuggaucuuuggcaccacccuggacagcaagacacagagccugcugaucgugaacaacgcuaccaacguggugaucaaggugugcgaguuccaguucugcaacgaccccuuccugggcguguacuaccacaagaacaacaagagcuggauggagagcgaguuccgggucuacagcagcgccaacaauugcaccuucgaguacgugagccagcccuuccugauggaccuggagggcaagcagggcaacuucaagaaccuccgggaguucguguucaagaacaucgacggcuacuucaagaucuacagcaagcacacccccaucaaccuggugcggggacugccccagggcuucagcgcccuggagccucugguggaucugcccaucggcaucaacaucaccagguuccagacccugcacaucagcuaccugacccccggcgacagcagcagcggcuggaccgccggcgccgccgcauacuacgugggcuaccugcagccacggaccuuccugcugaaguacaacgagaacggcaccaucaccgacgccguggacugcgcccuggacccccugagcgagaccaagugcacccuuaagagcuucaccguggagaagggcaucuaccagaccagcaacuuccgggugcagcccacugagagcauugugcgguuccccaacaucaccaaccugugucccuucggcgagguguucaacgccacccgguucgccagcguguacgccuggaaccggaagcggaucagcaacugcguggccgacuacagcgugcuguacaacagcgccagcuucagcaccuucaagugcuacggcgugagcccuaccaagcugaacgaccugugcuucaccaacguguacgcugacagcuucgugauccggggcgacgaggugcggcagaucgcccccggccagaccggcaacaucgccgacuacaacuacaagcugcccgacgacuucaccggcugcgugaucgccuggaacagcaacaaccuggacagcaaggugggcggcaacuacaacuaccuguaccggcuauuccguaagagcaaccugaagccauuugagcgggacaucagcaccgagaucuaccaggccgguagcacccccugcaacggcgugaagggcuucaacugcuacuucccccugcagagcuacggcuuccagcccaccuacggcgugggcuaccagcccuaccgggugguggugcugagcuucgagcugcugcacgcccccgccaccgugugcggcccuaaaaagagcaccaaccuggugaagaacaagugcgugaacuucaauuucaacggccugaccggcaccggcgugcugaccgagagcaacaagaaguuccugcccuuccagcaguucggccgggacaucgccgacaccaccgaugcagugcgggacccccagacccuggagauccuggacaucaccccaugcagcuucggcggcgugagcgucaucacccccggaacaaacaccagcaaccagguggccgugcuguaccagggcgugaacugcaccgaggugcccguggccauccacgccgaccagcugacccccaccuggcggguguacagcaccggcagcaacguguuccagacccgggccggcugccugaucggcgccgagcacgugaacaacuccuacgagugcgacauccccaucggcgcuggcaucugcgccagcuaccagacccagaccaacagcccccggcgggcccggagcguggccagccagagcaucaucgccuacaccaugagccugggcguggagaacagcguggccuacagcaacaacagcaucgccaucccuaccaacuucaccauaagcgugaccaccgagauccugcccgugagcaugaccaagaccagcguggacuguaccauguacaucugcggcgacagcaccgagugcagcaaccuguuacugcaguacggcagcuucugcacccagcugaaccgggcgcugaccggcaucgccguggagcaggacaagaacacccaagagguguucgcccaggugaagcagaucuacaagacucccccaaucaaggacuucggcggcuucaacuucagccagauccugcccgaccccagcaagcccagcaagcggagcuucaucgaggaccugcuguucaacaaggugacccuggccgacgccggcuucaucaagcaguacggggacugccugggcgacaucgccgcccgggaccugaucugcgcucagaaguucaacggccugaccgugcugcccccucugcugaccgaugagaugaucgcccaguacaccagcgcccugcuggccggcaccaucaccagcggcuggaccuucggcgccggcgccgcacugcagauccccuucgccaugcagauggccuaccgguucaacggcaucggcgugacccagaacgugcuguacgagaaccagaagcugaucgccaaccaguucaacagcgccaucggcaagauccaggacagccugagcagcaccgccagcgcccugggcaagcugcaggacguggugaaccagaacgcccaggcucugaacacccuggugaagcagcugagcagcaacuuuggcgccaucagcucagugcugaaugacauccugagccggcuggaucccccagaggccgaggugcagaucgacaggcugaucaccggccggcugcagagccugcagaccuacgugacccagcagcugauccgggccgccgagauucgggccagcgccaaccuggccgcaaccaagaugagcgagugcgugcugggccagagcaagcggguggacuucugcggcaagggcuaccaccugaugagcuucccccagagcgcuccccacggcgugguguuccugcacgucacauacgugcccgcccaggagaagaacuucaccaccgcccccgccaucugccacgacggaaaggcccacuucccccgggagggcguguucgugagcaacggcacccacugguucgugacccagcggaacuucuacgagccucagaucaucaccaccgacaacaccuucgugagcggcaacugcgacguggugaucggcaucgugaacaacaccguguacgacccccugcagcccgagcuggacagcuucaaggaggagcucgacaaguacuucaagaaccacaccagcccagacguggaccugggcgacaucagcggcaucaacgccagcguggugaacauccagaaggagaucgaccggcugaacgagguggccaagaaccugaacgagagccugaucgaccugcaggagcugggcaaguacgagcaguacaucaaguggcccugguacaucuggcugggcuucaucgccggccugaucgccaucgugauggugaccaucaugcugugcugcaugaccagcugcuguagcugccugaagggcugcugcagcugcggcagcugcugcaaguucgacgaggacgacagcgagcccgugcugaagggcgugaagcugcacuacaccugaggacuaguuauaagacugacuagcccgaugggccucccaacgggcccuccuccccuccuugcaccgagauuaauaaaaaaaaaaaaaaaaaaaaaaaaaaaaaaaaaaaaaaaaaaaaaaaaaaaaaaaaaaaaaaaaugcaucccccccccccccccccccccccccccccccaaaggcucuuuucagagccaccagaauu

SEQ ID NO: 23366 - RNA, 4039 nt, Artificial Sequence
  SARS-CoV-2/Wuhan/WIV05/2019__EPI_ISL_402128 spike protein mRNA gc (1-1273)(K986P_V987P_K986P_V987P_E484K_D614G)
aggagaaagcuuaccauguucguguuccuggugcugcugccccuggugagcagccagugcgugaaccugaccacccggacccagcugcccccugccuacaccaacagcuucacccggggcguguacuaccccgacaagguguuccggagcagcgugcugcacagcacccaggaccuguuccugcccuucuucagcaacgugaccugguuccacgccauccacgugagcggcaccaacggcaccaagcgguucgacaacccagugcugcccuucaacgacggcguguacuucgccagcaccgagaagucaaacaucauccggggcuggaucuucggcaccacccuggacagcaagacacagagccugcugaucgugaacaacgccaccaacguggugaucaaggugugcgaguuucaguucugcaacgaccccuuccugggcguguacuaccacaagaacaacaagagcuggauggagagcgaguuccgggucuacagcagcgcuaacaauugcaccuucgaguacgugagccagcccuuccugauggaccucgagggcaagcagggcaacuucaagaaccugcgggaguucguguucaagaacaucgauggcuacuucaagaucuacagcaagcacacccccaucaaccuggugcgggaccugccccagggauucagcgcccuggagccucugguggaccugcccaucggcaucaacaucaccagguuccagacccugcuggcccugcaccggagcuaccugacccccggcgacagcagcagcggcuggaccgccggcgccgccgcauacuacgugggcuaccugcagccacggaccuuccugcugaaguacaacgagaacggcaccaucaccgacgccguggacugcgcccuggacccccugagcgagaccaagugcacccuaaagagcuucaccguggagaagggcaucuaccagaccagcaacuuccgggugcagcccacugagagcaucgugcgguuccccaacauuaccaaccugugucccuucggcgagguguucaacgccacccgguucgccagcguguacgccuggaaccggaagcggaucagcaacugcguggccgacuacagcgugcuguacaacagcgccagcuucagcaccuucaagugcuacggcgugagcccuaccaagcugaacgaccugugcuucaccaacguguacgcugacagcuucgugauccggggcgacgaggugcggcagaucgcccccggccagaccggcaagaucgccgacuacaacuacaagcugcccgacgacuucaccggcugcgugaucgccuggaacagcaacaaccuggacagcaaggugggcggcaacuacaacuaccuguaccggcuguuccguaagagcaaccugaagccauucgagcgggacaucagcaccgagaucuaccaggccggcagcacccccugcaacggugugaagggcuuuaacugcuacuucccccugcagagcuacggcuuccagcccaccaacggcgugggcuaccagcccuaccgggugguggugcugagcuucgagcugcugcacgcccccgccaccgugugcggcccuaaaaagagcaccaaccuggugaagaacaagugcgugaacuucaauuucaacggccugaccggcaccggcgugcugaccgagagcaacaagaaguuccugcccuuccagcaguucggccgggauaucgccgacaccaccgacgcagugcgggacccccagacccuggagauccuggacaucaccccaugcagcuucggcggcgugagcgucaucacccccggcacaaacaccagcaaccagguggccgugcuguaccagggagugaacugcaccgaggugcccguggccauccacgccgaccagcugacccccaccuggcggguguacagcaccggcagcaacguguuccagacccgggccggcugccugaucggcgccgagcacgugaacaacuccuacgagugcgacauccccaucggcgcuggcaucugcgccagcuaccagacccagaccaacagcccccggcgggcccggagcguggccagccagagcaucaucgccuacaccaugagcuuaggcgccgagaacagcguggccuacagcaacaacagcaucgcgaucccuaccaacuucaccaucagcgugaccaccgagauacugcccgugagcaugaccaagaccagcguggacuguaccauguacaucugcggcgacagcaccgagugcagcaaccugcugcugcaguacggcagcuucugcacccagcugaaccgggcccugaccggcaucgccguggagcaggacaagaacacccaagagguguucgcccaggugaagcagaucuacaagacucccccaaucaaggacuucggcggcuucaacuucagccagauccugcccgaccccagcaagcccagcaagcggagcuucaucgaggaccugcuguucaacaaggugacccuggccgacgccggcuucaucaagcaguacggcgacugccugggggauaucgccgcucgggaccugaucugcgcccagaaguucaacggccugaccgugcugcccccucugcugaccgacgagaugaucgcccaguacaccagcgcccugcuugccggcaccaucaccagcggcuggaccuucggcgccggcgcagcccugcagauccccuucgccaugcagauggccuaccgguucaacggcaucggcgugacccagaacgugcuguacgagaaccagaagcugaucgccaaccaguucaacagcgccaucggcaagauccaggacagccugagcagcaccgccagcgcccugggcaagcugcaggacguggugaaccagaacgcucaggcccugaacacccuggugaagcagcugagcagcaacuucggcgccaucagcucagugcugaaugacauccugagcaggcuggaucccccagaggccgaggugcagaucgaccggcugaucaccggccggcugcagagccugcagaccuacgugacccagcagcugauccgggccgccgagauccgggccagcgccaaccuggcagccaccaagaugagcgagugcgugcugggccagagcaagcggguggacuuuugcggcaagggcuaccaccugaugagcuucccccagagcgcuccccacggcgugguguuccuccacgugacauacguccccgcccaggagaagaacuucaccaccgcccccgccauuugccacgacggcaaggcccacuucccccgggagggaguguucgugagcaacggcacccacugguucgugacccagcggaacuucuacgagccucagaucaucaccaccgacaacaccuucgugagcggcaacugcgacguggugaucggcaucgugaacaacaccguguacgacccccugcagcccgagcuggacagcuucaaggaggagcuggacaaguacuucaagaaccacaccagcccagacguggaccugggcgacaucagcggcaucaacgccagcguggugaacauccagaaggagaucgaccggcugaacgagguggccaagaaccugaacgagagccugaucgaccugcaggagcugggcaaguacgagcaguacaucaaguggcccugguacaucuggcugggcuucaucgccggccugaucgccaucgugauggugaccaucaugcugugcugcaugaccagcugcuguagcugccugaagggcugcugcagcugcggcagcugcugcaaguucgacgaggacgacagcgagcccgugcugaagggcgugaagcugcacuacaccugaggacuaguuauaagacugacuagcccgaugggccucccaacgggcccuccuccccuccuugcaccgagauuaauaaaaaaaaaaaaaaaaaaaaaaaaaaaaaaaaaaaaaaaaaaaaaaaaaaaaaaaaaaaaaaaaugcaucccccccccccccccccccccccccccccccaaaggcucuuuucagagccaccagaauu

SEQ ID NO: 23367 - RNA, 4039 nt, Artificial Sequence
  SARS-CoV-2/Wuhan/WIV05/2019__EPI_ISL_402128 spike protein mRNA gc (1-1273)(K986P_V987P_K986P_V987P_L18F_T20N_P26S_D138Y_R190S_K417T _E484K_N501Y_D614G_H655Y_T1027I)
aggagaaagcuuaccauguucguguuccuggugcugcugccccuggugagcagccagugcgugaacuucaccaaccggacccagcugcccagcgccuacaccaacagcuucacccggggcguguacuacccugacaagguguuccggagcagcgugcugcacagcacccaggaccuguuccugcccuucuucagcaacgugaccugguuccacgccauccacgugagcggcaccaacggcaccaagcgguucgacaaccccgugcugccauucaacgacggcguguacuucgccagcaccgagaagucaaacaucauccggggcuggaucuuuggcaccacccuggacagcaagacccagagccugcugaucgugaacaacgccacaaacguggugaucaaggugugcgaguuccaguucugcaacuaccccuuccugggcguguacuaccacaagaacaacaagagcuggauggagagcgaguuccgggucuacagcagcgcuaauaacugcaccuucgaguacgugagccagcccuuccugauggaccuggagggcaagcagggcaacuucaagaaccucagcgaguucguguucaagaacaucgacggcuacuucaagaucuacagcaagcacacccccaucaaccuggugcgggaucugccccagggauucagcgcccuggagccccugguggaccugccuaucggcaucaacaucacccgguuccagacccugcuggcccugcacaggagcuaccugacccccggcgacagcagcagcggcuggaccgccggcgccgccgcauacuacgugggcuaccugcagccccggaccuuccugcugaaguacaacgagaacggcaccaucaccgacgccguggacugcgcccuggacccacugagcgagaccaagugcacccuaaagagcuucaccguggagaagggcaucuaccagaccagcaacuuccgggugcagcccaccgagagcaucgugcgguuccccaacauuacuaaccugugucccuucggcgagguguucaacgccacccgguucgccagcguguacgccuggaaccggaagcggaucagcaacugcguggccgacuacagcgugcuguacaacagcgccagcuucagcaccuucaagugcuacggcgugagccccaccaagcugaacgaccugugcuucaccaacguguacgcugacagcuucgugauccggggcgacgaggugcggcagaucgccccuggccagaccggcaccaucgccgacuacaacuacaagcugcccgacgacuucaccggcugcgugaucgccuggaacagcaacaaccuggacagcaaggugggcggcaacuacaacuaccuguaccggcuguuccguaagagcaaccugaagcccuuugagcgggacaucagcaccgagaucuaccaggccggcagcaccccaugcaacggugugaagggcuucaacugcuacuucccccugcagagcuacggcuuccagcccaccuacggcgugggcuaccagcccuaccgggugguggugcugagcuucgagcugcugcacgcccccgccaccgugugcggccccaaaaagagcaccaaccuggugaagaacaagugcgugaacuucaauuucaacggccugaccggcaccggcgugcugaccgagagcaacaagaaguuccugccuuuccagcaguucggccgggacaucgccgauaccaccgacgcagugcgggacccccagacccuggagauccuggacaucacccccugcagcuucggcggcgugagcgucaucaccccaggcacaaacaccagcaaccagguggccgugcuguaccagggagugaacugcaccgaggugcccguggccauccacgccgaccagcugacccccaccuggcggguguacuccaccggcagcaacguguuccagacccgggccggcugccugaucggcgccgaguacgugaacaacagcuacgagugcgacauccccaucggcgcuggcaucugcgccagcuaccagacccagaccaacagcccccggcgggcccggagcguggccagccagagcaucaucgccuacaccaugagccugggcgccgagaacagcguggccuacagcaacaacagcaucgcgauccccaccaacuucaccaucagcgugaccaccgagauauuaccugugagcaugaccaagaccagcguggacuguaccauguacaucugcggcgacagcaccgagugcagcaaccugcugcugcaguacggcagcuucugcacccagcugaaccgggcccugaccggcaucgccguggagcaggacaagaacacccaagagguguucgcccaggugaagcagaucuacaagacuccacccaucaaggacuucggcggcuucaacuucagccagauccugcccgaccccagcaagcccagcaagcggagcuucaucgaggaccugcuguucaacaaggugacccuggccgacgccggcuucaucaagcaguacggcgacugccugggggacaucgccgcucgggaucugaucugcgcccagaaguucaacggccugaccgugcugccuccccugcugaccgacgagaugaucgcccaguacaccagcgcccugcuggccggcaccaucaccagcggcuggaccuucggcgccggcgcagcccuucagauccccuucgccaugcagauggccuaccgguucaacggcaucggcgugacccagaacgugcuguacgagaaccagaagcugaucgccaaccaguucaacagcgccaucggcaagauccaggacagccugagcagcaccgccagcgcccugggcaagcugcaggacguggugaaccagaacgcucaggcccugaacacccuggugaagcagcugagcucaaacuuuggcgccaucagcagcgugcugaaugacauccugagccggcuggacccacccgaggccgaggugcagaucgacaggcugaucaccggccggcugcagagccugcagaccuacgugacccagcagcugauccgggccgccgagauccgggccagcgccaaccuggcagccauuaagaugagcgagugcgugcugggccagagcaagcggguggacuucugcggcaagggcuaccaccugaugagcuucccccagagcgcuccccacggcgugguguuccugcacgugaccuacguccccgcccaggagaagaacuucacaaccgcccccgccaucugccacgacggcaaggcccacuucccccgggagggaguguucgugagcaacggcacccacugguucgugacccagcggaacuucuacgagccccagaucaucaccaccgacaacaccuucgugagcggcaacugcgacguggugaucggcaucgugaacaacaccguguacgacccucuccagcccgagcuggacagcuucaaggaggagcuggacaaguacuucaagaaccacaccagccccgacguggaccugggcgauaucagcggcaucaacgccagcguggugaacauccagaaggagaucgaccggcugaacgagguggccaagaaccugaacgagagccugaucgaccugcaggagcugggcaaguacgagcaguacaucaaguggccaugguacaucuggcugggcuucaucgccggccugaucgccaucgugauggugaccaucaugcugugcugcaugaccagcugcuguagcugccugaagggcugcugcagcugcggcagcugcugcaaguucgacgaggacgacagcgagcccgugcugaagggcgugaagcugcacuacaccugaggacuaguuauaagacugacuagcccgaugggccucccaacgggcccuccuccccuccuugcaccgagauuaauaaaaaaaaaaaaaaaaaaaaaaaaaaaaaaaaaaaaaaaaaaaaaaaaaaaaaaaaaaaaaaaaugcaucccccccccccccccccccccccccccccccaaaggcucuuuucagagccaccagaauu

SEQ ID NO: 23368 - RNA, 4039 nt, Artificial Sequence
  SARS-CoV-2/Wuhan/WIV05/2019__EPI_ISL_402128 spike protein mRNA gc (1-1273)(K986P_V987P_K986P_V987P_S13I_W152C_L452R_D614G)
aggagaaagcuuaccauguucguguuccuggugcugcugccccuggugagcauccagugcgugaaccugaccacccggacccagcugcccccugccuacaccaacagcuucacccggggcguguacuaccccgacaagguguuccggagcagcgugcugcacagcacccaggaccuguuccugcccuucuucagcaacgugaccugguuccacgccauccacgugagcggcaccaacggcaccaagcgguucgacaacccagugcugcccuucaacgacggcguguacuucgccagcaccgagaagucaaacaucauccggggcuggaucuucggcaccacccuggacagcaagacacagagccugcugaucgugaacaacgccaccaacguggugaucaaggugugcgaguuucaguucugcaacgaccccuuccugggcguguacuaccacaagaacaacaagagcugcauggagagcgaguuccgggucuacagcagcgcuaacaauugcaccuucgaguacgugagccagcccuuccugauggaccucgagggcaagcagggcaacuucaagaaccugcgggaguucguguucaagaacaucgauggcuacuucaagaucuacagcaagcacacccccaucaaccuggugcgggaccugccccagggauucagcgcccuggagccucugguggaccugcccaucggcaucaacaucaccagguuccagacccugcuggcccugcaccggagcuaccugacccccggcgacagcagcagcggcuggaccgccggcgccgccgcauacuacgugggcuaccugcagccacggaccuuccugcugaaguacaacgagaacggcaccaucaccgacgccguggacugcgcccuggacccccugagcgagaccaaguguacccuaaagagcuucaccguggagaagggcaucuaccagaccagcaacuuccgggugcagcccacugagagcauugugcgguuccccaacaucaccaaccugugccccuucggcgagguguucaacgccacccgguucgccagcguguacgccuggaaccggaagcggaucagcaacugcguggccgacuacagcgugcuguacaacagcgccagcuucagcaccuucaagugcuacggcgugagcccuaccaagcugaacgaccugugcuucaccaacguguacgcugacagcuucgugauccggggcgacgaggugcggcagaucgcccccggccagaccggcaagaucgccgacuacaacuacaagcugcccgacgacuucaccggcugcgugaucgccuggaacagcaacaaccuggacagcaaggugggcggcaacuacaacuaccgguaccggcuguuccguaagagcaaccugaagccauucgagcgggacaucagcaccgagaucuaccaggccggcagcacccccugcaacgguguggagggcuuuaacugcuacuucccccugcagagcuacggcuuccagcccaccaacggcgugggcuaccagcccuaccgggugguggugcugagcuucgagcugcugcacgcccccgccaccgugugcggcccuaaaaagagcaccaaccuggugaagaacaagugcgugaacuucaauuucaacggccugaccggcaccggcgugcugaccgagagcaacaagaaguuccugcccuuccagcaguucggccgggauaucgccgacaccaccgacgcagugcgggacccccagacccuggagauccuggacaucaccccaugcagcuucggcggcgugagcgucaucacccccggcacaaacaccagcaaccagguggccgugcuguaccagggagugaacugcaccgaggugcccguggccauccacgccgaccagcugacccccaccuggcggguguacagcaccggcagcaacguguuccagacccgggccggcugccugaucggcgccgagcacgugaacaacagcuacgagugcgacauccccaucggcgcuggcaucugugccuccuaccagacccagaccaacagcccccggcgggcccggagcguggccagccagagcaucaucgccuacaccaugagccugggcgccgagaacagcguggccuacagcaacaacagcaucgcgaucccuaccaacuucaccauaagcgugaccaccgagaucuuacccgugagcaugaccaagaccagcguggacugcaccauguacaucugcggcgacagcaccgagugcagcaaccugcugcugcaguacggcagcuucugcacccagcugaaccgggcccugaccggcaucgccguggagcaggacaagaacacccaagagguguucgcccaggugaagcagaucuacaagacucccccaaucaaggacuucggcggcuucaacuucagccagauccugcccgaccccagcaagcccagcaagcggagcuucaucgaggaccugcuguucaacaaggugacccuggccgacgccggcuucaucaagcaguacggcgacugccugggggauaucgccgcucgggaccugaucugcgcccagaaguucaacggccugaccgugcugcccccucugcugaccgacgagaugaucgcccaguacaccagcgcccugcuggccggcaccaucaccagcggcuggaccuucggcgccggcgcagcccuucagauccccuucgccaugcagauggccuacagguucaacggcaucggcgugacccagaacgugcuguacgagaaccagaagcugaucgccaaccaguucaacagcgccaucggcaagauccaggacagccugagcagcaccgccagcgcccugggcaagcugcaggacguggugaaccagaacgcucaggcccugaacacccuggugaagcagcugagcagcaacuucggcgccaucagcagcgugcugaaugacauccugucacggcuggaucccccagaggccgaggugcagaucgaccggcugaucaccggccggcugcagagccugcagaccuacgugacccagcagcugauccgggccgccgagauucgggccagcgccaaccuggcagccaccaagaugagcgagugcgugcugggccagagcaagcggguggacuuuugcggcaagggcuaccaccugaugagcuucccccagagcgcuccccacggcgugguguuccugcacgugacauacguccccgcccaggagaagaacuucaccaccgcccccgccaucugccacgacggcaaggcccacuucccccgggagggaguguucgugagcaacggcacccacugguucgugacccagcggaacuucuacgagccucagaucaucaccaccgacaacaccuucgugagcggcaacugcgacguggugaucggcaucgugaacaacaccguguacgacccccuccagcccgagcuggacagcuucaaggaggagcuggacaaguacuucaagaaccacaccagcccagacguggaccugggcgacaucagcggcaucaacgccagcguggugaacauccagaaggagaucgaccggcugaacgagguggccaagaaccugaacgagagccugaucgaccugcaggagcugggcaaguacgagcaguacaucaaguggcccugguacaucuggcugggcuucaucgccggccugaucgccaucgugauggugaccaucaugcugugcugcaugaccagcuguugcagcugccugaagggcugcugcagcugcggcagcugcugcaaguucgacgaggacgacagcgagcccgugcugaagggcgugaagcugcacuacaccugaggacuaguuauaagacugacuagcccgaugggccucccaacgggcccuccuccccuccuugcaccgagauuaauaaaaaaaaaaaaaaaaaaaaaaaaaaaaaaaaaaaaaaaaaaaaaaaaaaaaaaaaaaaaaaaaugcaucccccccccccccccccccccccccccccccaaaggcucuuuucagagccaccagaauu

SEQ ID NO: 23369 - RNA, 4039 nt, Artificial Sequence; identical to SEQ ID NO: 165
  SARS-CoV-2/Wuhan/WIV05/2019__EPI_ISL_402128 spike protein mRNA gc mod (1-1273)(K986P_V987P) R9519

SEQ ID NO: 23370 - RNA, 4039 nt, Artificial Sequence
  SARS-CoV-2/Wuhan/WIV05/2019__EPI_ISL_402128 spike protein mRNA gc mod (1-1273)(K986P_V987P_ D614G)
aggagaaagcuuaccauguucguguuucuggugcugcugccccugguguccagccagugugugaaccugaccaccagaacacagcugccuccagccuacaccaacagcuucaccagaggcguguacuaccccgacaagguguucagauccagcgugcugcacucuacccaggaccuguuccugccuuucuucagcaacgugaccugguuccacgccauccacguguccggcaccaauggcaccaagagauucgacaaccccgugcugcccuucaacgacgggguguacuuugccagcaccgagaaguccaacaucaucagaggcuggaucuucggcaccacacuggacagcaagacccagagccugcugaucgugaacaacgccaccaacguggucaucaaagugugcgaguuccaguucugcaacgaccccuuccugggcgucuacuaccacaagaacaacaagagcuggauggaaagcgaguuccggguguacagcagcgccaacaacugcaccuucgaguacgugucccagccuuuccugauggaccuggaaggcaagcagggcaacuucaagaaccugcgcgaguucguguucaagaacaucgacggcuacuucaaaaucuacagcaagcacaccccuaucaaccucgugcgggaucugccucagggcuucucugcucuggaaccccugguggaucugcccaucggcaucaacaucacccgguuucagacacugcuggcccugcacagaagcuaccugacaccuggcgauagcagcagcggauggacagcuggugccgccgcuuacuaugugggcuaccugcagccuagaaccuuccugcugaaguacaacgagaacggcaccaucaccgacgccguggauugugcucuggauccucugagcgagacaaagugcacccugaaguccuucaccguggaaaagggcaucuaccagaccagcaacuuccgggugcagcccaccgaauccaucgugcgguuccccaauaucaccaaucugugccccuucggcgagguguucaaugccaccagauucgccucuguguacgccuggaaccggaagcggaucagcaauugcguggccgacuacuccgugcuguacaacuccgccagcuucagcaccuucaagugcuacggcguguccccuaccaagcugaacgaccugugcuucacaaacguguacgccgacagcuucgugauccggggagaugaagugcggcagauugccccuggacagacaggcaagaucgccgacuacaacuacaagcugcccgacgacuucaccggcugugugauugccuggaacagcaacaaccuggacuccaaagucggcggcaacuacaauuaccuguaccggcuguuccggaaguccaaucugaagcccuucgagcgggacaucagcaccgaaaucuaucaggccggcagcaccccuugcaacggcguggaaggcuucaacugcuacuucccacugcaguccuacggcuuucagcccacaaauggcgugggcuaucagcccuacagagugguggugcugagcuucgaacugcugcaugcuccugccacagugugcggcccuaagaaaagcaccaaucucgugaagaacaaaugcgugaacuucaacuucaacggccugaccggcaccggcgugcugacagagagcaacaagaaguuccugccauuccagcaguuuggccgggauaucgccgauaccacagacgccguuagagauccccagacacuggaaauccuggacaucaccccaugcagcuucggcggagugucugugaucaccccuggcaccaacaccagcaaucagguggcagugcuguaccagggcgugaacuguaccgaagugcccguggccauucacgccgaucagcugacaccuacauggcggguguacuccaccggcagcaauguguuucagaccagagccggcugucugaucggagccgagcacgugaacaauagcuacgagugcgacauccccaucggcgcuggcaucugugccagcuaccagacacagacaaacagccccagacgggcuagaagcguggccagccagagcaucauugccuacacaaugucucugggcgccgagaacagcguggccuacuccaacaacucuaucgcuauccccaccaacuucaccaucagcgugaccaccgagauccugccuguguccaugaccaagaccagcguggacugcaccauguacaucugcggcgauuccaccgagugcuccaaccugcugcugcaguacggcagcuucugcacccagcugaauagagcccugacagggaucgccguggaacaggacaagaacacccaagagguguucgcccaagugaagcaaaucuacaagaccccuccuaucaaggacuucggcggcuucaauuucagccagauucugcccgauccuagcaagcccagcaagcggagcuucaucgaggaccugcuguucaacaaagugacacuggccgacgccggcuucaucaagcaguauggcgauugucugggcgacauugccgccagggaucugauuugcgcccagaaguuuaacggacugacagugcugccuccucugcugaccgaugagaugaucgcccaguacacaucugcccugcuggccggcacaaucacaagcggcuggacauuuggagcuggcgccgcucugcagauccccuuugcuaugcagauggccuaccgguucaacggcaucggagugacccagaaugugcuguacgagaaccagaagcugaucgccaaccaguucaacagcgccaucggcaagauccaggacagccugagcagcacagcaagcgcccugggaaagcugcaggacguggucaaccagaaugcccaggcacugaacacccuggucaagcagcuguccuccaacuucggcgccaucagcucugugcugaacgauauccugagcagacuggacccuccugaggccgaggugcagaucgacagacugaucacaggcagacugcagagccuccagacauacgugacccagcagcugaucagagccgccgagauuagagccucugccaaucuggccgccaccaagaugucugagugugugcugggccagagcaagagaguggacuuuugcggcaagggcuaccaccugaugagcuucccucagucugccccucacggcgugguguuucugcacgugacauaugugcccgcucaagagaagaauuucaccaccgcuccagccaucugccacgacggcaaagcccacuuuccuagagaaggcguguucguguccaacggcacccauugguucgugacacagcggaacuucuacgagccccagaucaucaccaccgacaacaccuucgugucuggcaacugcgacguugugaucggcauugugaacaauaccguguacgacccucugcagcccgagcuggacagcuucaaagaggaacuggacaaguacuuuaagaaccacacaagccccgacguggaccugggcgauaucagcggaaucaaugccagcgucgugaacauccagaaagagaucgaccggcugaacgagguggccaagaaucugaacgagagccugaucgaccugcaagaacuggggaaguacgagcaguacaucaaguggcccugguacaucuggcugggcuuuaucgccggacugauugccaucgugauggucacaaucaugcuguguugcaugaccagcugcuguagcugccugaagggcuguuguagcuguggcagcugcugcaaguucgacgaggacgauucugagcccgugcugaagggcgugaaacugcacuacaccugaggacuaguuauaagacugacuagcccgaugggccucccaacgggcccuccuccccuccuugcaccgagauuaauaaaaaaaaaaaaaaaaaaaaaaaaaaaaaaaaaaaaaaaaaaaaaaaaaaaaaaaaaaaaaaaaugcaucccccccccccccccccccccccccccccccaaaggcucuuuucagagccaccagaauu

SEQ ID NO: 23371 - RNA, 4039 nt, Artificial Sequence
  SARS-CoV-2/Wuhan/WIV05/2019__EPI_ISL_402128 spike protein mRNA gc mod (1-1273)(K986P_V987P_A222V_D614G)
aggagaaagcuuaccauguucguguuucuggugcugcugccccugguguccagccagugugugaaccugaccaccagaacacagcugccuccagccuacaccaacagcuucaccagaggcguguacuaccccgacaagguguucagauccagcgugcugcacucuacccaggaccuguuccugccuuucuucagcaacgugaccugguuccacgccauccacguguccggcaccaauggcaccaagagauucgacaaccccgugcugcccuucaacgacgggguguacuuugccagcaccgagaaguccaacaucaucagaggcuggaucuucggcaccacacuggacagcaagacccagagccugcugaucgugaacaacgccaccaacguggucaucaaagugugcgaguuccaguucugcaacgaccccuuccugggcgucuacuaccacaagaacaacaagagcuggauggaaagcgaguuccggguguacagcagcgccaacaacugcaccuucgaguacgugucccagccuuuccugauggaccuggaaggcaagcagggcaacuucaagaaccugcgcgaguucguguucaagaacaucgacggcuacuucaaaaucuacagcaagcacaccccuaucaaccucgugcgggaucugccucagggcuucucugugcuggaaccccugguggaucugcccaucggcaucaacaucacccgguuucagacacugcuggcccugcacagaagcuaccugacaccuggcgauagcagcagcggauggacagcuggugccgccgcuuacuaugugggcuaccugcagccuagaaccuuccugcugaaguacaacgagaacggcaccaucaccgacgccguggauugugcucuggauccucugagcgagacaaagugcacccugaaguccuucaccguggaaaagggcaucuaccagaccagcaacuuccgggugcagcccaccgaauccaucgugcgguuccccaauaucaccaaucugugccccuucggcgagguguucaaugccaccagauucgccucuguguacgccuggaaccggaagcggaucagcaauugcguggccgacuacuccgugcuguacaacuccgccagcuucagcaccuucaagugcuacggcguguccccuaccaagcugaacgaccugugcuucacaaacguguacgccgacagcuucgugauccggggagaugaagugcggcagauugccccuggacagacaggcaagaucgccgacuacaacuacaagcugcccgacgacuucaccggcugugugauugccuggaacagcaacaaccuggacuccaaagucggcggcaacuacaauuaccuguaccggcuguuccggaaguccaaucugaagcccuucgagcgggacaucagcaccgaaaucuaucaggccggcagcaccccuugcaacggcguggaaggcuucaacugcuacuucccacugcaguccuacggcuuucagcccacaaauggcgugggcuaucagcccuacagagugguggugcugagcuucgaacugcugcaugcuccugccacagugugcggcccuaagaaaagcaccaaucucgugaagaacaaaugcgugaacuucaacuucaacggccugaccggcaccggcgugcugacagagagcaacaagaaguuccugccauuccagcaguuuggccgggauaucgccgauaccacagacgccguuagagauccccagacacuggaaauccuggacaucaccccaugcagcuucggcggagugucugugaucaccccuggcaccaacaccagcaaucagguggcagugcuguaccagggcgugaacuguaccgaagugcccguggccauucacgccgaucagcugacaccuacauggcggguguacuccaccggcagcaauguguuucagaccagagccggcugucugaucggagccgagcacgugaacaauagcuacgagugcgacauccccaucggcgcuggcaucugugccagcuaccagacacagacaaacagccccagacgggcuagaagcguggccagccagagcaucauugccuacacaaugucucugggcgccgagaacagcguggccuacuccaacaacucuaucgcuauccccaccaacuucaccaucagcgugaccaccgagauccugccuguguccaugaccaagaccagcguggacugcaccauguacaucugcggcgauuccaccgagugcuccaaccugcugcugcaguacggcagcuucugcacccagcugaauagagcccugacagggaucgccguggaacaggacaagaacacccaagagguguucgcccaagugaagcaaaucuacaagaccccuccuaucaaggacuucggcggcuucaauuucagccagauucugcccgauccuagcaagcccagcaagcggagcuucaucgaggaccugcuguucaacaaagugacacuggccgacgccggcuucaucaagcaguauggcgauugucugggcgacauugccgccagggaucugauuugcgcccagaaguuuaacggacugacagugcugccuccucugcugaccgaugagaugaucgcccaguacacaucugcccugcuggccggcacaaucacaagcggcuggacauuuggagcuggcgccgcucugcagauccccuuugcuaugcagauggccuaccgguucaacggcaucggagugacccagaaugugcuguacgagaaccagaagcugaucgccaaccaguucaacagcgccaucggcaagauccaggacagccugagcagcacagcaagcgcccugggaaagcugcaggacguggucaaccagaaugcccaggcacugaacacccuggucaagcagcuguccuccaacuucggcgccaucagcucugugcugaacgauauccugagcagacuggacccuccugaggccgaggugcagaucgacagacugaucacaggcagacugcagagccuccagacauacgugacccagcagcugaucagagccgccgagauuagagccucugccaaucuggccgccaccaagaugucugagugugugcugggccagagcaagagaguggacuuuugcggcaagggcuaccaccugaugagcuucccucagucugccccucacggcgugguguuucugcacgugacauaugugcccgcucaagagaagaauuucaccaccgcuccagccaucugccacgacggcaaagcccacuuuccuagagaaggcguguucguguccaacggcacccauugguucgugacacagcggaacuucuacgagccccagaucaucaccaccgacaacaccuucgugucuggcaacugcgacguugugaucggcauugugaacaauaccguguacgacccucugcagcccgagcuggacagcuucaaagaggaacuggacaaguacuuuaagaaccacacaagccccgacguggaccugggcgauaucagcggaaucaaugccagcgucgugaacauccagaaagagaucgaccggcugaacgagguggccaagaaucugaacgagagccugaucgaccugcaagaacuggggaaguacgagcaguacaucaaguggcccugguacaucuggcugggcuuuaucgccggacugauugccaucgugauggucacaaucaugcuguguugcaugaccagcugcuguagcugccugaagggcuguuguagcuguggcagcugcugcaaguucgacgaggacgauucugagcccgugcugaagggcgugaaacugcacuacaccugaggacuaguuauaagacugacuagcccgaugggccucccaacgggcccuccuccccuccuugcaccgagauuaauaaaaaaaaaaaaaaaaaaaaaaaaaaaaaaaaaaaaaaaaaaaaaaaaaaaaaaaaaaaaaaaaugcaucccccccccccccccccccccccccccccccaaaggcucuuuucagagccaccagaauu

SEQ ID NO: 23372 - RNA, 4039 nt, Artificial Sequence
  SARS-CoV-2/Wuhan/WIV05/2019__EPI_ISL_402128 spike protein mRNA gc mod (1-1273)(K986P_V987P_N439K_D614G)
aggagaaagcuuaccauguucguguuucuggugcugcugccccugguguccagccagugugugaaccugaccaccagaacacagcugccuccagccuacaccaacagcuucaccagaggcguguacuaccccgacaagguguucagauccagcgugcugcacucuacccaggaccuguuccugccuuucuucagcaacgugaccugguuccacgccauccacguguccggcaccaauggcaccaagagauucgacaaccccgugcugcccuucaacgacgggguguacuuugccagcaccgagaaguccaacaucaucagaggcuggaucuucggcaccacacuggacagcaagacccagagccugcugaucgugaacaacgccaccaacguggucaucaaagugugcgaguuccaguucugcaacgaccccuuccugggcgucuacuaccacaagaacaacaagagcuggauggaaagcgaguuccggguguacagcagcgccaacaacugcaccuucgaguacgugucccagccuuuccugauggaccuggaaggcaagcagggcaacuucaagaaccugcgcgaguucguguucaagaacaucgacggcuacuucaaaaucuacagcaagcacaccccuaucaaccucgugcgggaucugccucagggcuucucugcucuggaaccccugguggaucugcccaucggcaucaacaucacccgguuucagacacugcuggcccugcacagaagcuaccugacaccuggcgauagcagcagcggauggacagcuggugccgccgcuuacuaugugggcuaccugcagccuagaaccuuccugcugaaguacaacgagaacggcaccaucaccgacgccguggauugugcucuggauccucugagcgagacaaagugcacccugaaguccuucaccguggaaaagggcaucuaccagaccagcaacuuccgggugcagcccaccgaauccaucgugcgguuccccaauaucaccaaucugugccccuucggcgagguguucaaugccaccagauucgccucuguguacgccuggaaccggaagcggaucagcaauugcguggccgacuacuccgugcuguacaacuccgccagcuucagcaccuucaagugcuacggcguguccccuaccaagcugaacgaccugugcuucacaaacguguacgccgacagcuucgugauccggggagaugaagugcggcagauugccccuggacagacaggcaagaucgccgacuacaacuacaagcugcccgacgacuucaccggcugugugauugccuggaacagcaagaaccuggacuccaaagucggcggcaacuacaauuaccuguaccggcuguuccggaaguccaaucugaagcccuucgagcgggacaucagcaccgaaaucuaucaggccggcagcaccccuugcaacggcguggaaggcuucaacugcuacuucccacugcaguccuacggcuuucagcccacaaauggcgugggcuaucagcccuacagagugguggugcugagcuucgaacugcugcaugcuccugccacagugugcggcccuaagaaaagcaccaaucucgugaagaacaaaugcgugaacuucaacuucaacggccugaccggcaccggcgugcugacagagagcaacaagaaguuccugccauuccagcaguuuggccgggauaucgccgauaccacagacgccguuagagauccccagacacuggaaauccuggacaucaccccaugcagcuucggcggagugucugugaucaccccuggcaccaacaccagcaaucagguggcagugcuguaccagggcgugaacuguaccgaagugcccguggccauucacgccgaucagcugacaccuacauggcggguguacuccaccggcagcaauguguuucagaccagagccggcugucugaucggagccgagcacgugaacaauagcuacgagugcgacauccccaucggcgcuggcaucugugccagcuaccagacacagacaaacagccccagacgggcuagaagcguggccagccagagcaucauugccuacacaaugucucugggcgccgagaacagcguggccuacuccaacaacucuaucgcuauccccaccaacuucaccaucagcgugaccaccgagauccugccuguguccaugaccaagaccagcguggacugcaccauguacaucugcggcgauuccaccgagugcuccaaccugcugcugcaguacggcagcuucugcacccagcugaauagagcccugacagggaucgccguggaacaggacaagaacacccaagagguguucgcccaagugaagcaaaucuacaagaccccuccuaucaaggacuucggcggcuucaauuucagccagauucugcccgauccuagcaagcccagcaagcggagcuucaucgaggaccugcuguucaacaaagugacacuggccgacgccggcuucaucaagcaguauggcgauugucugggcgacauugccgccagggaucugauuugcgcccagaaguuuaacggacugacagugcugccuccucugcugaccgaugagaugaucgcccaguacacaucugcccugcuggccggcacaaucacaagcggcuggacauuuggagcuggcgccgcucugcagauccccuuugcuaugcagauggccuaccgguucaacggcaucggagugacccagaaugugcuguacgagaaccagaagcugaucgccaaccaguucaacagcgccaucggcaagauccaggacagccugagcagcacagcaagcgcccugggaaagcugcaggacguggucaaccagaaugcccaggcacugaacacccuggucaagcagcuguccuccaacuucggcgccaucagcucugugcugaacgauauccugagcagacuggacccuccugaggccgaggugcagaucgacagacugaucacaggcagacugcagagccuccagacauacgugacccagcagcugaucagagccgccgagauuagagccucugccaaucuggccgccaccaagaugucugagugugugcugggccagagcaagagaguggacuuuugcggcaagggcuaccaccugaugagcuucccucagucugccccucacggcgugguguuucugcacgugacauaugugcccgcucaagagaagaauuucaccaccgcuccagccaucugccacgacggcaaagcccacuuuccuagagaaggcguguucguguccaacggcacccauugguucgugacacagcggaacuucuacgagccccagaucaucaccaccgacaacaccuucgugucuggcaacugcgacguugugaucggcauugugaacaauaccguguacgacccucugcagcccgagcuggacagcuucaaagaggaacuggacaaguacuuuaagaaccacacaagccccgacguggaccugggcgauaucagcggaaucaaugccagcgucgugaacauccagaaagagaucgaccggcugaacgagguggccaagaaucugaacgagagccugaucgaccugcaagaacuggggaaguacgagcaguacaucaaguggcccugguacaucuggcugggcuuuaucgccggacugauugccaucgugauggucacaaucaugcuguguugcaugaccagcugcuguagcugccugaagggcuguuguagcuguggcagcugcugcaaguucgacgaggacgauucugagcccgugcugaagggcgugaaacugcacuacaccugaggacuaguuauaagacugacuagcccgaugggccucccaacgggcccuccuccccuccuugcaccgagauuaauaaaaaaaaaaaaaaaaaaaaaaaaaaaaaaaaaaaaaaaaaaaaaaaaaaaaaaaaaaaaaaaaugcaucccccccccccccccccccccccccccccccaaaggcucuuuucagagccaccagaauu

SEQ ID NO: 23373 - RNA, 4039 nt, Artificial Sequence
  SARS-CoV-2/Wuhan/WIV05/2019__EPI_ISL_402128 spike protein mRNA gc mod (1-1273)(K986P_V987P_S477N_D614G)
aggagaaagcuuaccauguucguguuucuggugcugcugccccugguguccagccagugugugaaccugaccaccagaacacagcugccuccagccuacaccaacagcuucaccagaggcguguacuaccccgacaagguguucagauccagcgugcugcacucuacccaggaccuguuccugccuuucuucagcaacgugaccugguuccacgccauccacguguccggcaccaauggcaccaagagauucgacaaccccgugcugcccuucaacgacgggguguacuuugccagcaccgagaaguccaacaucaucagaggcuggaucuucggcaccacacuggacagcaagacccagagccugcugaucgugaacaacgccaccaacguggucaucaaagugugcgaguuccaguucugcaacgaccccuuccugggcgucuacuaccacaagaacaacaagagcuggauggaaagcgaguuccggguguacagcagcgccaacaacugcaccuucgaguacgugucccagccuuuccugauggaccuggaaggcaagcagggcaacuucaagaaccugcgcgaguucguguucaagaacaucgacggcuacuucaaaaucuacagcaagcacaccccuaucaaccucgugcgggaucugccucagggcuucucugcucuggaaccccugguggaucugcccaucggcaucaacaucacccgguuucagacacugcuggcccugcacagaagcuaccugacaccuggcgauagcagcagcggauggacagcuggugccgccgcuuacuaugugggcuaccugcagccuagaaccuuccugcugaaguacaacgagaacggcaccaucaccgacgccguggauugugcucuggauccucugagcgagacaaagugcacccugaaguccuucaccguggaaaagggcaucuaccagaccagcaacuuccgggugcagcccaccgaauccaucgugcgguuccccaauaucaccaaucugugccccuucggcgagguguucaaugccaccagauucgccucuguguacgccuggaaccggaagcggaucagcaauugcguggccgacuacuccgugcuguacaacuccgccagcuucagcaccuucaagugcuacggcguguccccuaccaagcugaacgaccugugcuucacaaacguguacgccgacagcuucgugauccggggagaugaagugcggcagauugccccuggacagacaggcaagaucgccgacuacaacuacaagcugcccgacgacuucaccggcugugugauugccuggaacagcaacaaccuggacuccaaagucggcggcaacuacaauuaccuguaccggcuguuccggaaguccaaucugaagcccuucgagcgggacaucagcaccgaaaucuaucaggccggcaacaccccuugcaacggcguggaaggcuucaacugcuacuucccacugcaguccuacggcuuucagcccacaaauggcgugggcuaucagcccuacagagugguggugcugagcuucgaacugcugcaugcuccugccacagugugcggcccuaagaaaagcaccaaucucgugaagaacaaaugcgugaacuucaacuucaacggccugaccggcaccggcgugcugacagagagcaacaagaaguuccugccauuccagcaguuuggccgggauaucgccgauaccacagacgccguuagagauccccagacacuggaaauccuggacaucaccccaugcagcuucggcggagugucugugaucaccccuggcaccaacaccagcaaucagguggcagugcuguaccagggcgugaacuguaccgaagugcccguggccauucacgccgaucagcugacaccuacauggcggguguacuccaccggcagcaauguguuucagaccagagccggcugucugaucggagccgagcacgugaacaauagcuacgagugcgacauccccaucggcgcuggcaucugugccagcuaccagacacagacaaacagccccagacgggcuagaagcguggccagccagagcaucauugccuacacaaugucucugggcgccgagaacagcguggccuacuccaacaacucuaucgcuauccccaccaacuucaccaucagcgugaccaccgagauccugccuguguccaugaccaagaccagcguggacugcaccauguacaucugcggcgauuccaccgagugcuccaaccugcugcugcaguacggcagcuucugcacccagcugaauagagcccugacagggaucgccguggaacaggacaagaacacccaagagguguucgcccaagugaagcaaaucuacaagaccccuccuaucaaggacuucggcggcuucaauuucagccagauucugcccgauccuagcaagcccagcaagcggagcuucaucgaggaccugcuguucaacaaagugacacuggccgacgccggcuucaucaagcaguauggcgauugucugggcgacauugccgccagggaucugauuugcgcccagaaguuuaacggacugacagugcugccuccucugcugaccgaugagaugaucgcccaguacacaucugcccugcuggccggcacaaucacaagcggcuggacauuuggagcuggcgccgcucugcagauccccuuugcuaugcagauggccuaccgguucaacggcaucggagugacccagaaugugcuguacgagaaccagaagcugaucgccaaccaguucaacagcgccaucggcaagauccaggacagccugagcagcacagcaagcgcccugggaaagcugcaggacguggucaaccagaaugcccaggcacugaacacccuggucaagcagcuguccuccaacuucggcgccaucagcucugugcugaacgauauccugagcagacuggacccuccugaggccgaggugcagaucgacagacugaucacaggcagacugcagagccuccagacauacgugacccagcagcugaucagagccgccgagauuagagccucugccaaucuggccgccaccaagaugucugagugugugcugggccagagcaagagaguggacuuuugcggcaagggcuaccaccugaugagcuucccucagucugccccucacggcgugguguuucugcacgugacauaugugcccgcucaagagaagaauuucaccaccgcuccagccaucugccacgacggcaaagcccacuuuccuagagaaggcguguucguguccaacggcacccauugguucgugacacagcggaacuucuacgagccccagaucaucaccaccgacaacaccuucgugucuggcaacugcgacguugugaucggcauugugaacaauaccguguacgacccucugcagcccgagcuggacagcuucaaagaggaacuggacaaguacuuuaagaaccacacaagccccgacguggaccugggcgauaucagcggaaucaaugccagcgucgugaacauccagaaagagaucgaccggcugaacgagguggccaagaaucugaacgagagccugaucgaccugcaagaacuggggaaguacgagcaguacaucaaguggcccugguacaucuggcugggcuuuaucgccggacugauugccaucgugauggucacaaucaugcuguguugcaugaccagcugcuguagcugccugaagggcuguuguagcuguggcagcugcugcaaguucgacgaggacgauucugagcccgugcugaagggcgugaaacugcacuacaccugaggacuaguuauaagacugacuagcccgaugggccucccaacgggcccuccuccccuccuugcaccgagauuaauaaaaaaaaaaaaaaaaaaaaaaaaaaaaaaaaaaaaaaaaaaaaaaaaaaaaaaaaaaaaaaaaugcaucccccccccccccccccccccccccccccccaaaggcucuuuucagagccaccagaauu

SEQ ID NO: 23374 - RNA, 4039 nt, Artificial Sequence
  SARS-CoV-2/Wuhan/WIV05/2019__EPI_ISL_402128 spike protein mRNA gc mod (1-1273)(K986P_V987P_N501Y_D614G)
aggagaaagcuuaccauguucguguuucuggugcugcugccccugguguccagccagugugugaaccugaccaccagaacacagcugccuccagccuacaccaacagcuucaccagaggcguguacuaccccgacaagguguucagauccagcgugcugcacucuacccaggaccuguuccugccuuucuucagcaacgugaccugguuccacgccauccacguguccggcaccaauggcaccaagagauucgacaaccccgugcugcccuucaacgacgggguguacuuugccagcaccgagaaguccaacaucaucagaggcuggaucuucggcaccacacuggacagcaagacccagagccugcugaucgugaacaacgccaccaacguggucaucaaagugugcgaguuccaguucugcaacgaccccuuccugggcgucuacuaccacaagaacaacaagagcuggauggaaagcgaguuccggguguacagcagcgccaacaacugcaccuucgaguacgugucccagccuuuccugauggaccuggaaggcaagcagggcaacuucaagaaccugcgcgaguucguguucaagaacaucgacggcuacuucaaaaucuacagcaagcacaccccuaucaaccucgugcgggaucugccucagggcuucucugcucuggaaccccugguggaucugcccaucggcaucaacaucacccgguuucagacacugcuggcccugcacagaagcuaccugacaccuggcgauagcagcagcggauggacagcuggugccgccgcuuacuaugugggcuaccugcagccuagaaccuuccugcugaaguacaacgagaacggcaccaucaccgacgccguggauugugcucuggauccucugagcgagacaaagugcacccugaaguccuucaccguggaaaagggcaucuaccagaccagcaacuuccgggugcagcccaccgaauccaucgugcgguuccccaauaucaccaaucugugccccuucggcgagguguucaaugccaccagauucgccucuguguacgccuggaaccggaagcggaucagcaauugcguggccgacuacuccgugcuguacaacuccgccagcuucagcaccuucaagugcuacggcguguccccuaccaagcugaacgaccugugcuucacaaacguguacgccgacagcuucgugauccggggagaugaagugcggcagauugccccuggacagacaggcaagaucgccgacuacaacuacaagcugcccgacgacuucaccggcugugugauugccuggaacagcaacaaccuggacuccaaagucggcggcaacuacaauuaccuguaccggcuguuccggaaguccaaucugaagcccuucgagcgggacaucagcaccgaaaucuaucaggccggcagcaccccuugcaacggcguggaaggcuucaacugcuacuucccacugcaguccuacggcuuucagcccacauacggcgugggcuaucagcccuacagagugguggugcugagcuucgaacugcugcaugcuccugccacagugugcggcccuaagaaaagcaccaaucucgugaagaacaaaugcgugaacuucaacuucaacggccugaccggcaccggcgugcugacagagagcaacaagaaguuccugccauuccagcaguuuggccgggauaucgccgauaccacagacgccguuagagauccccagacacuggaaauccuggacaucaccccaugcagcuucggcggagugucugugaucaccccuggcaccaacaccagcaaucagguggcagugcuguaccagggcgugaacuguaccgaagugcccguggccauucacgccgaucagcugacaccuacauggcggguguacuccaccggcagcaauguguuucagaccagagccggcugucugaucggagccgagcacgugaacaauagcuacgagugcgacauccccaucggcgcuggcaucugugccagcuaccagacacagacaaacagccccagacgggcuagaagcguggccagccagagcaucauugccuacacaaugucucugggcgccgagaacagcguggccuacuccaacaacucuaucgcuauccccaccaacuucaccaucagcgugaccaccgagauccugccuguguccaugaccaagaccagcguggacugcaccauguacaucugcggcgauuccaccgagugcuccaaccugcugcugcaguacggcagcuucugcacccagcugaauagagcccugacagggaucgccguggaacaggacaagaacacccaagagguguucgcccaagugaagcaaaucuacaagaccccuccuaucaaggacuucggcggcuucaauuucagccagauucugcccgauccuagcaagcccagcaagcggagcuucaucgaggaccugcuguucaacaaagugacacuggccgacgccggcuucaucaagcaguauggcgauugucugggcgacauugccgccagggaucugauuugcgcccagaaguuuaacggacugacagugcugccuccucugcugaccgaugagaugaucgcccaguacacaucugcccugcuggccggcacaaucacaagcggcuggacauuuggagcuggcgccgcucugcagauccccuuugcuaugcagauggccuaccgguucaacggcaucggagugacccagaaugugcuguacgagaaccagaagcugaucgccaaccaguucaacagcgccaucggcaagauccaggacagccugagcagcacagcaagcgcccugggaaagcugcaggacguggucaaccagaaugcccaggcacugaacacccuggucaagcagcuguccuccaacuucggcgccaucagcucugugcugaacgauauccugagcagacuggacccuccugaggccgaggugcagaucgacagacugaucacaggcagacugcagagccuccagacauacgugacccagcagcugaucagagccgccgagauuagagccucugccaaucuggccgccaccaagaugucugagugugugcugggccagagcaagagaguggacuuuugcggcaagggcuaccaccugaugagcuucccucagucugccccucacggcgugguguuucugcacgugacauaugugcccgcucaagagaagaauuucaccaccgcuccagccaucugccacgacggcaaagcccacuuuccuagagaaggcguguucguguccaacggcacccauugguucgugacacagcggaacuucuacgagccccagaucaucaccaccgacaacaccuucgugucuggcaacugcgacguugugaucggcauugugaacaauaccguguacgacccucugcagcccgagcuggacagcuucaaagaggaacuggacaaguacuuuaagaaccacacaagccccgacguggaccugggcgauaucagcggaaucaaugccagcgucgugaacauccagaaagagaucgaccggcugaacgagguggccaagaaucugaacgagagccugaucgaccugcaagaacuggggaaguacgagcaguacaucaaguggcccugguacaucuggcugggcuuuaucgccggacugauugccaucgugauggucacaaucaugcuguguugcaugaccagcugcuguagcugccugaagggcuguuguagcuguggcagcugcugcaaguucgacgaggacgauucugagcccgugcugaagggcgugaaacugcacuacaccugaggacuaguuauaagacugacuagcccgaugggccucccaacgggcccuccuccccuccuugcaccgagauuaauaaaaaaaaaaaaaaaaaaaaaaaaaaaaaaaaaaaaaaaaaaaaaaaaaaaaaaaaaaaaaaaaugcaucccccccccccccccccccccccccccccccaaaggcucuuuucagagccaccagaauu

SEQ ID NO: 23375 - RNA, 4033 nt, Artificial Sequence
  SARS-CoV-2/Wuhan/WIV05/2019__EPI_ISL_402128 spike protein mRNA gc mod (1-1273)(K986P_V987P_H69del_V70del_D614G)
aggagaaagcuuaccauguucguguuucuggugcugcugccccugguguccagccagugugugaaccugaccaccagaacacagcugccuccagccuacaccaacagcuucaccagaggcguguacuaccccgacaagguguucagauccagcgugcugcacucuacccaggaccuguuccugccuuucuucagcaacgugaccugguuccacgccaucuccggcaccaauggcaccaagagauucgacaaccccgugcugcccuucaacgacgggguguacuuugccagcaccgagaaguccaacaucaucagaggcuggaucuucggcaccacacuggacagcaagacccagagccugcugaucgugaacaacgccaccaacguggucaucaaagugugcgaguuccaguucugcaacgaccccuuccugggcgucuacuaccacaagaacaacaagagcuggauggaaagcgaguuccggguguacagcagcgccaacaacugcaccuucgaguacgugucccagccuuuccugauggaccuggaaggcaagcagggcaacuucaagaaccugcgcgaguucguguucaagaacaucgacggcuacuucaaaaucuacagcaagcacaccccuaucaaccucgugcgggaucugccucagggcuucucugcucuggaaccccugguggaucugcccaucggcaucaacaucacccgguuucagacacugcuggcccugcacagaagcuaccugacaccuggcgauagcagcagcggauggacagcuggugccgccgcuuacuaugugggcuaccugcagccuagaaccuuccugcugaaguacaacgagaacggcaccaucaccgacgccguggauugugcucuggauccucugagcgagacaaagugcacccugaaguccuucaccguggaaaagggcaucuaccagaccagcaacuuccgggugcagcccaccgaauccaucgugcgguuccccaauaucaccaaucugugccccuucggcgagguguucaaugccaccagauucgccucuguguacgccuggaaccggaagcggaucagcaauugcguggccgacuacuccgugcuguacaacuccgccagcuucagcaccuucaagugcuacggcguguccccuaccaagcugaacgaccugugcuucacaaacguguacgccgacagcuucgugauccggggagaugaagugcggcagauugccccuggacagacaggcaagaucgccgacuacaacuacaagcugcccgacgacuucaccggcugugugauugccuggaacagcaacaaccuggacuccaaagucggcggcaacuacaauuaccuguaccggcuguuccggaaguccaaucugaagcccuucgagcgggacaucagcaccgaaaucuaucaggccggcagcaccccuugcaacggcguggaaggcuucaacugcuacuucccacugcaguccuacggcuuucagcccacaaauggcgugggcuaucagcccuacagagugguggugcugagcuucgaacugcugcaugcuccugccacagugugcggcccuaagaaaagcaccaaucucgugaagaacaaaugcgugaacuucaacuucaacggccugaccggcaccggcgugcugacagagagcaacaagaaguuccugccauuccagcaguuuggccgggauaucgccgauaccacagacgccguuagagauccccagacacuggaaauccuggacaucaccccaugcagcuucggcggagugucugugaucaccccuggcaccaacaccagcaaucagguggcagugcuguaccagggcgugaacuguaccgaagugcccguggccauucacgccgaucagcugacaccuacauggcggguguacuccaccggcagcaauguguuucagaccagagccggcugucugaucggagccgagcacgugaacaauagcuacgagugcgacauccccaucggcgcuggcaucugugccagcuaccagacacagacaaacagccccagacgggcuagaagcguggccagccagagcaucauugccuacacaaugucucugggcgccgagaacagcguggccuacuccaacaacucuaucgcuauccccaccaacuucaccaucagcgugaccaccgagauccugccuguguccaugaccaagaccagcguggacugcaccauguacaucugcggcgauuccaccgagugcuccaaccugcugcugcaguacggcagcuucugcacccagcugaauagagcccugacagggaucgccguggaacaggacaagaacacccaagagguguucgcccaagugaagcaaaucuacaagaccccuccuaucaaggacuucggcggcuucaauuucagccagauucugcccgauccuagcaagcccagcaagcggagcuucaucgaggaccugcuguucaacaaagugacacuggccgacgccggcuucaucaagcaguauggcgauugucugggcgacauugccgccagggaucugauuugcgcccagaaguuuaacggacugacagugcugccuccucugcugaccgaugagaugaucgcccaguacacaucugcccugcuggccggcacaaucacaagcggcuggacauuuggagcuggcgccgcucugcagauccccuuugcuaugcagauggccuaccgguucaacggcaucggagugacccagaaugugcuguacgagaaccagaagcugaucgccaaccaguucaacagcgccaucggcaagauccaggacagccugagcagcacagcaagcgcccugggaaagcugcaggacguggucaaccagaaugcccaggcacugaacacccuggucaagcagcuguccuccaacuucggcgccaucagcucugugcugaacgauauccugagcagacuggacccuccugaggccgaggugcagaucgacagacugaucacaggcagacugcagagccuccagacauacgugacccagcagcugaucagagccgccgagauuagagccucugccaaucuggccgccaccaagaugucugagugugugcugggccagagcaagagaguggacuuuugcggcaagggcuaccaccugaugagcuucccucagucugccccucacggcgugguguuucugcacgugacauaugugcccgcucaagagaagaauuucaccaccgcuccagccaucugccacgacggcaaagcccacuuuccuagagaaggcguguucguguccaacggcacccauugguucgugacacagcggaacuucuacgagccccagaucaucaccaccgacaacaccuucgugucuggcaacugcgacguugugaucggcauugugaacaauaccguguacgacccucugcagcccgagcuggacagcuucaaagaggaacuggacaaguacuuuaagaaccacacaagccccgacguggaccugggcgauaucagcggaaucaaugccagcgucgugaacauccagaaagagaucgaccggcugaacgagguggccaagaaucugaacgagagccugaucgaccugcaagaacuggggaaguacgagcaguacaucaaguggcccugguacaucuggcugggcuuuaucgccggacugauugccaucgugauggucacaaucaugcuguguugcaugaccagcugcuguagcugccugaagggcuguuguagcuguggcagcugcugcaaguucgacgaggacgauucugagcccgugcugaagggcgugaaacugcacuacaccugaggacuaguuauaagacugacuagcccgaugggccucccaacgggcccuccuccccuccuugcaccgagauuaauaaaaaaaaaaaaaaaaaaaaaaaaaaaaaaaaaaaaaaaaaaaaaaaaaaaaaaaaaaaaaaaaugcaucccccccccccccccccccccccccccccccaaaggcucuuuucagagccaccagaauu

SEQ ID NO: 23376 - RNA, 4039 nt, Artificial Sequence
  SARS-CoV-2/Wuhan/WIV05/2019__EPI_ISL_402128 spike protein mRNA gc mod (1-1273)(K986P_V987P_Y453F_D614G)
aggagaaagcuuaccauguucguguuucuggugcugcugccccugguguccagccagugugugaaccugaccaccagaacacagcugccuccagccuacaccaacagcuucaccagaggcguguacuaccccgacaagguguucagauccagcgugcugcacucuacccaggaccuguuccugccuuucuucagcaacgugaccugguuccacgccauccacguguccggcaccaauggcaccaagagauucgacaaccccgugcugcccuucaacgacgggguguacuuugccagcaccgagaaguccaacaucaucagaggcuggaucuucggcaccacacuggacagcaagacccagagccugcugaucgugaacaacgccaccaacguggucaucaaagugugcgaguuccaguucugcaacgaccccuuccugggcgucuacuaccacaagaacaacaagagcuggauggaaagcgaguuccggguguacagcagcgccaacaacugcaccuucgaguacgugucccagccuuuccugauggaccuggaaggcaagcagggcaacuucaagaaccugcgcgaguucguguucaagaacaucgacggcuacuucaaaaucuacagcaagcacaccccuaucaaccucgugcgggaucugccucagggcuucucugcucuggaaccccugguggaucugcccaucggcaucaacaucacccgguuucagacacugcuggcccugcacagaagcuaccugacaccuggcgauagcagcagcggauggacagcuggugccgccgcuuacuaugugggcuaccugcagccuagaaccuuccugcugaaguacaacgagaacggcaccaucaccgacgccguggauugugcucuggauccucugagcgagacaaagugcacccugaaguccuucaccguggaaaagggcaucuaccagaccagcaacuuccgggugcagcccaccgaauccaucgugcgguuccccaauaucaccaaucugugccccuucggcgagguguucaaugccaccagauucgccucuguguacgccuggaaccggaagcggaucagcaauugcguggccgacuacuccgugcuguacaacuccgccagcuucagcaccuucaagugcuacggcguguccccuaccaagcugaacgaccugugcuucacaaacguguacgccgacagcuucgugauccggggagaugaagugcggcagauugccccuggacagacaggcaagaucgccgacuacaacuacaagcugcccgacgacuucaccggcugugugauugccuggaacagcaacaaccuggacuccaaagucggcggcaacuacaauuaccuguuccggcuguuccggaaguccaaucugaagcccuucgagcgggacaucagcaccgaaaucuaucaggccggcagcaccccuugcaacggcguggaaggcuucaacugcuacuucccacugcaguccuacggcuuucagcccacaaauggcgugggcuaucagcccuacagagugguggugcugagcuucgaacugcugcaugcuccugccacagugugcggcccuaagaaaagcaccaaucucgugaagaacaaaugcgugaacuucaacuucaacggccugaccggcaccggcgugcugacagagagcaacaagaaguuccugccauuccagcaguuuggccgggauaucgccgauaccacagacgccguuagagauccccagacacuggaaauccuggacaucaccccaugcagcuucggcggagugucugugaucaccccuggcaccaacaccagcaaucagguggcagugcuguaccagggcgugaacuguaccgaagugcccguggccauucacgccgaucagcugacaccuacauggcggguguacuccaccggcagcaauguguuucagaccagagccggcugucugaucggagccgagcacgugaacaauagcuacgagugcgacauccccaucggcgcuggcaucugugccagcuaccagacacagacaaacagccccagacgggcuagaagcguggccagccagagcaucauugccuacacaaugucucugggcgccgagaacagcguggccuacuccaacaacucuaucgcuauccccaccaacuucaccaucagcgugaccaccgagauccugccuguguccaugaccaagaccagcguggacugcaccauguacaucugcggcgauuccaccgagugcuccaaccugcugcugcaguacggcagcuucugcacccagcugaauagagcccugacagggaucgccguggaacaggacaagaacacccaagagguguucgcccaagugaagcaaaucuacaagaccccuccuaucaaggacuucggcggcuucaauuucagccagauucugcccgauccuagcaagcccagcaagcggagcuucaucgaggaccugcuguucaacaaagugacacuggccgacgccggcuucaucaagcaguauggcgauugucugggcgacauugccgccagggaucugauuugcgcccagaaguuuaacggacugacagugcugccuccucugcugaccgaugagaugaucgcccaguacacaucugcccugcuggccggcacaaucacaagcggcuggacauuuggagcuggcgccgcucugcagauccccuuugcuaugcagauggccuaccgguucaacggcaucggagugacccagaaugugcuguacgagaaccagaagcugaucgccaaccaguucaacagcgccaucggcaagauccaggacagccugagcagcacagcaagcgcccugggaaagcugcaggacguggucaaccagaaugcccaggcacugaacacccuggucaagcagcuguccuccaacuucggcgccaucagcucugugcugaacgauauccugagcagacuggacccuccugaggccgaggugcagaucgacagacugaucacaggcagacugcagagccuccagacauacgugacccagcagcugaucagagccgccgagauuagagccucugccaaucuggccgccaccaagaugucugagugugugcugggccagagcaagagaguggacuuuugcggcaagggcuaccaccugaugagcuucccucagucugccccucacggcgugguguuucugcacgugacauaugugcccgcucaagagaagaauuucaccaccgcuccagccaucugccacgacggcaaagcccacuuuccuagagaaggcguguucguguccaacggcacccauugguucgugacacagcggaacuucuacgagccccagaucaucaccaccgacaacaccuucgugucuggcaacugcgacguugugaucggcauugugaacaauaccguguacgacccucugcagcccgagcuggacagcuucaaagaggaacuggacaaguacuuuaagaaccacacaagccccgacguggaccugggcgauaucagcggaaucaaugccagcgucgugaacauccagaaagagaucgaccggcugaacgagguggccaagaaucugaacgagagccugaucgaccugcaagaacuggggaaguacgagcaguacaucaaguggcccugguacaucuggcugggcuuuaucgccggacugauugccaucgugauggucacaaucaugcuguguugcaugaccagcugcuguagcugccugaagggcuguuguagcuguggcagcugcugcaaguucgacgaggacgauucugagcccgugcugaagggcgugaaacugcacuacaccugaggacuaguuauaagacugacuagcccgaugggccucccaacgggcccuccuccccuccuugcaccgagauuaauaaaaaaaaaaaaaaaaaaaaaaaaaaaaaaaaaaaaaaaaaaaaaaaaaaaaaaaaaaaaaaaaugcaucccccccccccccccccccccccccccccccaaaggcucuuuucagagccaccagaauu

SEQ ID NO: 23377 - RNA, 4039 nt, Artificial Sequence
  SARS-CoV-2/Wuhan/WIV05/2019__EPI_ISL_402128 spike protein mRNA gc mod (1-1273)(K986P_V987P_D614G_I692V)
aggagaaagcuuaccauguucguguuucuggugcugcugccccugguguccagccagugugugaaccugaccaccagaacacagcugccuccagccuacaccaacagcuucaccagaggcguguacuaccccgacaagguguucagauccagcgugcugcacucuacccaggaccuguuccugccuuucuucagcaacgugaccugguuccacgccauccacguguccggcaccaauggcaccaagagauucgacaaccccgugcugcccuucaacgacgggguguacuuugccagcaccgagaaguccaacaucaucagaggcuggaucuucggcaccacacuggacagcaagacccagagccugcugaucgugaacaacgccaccaacguggucaucaaagugugcgaguuccaguucugcaacgaccccuuccugggcgucuacuaccacaagaacaacaagagcuggauggaaagcgaguuccggguguacagcagcgccaacaacugcaccuucgaguacgugucccagccuuuccugauggaccuggaaggcaagcagggcaacuucaagaaccugcgcgaguucguguucaagaacaucgacggcuacuucaaaaucuacagcaagcacaccccuaucaaccucgugcgggaucugccucagggcuucucugcucuggaaccccugguggaucugcccaucggcaucaacaucacccgguuucagacacugcuggcccugcacagaagcuaccugacaccuggcgauagcagcagcggauggacagcuggugccgccgcuuacuaugugggcuaccugcagccuagaaccuuccugcugaaguacaacgagaacggcaccaucaccgacgccguggauugugcucuggauccucugagcgagacaaagugcacccugaaguccuucaccguggaaaagggcaucuaccagaccagcaacuuccgggugcagcccaccgaauccaucgugcgguuccccaauaucaccaaucugugccccuucggcgagguguucaaugccaccagauucgccucuguguacgccuggaaccggaagcggaucagcaauugcguggccgacuacuccgugcuguacaacuccgccagcuucagcaccuucaagugcuacggcguguccccuaccaagcugaacgaccugugcuucacaaacguguacgccgacagcuucgugauccggggagaugaagugcggcagauugccccuggacagacaggcaagaucgccgacuacaacuacaagcugcccgacgacuucaccggcugugugauugccuggaacagcaacaaccuggacuccaaagucggcggcaacuacaauuaccuguaccggcuguuccggaaguccaaucugaagcccuucgagcgggacaucagcaccgaaaucuaucaggccggcagcaccccuugcaacggcguggaaggcuucaacugcuacuucccacugcaguccuacggcuuucagcccacaaauggcgugggcuaucagcccuacagagugguggugcugagcuucgaacugcugcaugcuccugccacagugugcggcccuaagaaaagcaccaaucucgugaagaacaaaugcgugaacuucaacuucaacggccugaccggcaccggcgugcugacagagagcaacaagaaguuccugccauuccagcaguuuggccgggauaucgccgauaccacagacgccguuagagauccccagacacuggaaauccuggacaucaccccaugcagcuucggcggagugucugugaucaccccuggcaccaacaccagcaaucagguggcagugcuguaccagggcgugaacuguaccgaagugcccguggccauucacgccgaucagcugacaccuacauggcggguguacuccaccggcagcaauguguuucagaccagagccggcugucugaucggagccgagcacgugaacaauagcuacgagugcgacauccccaucggcgcuggcaucugugccagcuaccagacacagacaaacagccccagacgggcuagaagcguggccagccagagcgugauugccuacacaaugucucugggcgccgagaacagcguggccuacuccaacaacucuaucgcuauccccaccaacuucaccaucagcgugaccaccgagauccugccuguguccaugaccaagaccagcguggacugcaccauguacaucugcggcgauuccaccgagugcuccaaccugcugcugcaguacggcagcuucugcacccagcugaauagagcccugacagggaucgccguggaacaggacaagaacacccaagagguguucgcccaagugaagcaaaucuacaagaccccuccuaucaaggacuucggcggcuucaauuucagccagauucugcccgauccuagcaagcccagcaagcggagcuucaucgaggaccugcuguucaacaaagugacacuggccgacgccggcuucaucaagcaguauggcgauugucugggcgacauugccgccagggaucugauuugcgcccagaaguuuaacggacugacagugcugccuccucugcugaccgaugagaugaucgcccaguacacaucugcccugcuggccggcacaaucacaagcggcuggacauuuggagcuggcgccgcucugcagauccccuuugcuaugcagauggccuaccgguucaacggcaucggagugacccagaaugugcuguacgagaaccagaagcugaucgccaaccaguucaacagcgccaucggcaagauccaggacagccugagcagcacagcaagcgcccugggaaagcugcaggacguggucaaccagaaugcccaggcacugaacacccuggucaagcagcuguccuccaacuucggcgccaucagcucugugcugaacgauauccugagcagacuggacccuccugaggccgaggugcagaucgacagacugaucacaggcagacugcagagccuccagacauacgugacccagcagcugaucagagccgccgagauuagagccucugccaaucuggccgccaccaagaugucugagugugugcugggccagagcaagagaguggacuuuugcggcaagggcuaccaccugaugagcuucccucagucugccccucacggcgugguguuucugcacgugacauaugugcccgcucaagagaagaauuucaccaccgcuccagccaucugccacgacggcaaagcccacuuuccuagagaaggcguguucguguccaacggcacccauugguucgugacacagcggaacuucuacgagccccagaucaucaccaccgacaacaccuucgugucuggcaacugcgacguugugaucggcauugugaacaauaccguguacgacccucugcagcccgagcuggacagcuucaaagaggaacuggacaaguacuuuaagaaccacacaagccccgacguggaccugggcgauaucagcggaaucaaugccagcgucgugaacauccagaaagagaucgaccggcugaacgagguggccaagaaucugaacgagagccugaucgaccugcaagaacuggggaaguacgagcaguacaucaaguggcccugguacaucuggcugggcuuuaucgccggacugauugccaucgugauggucacaaucaugcuguguugcaugaccagcugcuguagcugccugaagggcuguuguagcuguggcagcugcugcaaguucgacgaggacgauucugagcccgugcugaagggcgugaaacugcacuacaccugaggacuaguuauaagacugacuagcccgaugggccucccaacgggcccuccuccccuccuugcaccgagauuaauaaaaaaaaaaaaaaaaaaaaaaaaaaaaaaaaaaaaaaaaaaaaaaaaaaaaaaaaaaaaaaaaugcaucccccccccccccccccccccccccccccccaaaggcucuuuucagagccaccagaauu

SEQ ID NO: 23378 - RNA, 4039 nt, Artificial Sequence
  SARS-CoV-2/Wuhan/WIV05/2019__EPI_ISL_402128 spike protein mRNA gc mod (1-1273)(K986P_V987P_D614G_M1229I)
aggagaaagcuuaccauguucguguuucuggugcugcugccccugguguccagccagugugugaaccugaccaccagaacacagcugccuccagccuacaccaacagcuucaccagaggcguguacuaccccgacaagguguucagauccagcgugcugcacucuacccaggaccuguuccugccuuucuucagcaacgugaccugguuccacgccauccacguguccggcaccaauggcaccaagagauucgacaaccccgugcugcccuucaacgacgggguguacuuugccagcaccgagaaguccaacaucaucagaggcuggaucuucggcaccacacuggacagcaagacccagagccugcugaucgugaacaacgccaccaacguggucaucaaagugugcgaguuccaguucugcaacgaccccuuccugggcgucuacuaccacaagaacaacaagagcuggauggaaagcgaguuccggguguacagcagcgccaacaacugcaccuucgaguacgugucccagccuuuccugauggaccuggaaggcaagcagggcaacuucaagaaccugcgcgaguucguguucaagaacaucgacggcuacuucaaaaucuacagcaagcacaccccuaucaaccucgugcgggaucugccucagggcuucucugcucuggaaccccugguggaucugcccaucggcaucaacaucacccgguuucagacacugcuggcccugcacagaagcuaccugacaccuggcgauagcagcagcggauggacagcuggugccgccgcuuacuaugugggcuaccugcagccuagaaccuuccugcugaaguacaacgagaacggcaccaucaccgacgccguggauugugcucuggauccucugagcgagacaaagugcacccugaaguccuucaccguggaaaagggcaucuaccagaccagcaacuuccgggugcagcccaccgaauccaucgugcgguuccccaauaucaccaaucugugccccuucggcgagguguucaaugccaccagauucgccucuguguacgccuggaaccggaagcggaucagcaauugcguggccgacuacuccgugcuguacaacuccgccagcuucagcaccuucaagugcuacggcguguccccuaccaagcugaacgaccugugcuucacaaacguguacgccgacagcuucgugauccggggagaugaagugcggcagauugccccuggacagacaggcaagaucgccgacuacaacuacaagcugcccgacgacuucaccggcugugugauugccuggaacagcaacaaccuggacuccaaagucggcggcaacuacaauuaccuguaccggcuguuccggaaguccaaucugaagcccuucgagcgggacaucagcaccgaaaucuaucaggccggcagcaccccuugcaacggcguggaaggcuucaacugcuacuucccacugcaguccuacggcuuucagcccacaaauggcgugggcuaucagcccuacagagugguggugcugagcuucgaacugcugcaugcuccugccacagugugcggcccuaagaaaagcaccaaucucgugaagaacaaaugcgugaacuucaacuucaacggccugaccggcaccggcgugcugacagagagcaacaagaaguuccugccauuccagcaguuuggccgggauaucgccgauaccacagacgccguuagagauccccagacacuggaaauccuggacaucaccccaugcagcuucggcggagugucugugaucaccccuggcaccaacaccagcaaucagguggcagugcuguaccagggcgugaacuguaccgaagugcccguggccauucacgccgaucagcugacaccuacauggcggguguacuccaccggcagcaauguguuucagaccagagccggcugucugaucggagccgagcacgugaacaauagcuacgagugcgacauccccaucggcgcuggcaucugugccagcuaccagacacagacaaacagccccagacgggcuagaagcguggccagccagagcaucauugccuacacaaugucucugggcgccgagaacagcguggccuacuccaacaacucuaucgcuauccccaccaacuucaccaucagcgugaccaccgagauccugccuguguccaugaccaagaccagcguggacugcaccauguacaucugcggcgauuccaccgagugcuccaaccugcugcugcaguacggcagcuucugcacccagcugaauagagcccugacagggaucgccguggaacaggacaagaacacccaagagguguucgcccaagugaagcaaaucuacaagaccccuccuaucaaggacuucggcggcuucaauuucagccagauucugcccgauccuagcaagcccagcaagcggagcuucaucgaggaccugcuguucaacaaagugacacuggccgacgccggcuucaucaagcaguauggcgauugucugggcgacauugccgccagggaucugauuugcgcccagaaguuuaacggacugacagugcugccuccucugcugaccgaugagaugaucgcccaguacacaucugcccugcuggccggcacaaucacaagcggcuggacauuuggagcuggcgccgcucugcagauccccuuugcuaugcagauggccuaccgguucaacggcaucggagugacccagaaugugcuguacgagaaccagaagcugaucgccaaccaguucaacagcgccaucggcaagauccaggacagccugagcagcacagcaagcgcccugggaaagcugcaggacguggucaaccagaaugcccaggcacugaacacccuggucaagcagcuguccuccaacuucggcgccaucagcucugugcugaacgauauccugagcagacuggacccuccugaggccgaggugcagaucgacagacugaucacaggcagacugcagagccuccagacauacgugacccagcagcugaucagagccgccgagauuagagccucugccaaucuggccgccaccaagaugucugagugugugcugggccagagcaagagaguggacuuuugcggcaagggcuaccaccugaugagcuucccucagucugccccucacggcgugguguuucugcacgugacauaugugcccgcucaagagaagaauuucaccaccgcuccagccaucugccacgacggcaaagcccacuuuccuagagaaggcguguucguguccaacggcacccauugguucgugacacagcggaacuucuacgagccccagaucaucaccaccgacaacaccuucgugucuggcaacugcgacguugugaucggcauugugaacaauaccguguacgacccucugcagcccgagcuggacagcuucaaagaggaacuggacaaguacuuuaagaaccacacaagccccgacguggaccugggcgauaucagcggaaucaaugccagcgucgugaacauccagaaagagaucgaccggcugaacgagguggccaagaaucugaacgagagccugaucgaccugcaagaacuggggaaguacgagcaguacaucaaguggcccugguacaucuggcugggcuuuaucgccggacugauugccaucgugaucgucacaaucaugcuguguugcaugaccagcugcuguagcugccugaagggcuguuguagcuguggcagcugcugcaaguucgacgaggacgauucugagcccgugcugaagggcgugaaacugcacuacaccugaggacuaguuauaagacugacuagcccgaugggccucccaacgggcccuccuccccuccuugcaccgagauuaauaaaaaaaaaaaaaaaaaaaaaaaaaaaaaaaaaaaaaaaaaaaaaaaaaaaaaaaaaaaaaaaaugcaucccccccccccccccccccccccccccccccaaaggcucuuuucagagccaccagaauu

SEQ ID NO: 23379 - RNA, 4033 nt, Artificial Sequence
  SARS-CoV-2/Wuhan/WIV05/2019__EPI_ISL_402128 spike protein mRNA gc mod (1-1273)(K986P_V987P_H69del_V70del_A222V_Y453F_S477N_D614G_I692V)
aggagaaagcuuaccauguucguguuucuggugcugcugccccugguguccagccagugugugaaccugaccaccagaacacagcugccuccagccuacaccaacagcuucaccagaggcguguacuaccccgacaagguguucagauccagcgugcugcacucuacccaggaccuguuccugccuuucuucagcaacgugaccugguuccacgccaucuccggcaccaauggcaccaagagauucgacaaccccgugcugcccuucaacgacgggguguacuuugccagcaccgagaaguccaacaucaucagaggcuggaucuucggcaccacacuggacagcaagacccagagccugcugaucgugaacaacgccaccaacguggucaucaaagugugcgaguuccaguucugcaacgaccccuuccugggcgucuacuaccacaagaacaacaagagcuggauggaaagcgaguuccggguguacagcagcgccaacaacugcaccuucgaguacgugucccagccuuuccugauggaccuggaaggcaagcagggcaacuucaagaaccugcgcgaguucguguucaagaacaucgacggcuacuucaaaaucuacagcaagcacaccccuaucaaccucgugcgggaucugccucagggcuucucugugcuggaaccccugguggaucugcccaucggcaucaacaucacccgguuucagacacugcuggcccugcacagaagcuaccugacaccuggcgauagcagcagcggauggacagcuggugccgccgcuuacuaugugggcuaccugcagccuagaaccuuccugcugaaguacaacgagaacggcaccaucaccgacgccguggauugugcucuggauccucugagcgagacaaagugcacccugaaguccuucaccguggaaaagggcaucuaccagaccagcaacuuccgggugcagcccaccgaauccaucgugcgguuccccaauaucaccaaucugugccccuucggcgagguguucaaugccaccagauucgccucuguguacgccuggaaccggaagcggaucagcaauugcguggccgacuacuccgugcuguacaacuccgccagcuucagcaccuucaagugcuacggcguguccccuaccaagcugaacgaccugugcuucacaaacguguacgccgacagcuucgugauccggggagaugaagugcggcagauugccccuggacagacaggcaagaucgccgacuacaacuacaagcugcccgacgacuucaccggcugugugauugccuggaacagcaacaaccuggacuccaaagucggcggcaacuacaauuaccuguuccggcuguuccggaaguccaaucugaagcccuucgagcgggacaucagcaccgaaaucuaucaggccggcaacaccccuugcaacggcguggaaggcuucaacugcuacuucccacugcaguccuacggcuuucagcccacaaauggcgugggcuaucagcccuacagagugguggugcugagcuucgaacugcugcaugcuccugccacagugugcggcccuaagaaaagcaccaaucucgugaagaacaaaugcgugaacuucaacuucaacggccugaccggcaccggcgugcugacagagagcaacaagaaguuccugccauuccagcaguuuggccgggauaucgccgauaccacagacgccguuagagauccccagacacuggaaauccuggacaucaccccaugcagcuucggcggagugucugugaucaccccuggcaccaacaccagcaaucagguggcagugcuguaccagggcgugaacuguaccgaagugcccguggccauucacgccgaucagcugacaccuacauggcggguguacuccaccggcagcaauguguuucagaccagagccggcugucugaucggagccgagcacgugaacaauagcuacgagugcgacauccccaucggcgcuggcaucugugccagcuaccagacacagacaaacagccccagacgggcuagaagcguggccagccagagcgugauugccuacacaaugucucugggcgccgagaacagcguggccuacuccaacaacucuaucgcuauccccaccaacuucaccaucagcgugaccaccgagauccugccuguguccaugaccaagaccagcguggacugcaccauguacaucugcggcgauuccaccgagugcuccaaccugcugcugcaguacggcagcuucugcacccagcugaauagagcccugacagggaucgccguggaacaggacaagaacacccaagagguguucgcccaagugaagcaaaucuacaagaccccuccuaucaaggacuucggcggcuucaauuucagccagauucugcccgauccuagcaagcccagcaagcggagcuucaucgaggaccugcuguucaacaaagugacacuggccgacgccggcuucaucaagcaguauggcgauugucugggcgacauugccgccagggaucugauuugcgcccagaaguuuaacggacugacagugcugccuccucugcugaccgaugagaugaucgcccaguacacaucugcccugcuggccggcacaaucacaagcggcuggacauuuggagcuggcgccgcucugcagauccccuuugcuaugcagauggccuaccgguucaacggcaucggagugacccagaaugugcuguacgagaaccagaagcugaucgccaaccaguucaacagcgccaucggcaagauccaggacagccugagcagcacagcaagcgcccugggaaagcugcaggacguggucaaccagaaugcccaggcacugaacacccuggucaagcagcuguccuccaacuucggcgccaucagcucugugcugaacgauauccugagcagacuggacccuccugaggccgaggugcagaucgacagacugaucacaggcagacugcagagccuccagacauacgugacccagcagcugaucagagccgccgagauuagagccucugccaaucuggccgccaccaagaugucugagugugugcugggccagagcaagagaguggacuuuugcggcaagggcuaccaccugaugagcuucccucagucugccccucacggcgugguguuucugcacgugacauaugugcccgcucaagagaagaauuucaccaccgcuccagccaucugccacgacggcaaagcccacuuuccuagagaaggcguguucguguccaacggcacccauugguucgugacacagcggaacuucuacgagccccagaucaucaccaccgacaacaccuucgugucuggcaacugcgacguugugaucggcauugugaacaauaccguguacgacccucugcagcccgagcuggacagcuucaaagaggaacuggacaaguacuuuaagaaccacacaagccccgacguggaccugggcgauaucagcggaaucaaugccagcgucgugaacauccagaaagagaucgaccggcugaacgagguggccaagaaucugaacgagagccugaucgaccugcaagaacuggggaaguacgagcaguacaucaaguggcccugguacaucuggcugggcuuuaucgccggacugauugccaucgugauggucacaaucaugcuguguugcaugaccagcugcuguagcugccugaagggcuguuguagcuguggcagcugcugcaaguucgacgaggacgauucugagcccgugcugaagggcgugaaacugcacuacaccugaggacuaguuauaagacugacuagcccgaugggccucccaacgggcccuccuccccuccuugcaccgagauuaauaaaaaaaaaaaaaaaaaaaaaaaaaaaaaaaaaaaaaaaaaaaaaaaaaaaaaaaaaaaaaaaaugcaucccccccccccccccccccccccccccccccaaaggcucuuuucagagccaccagaauu

SEQ ID NO: 23380 - RNA, 4033 nt, Artificial Sequence
  SARS-CoV-2/Wuhan/WIV05/2019__EPI_ISL_402128 spike protein mRNA gc mod (1-1273)(K986P_V987P_H69del_V70del_Y453F_D614G_I692V_M1229I)
aggagaaagcuuaccauguucguguuucuggugcugcugccccugguguccagccagugugugaaccugaccaccagaacacagcugccuccagccuacaccaacagcuucaccagaggcguguacuaccccgacaagguguucagauccagcgugcugcacucuacccaggaccuguuccugccuuucuucagcaacgugaccugguuccacgccaucuccggcaccaauggcaccaagagauucgacaaccccgugcugcccuucaacgacgggguguacuuugccagcaccgagaaguccaacaucaucagaggcuggaucuucggcaccacacuggacagcaagacccagagccugcugaucgugaacaacgccaccaacguggucaucaaagugugcgaguuccaguucugcaacgaccccuuccugggcgucuacuaccacaagaacaacaagagcuggauggaaagcgaguuccggguguacagcagcgccaacaacugcaccuucgaguacgugucccagccuuuccugauggaccuggaaggcaagcagggcaacuucaagaaccugcgcgaguucguguucaagaacaucgacggcuacuucaaaaucuacagcaagcacaccccuaucaaccucgugcgggaucugccucagggcuucucugcucuggaaccccugguggaucugcccaucggcaucaacaucacccgguuucagacacugcuggcccugcacagaagcuaccugacaccuggcgauagcagcagcggauggacagcuggugccgccgcuuacuaugugggcuaccugcagccuagaaccuuccugcugaaguacaacgagaacggcaccaucaccgacgccguggauugugcucuggauccucugagcgagacaaagugcacccugaaguccuucaccguggaaaagggcaucuaccagaccagcaacuuccgggugcagcccaccgaauccaucgugcgguuccccaauaucaccaaucugugccccuucggcgagguguucaaugccaccagauucgccucuguguacgccuggaaccggaagcggaucagcaauugcguggccgacuacuccgugcuguacaacuccgccagcuucagcaccuucaagugcuacggcguguccccuaccaagcugaacgaccugugcuucacaaacguguacgccgacagcuucgugauccggggagaugaagugcggcagauugccccuggacagacaggcaagaucgccgacuacaacuacaagcugcccgacgacuucaccggcugugugauugccuggaacagcaacaaccuggacuccaaagucggcggcaacuacaauuaccuguuccggcuguuccggaaguccaaucugaagcccuucgagcgggacaucagcaccgaaaucuaucaggccggcagcaccccuugcaacggcguggaaggcuucaacugcuacuucccacugcaguccuacggcuuucagcccacaaauggcgugggcuaucagcccuacagagugguggugcugagcuucgaacugcugcaugcuccugccacagugugcggcccuaagaaaagcaccaaucucgugaagaacaaaugcgugaacuucaacuucaacggccugaccggcaccggcgugcugacagagagcaacaagaaguuccugccauuccagcaguuuggccgggauaucgccgauaccacagacgccguuagagauccccagacacuggaaauccuggacaucaccccaugcagcuucggcggagugucugugaucaccccuggcaccaacaccagcaaucagguggcagugcuguaccagggcgugaacuguaccgaagugcccguggccauucacgccgaucagcugacaccuacauggcggguguacuccaccggcagcaauguguuucagaccagagccggcugucugaucggagccgagcacgugaacaauagcuacgagugcgacauccccaucggcgcuggcaucugugccagcuaccagacacagacaaacagccccagacgggcuagaagcguggccagccagagcgugauugccuacacaaugucucugggcgccgagaacagcguggccuacuccaacaacucuaucgcuauccccaccaacuucaccaucagcgugaccaccgagauccugccuguguccaugaccaagaccagcguggacugcaccauguacaucugcggcgauuccaccgagugcuccaaccugcugcugcaguacggcagcuucugcacccagcugaauagagcccugacagggaucgccguggaacaggacaagaacacccaagagguguucgcccaagugaagcaaaucuacaagaccccuccuaucaaggacuucggcggcuucaauuucagccagauucugcccgauccuagcaagcccagcaagcggagcuucaucgaggaccugcuguucaacaaagugacacuggccgacgccggcuucaucaagcaguauggcgauugucugggcgacauugccgccagggaucugauuugcgcccagaaguuuaacggacugacagugcugccuccucugcugaccgaugagaugaucgcccaguacacaucugcccugcuggccggcacaaucacaagcggcuggacauuuggagcuggcgccgcucugcagauccccuuugcuaugcagauggccuaccgguucaacggcaucggagugacccagaaugugcuguacgagaaccagaagcugaucgccaaccaguucaacagcgccaucggcaagauccaggacagccugagcagcacagcaagcgcccugggaaagcugcaggacguggucaaccagaaugcccaggcacugaacacccuggucaagcagcuguccuccaacuucggcgccaucagcucugugcugaacgauauccugagcagacuggacccuccugaggccgaggugcagaucgacagacugaucacaggcagacugcagagccuccagacauacgugacccagcagcugaucagagccgccgagauuagagccucugccaaucuggccgccaccaagaugucugagugugugcugggccagagcaagagaguggacuuuugcggcaagggcuaccaccugaugagcuucccucagucugccccucacggcgugguguuucugcacgugacauaugugcccgcucaagagaagaauuucaccaccgcuccagccaucugccacgacggcaaagcccacuuuccuagagaaggcguguucguguccaacggcacccauugguucgugacacagcggaacuucuacgagccccagaucaucaccaccgacaacaccuucgugucuggcaacugcgacguugugaucggcauugugaacaauaccguguacgacccucugcagcccgagcuggacagcuucaaagaggaacuggacaaguacuuuaagaaccacacaagccccgacguggaccugggcgauaucagcggaaucaaugccagcgucgugaacauccagaaagagaucgaccggcugaacgagguggccaagaaucugaacgagagccugaucgaccugcaagaacuggggaaguacgagcaguacaucaaguggcccugguacaucuggcugggcuuuaucgccggacugauugccaucgugaucgucacaaucaugcuguguugcaugaccagcugcuguagcugccugaagggcuguuguagcuguggcagcugcugcaaguucgacgaggacgauucugagcccgugcugaagggcgugaaacugcacuacaccugaggacuaguuauaagacugacuagcccgaugggccucccaacgggcccuccuccccuccuugcaccgagauuaauaaaaaaaaaaaaaaaaaaaaaaaaaaaaaaaaaaaaaaaaaaaaaaaaaaaaaaaaaaaaaaaaugcaucccccccccccccccccccccccccccccccaaaggcucuuuucagagccaccagaauu

SEQ ID NO: 23381 - RNA, 4030 nt, Artificial Sequence
  SARS-CoV-2/Wuhan/WIV05/2019__EPI_ISL_402128 spike protein mRNA gc mod (1-1273)(K986P_V987P_K986P_V987P_H69del_V70del_Y144del_N501Y_A570 D_D614G_P681H_T716I_S982A_D1118H)
aggagaaagcuuaccauguucguguuucuggugcugcugccccugguguccagccagugugugaaccugaccaccagaacacagcugccuccagccuacaccaacagcuucaccagaggcguguacuaccccgacaagguguucagauccagcgugcugcacucuacccaggaccuguuccugccuuucuucagcaacgugaccugguuccacgccaucuccggcaccaauggcaccaagagauucgacaaccccgugcugcccuucaacgacgggguguacuuugccagcaccgagaaguccaacaucaucagaggcuggaucuucggcaccacacuggacagcaagacccagagccugcugaucgugaacaacgccaccaacguggucaucaaagugugcgaguuccaguucugcaacgaccccuuccugggcgucuaccacaagaacaacaagagcuggauggaaagcgaguuccggguguacagcagcgccaacaacugcaccuucgaguacgugucccagccuuuccugauggaccuggaaggcaagcagggcaacuucaagaaccugcgcgaguucguguucaagaacaucgacggcuacuucaaaaucuacagcaagcacaccccuaucaaccucgugcgggaucugccucagggcuucucugcucuggaaccccugguggaucugcccaucggcaucaacaucacccgguuucagacacugcuggcccugcacagaagcuaccugacaccuggcgauagcagcagcggauggacagcuggugccgccgcuuacuaugugggcuaccugcagccuagaaccuuccugcugaaguacaacgagaacggcaccaucaccgacgccguggauugugcucuggauccucugagcgagacaaagugcacccugaaguccuucaccguggaaaagggcaucuaccagaccagcaacuuccgggugcagcccaccgaauccaucgugcgguuccccaauaucaccaaucugugccccuucggcgagguguucaaugccaccagauucgccucuguguacgccuggaaccggaagcggaucagcaauugcguggccgacuacuccgugcuguacaacuccgccagcuucagcaccuucaagugcuacggcguguccccuaccaagcugaacgaccugugcuucacaaacguguacgccgacagcuucgugauccggggagaugaagugcggcagauugccccuggacagacaggcaagaucgccgacuacaacuacaagcugcccgacgacuucaccggcugugugauugccuggaacagcaacaaccuggacuccaaagucggcggcaacuacaauuaccuguaccggcuguuccggaaguccaaucugaagcccuucgagcgggacaucagcaccgaaaucuaucaggccggcagcaccccuugcaacggcguggaaggcuucaacugcuacuucccacugcaguccuacggcuuucagcccacauacggcgugggcuaucagcccuacagagugguggugcugagcuucgaacugcugcaugcuccugccacagugugcggcccuaagaaaagcaccaaucucgugaagaacaaaugcgugaacuucaacuucaacggccugaccggcaccggcgugcugacagagagcaacaagaaguuccugccauuccagcaguuuggccgggauaucgacgauaccacagacgccguuagagauccccagacacuggaaauccuggacaucaccccaugcagcuucggcggagugucugugaucaccccuggcaccaacaccagcaaucagguggcagugcuguaccagggcgugaacuguaccgaagugcccguggccauucacgccgaucagcugacaccuacauggcggguguacuccaccggcagcaauguguuucagaccagagccggcugucugaucggagccgagcacgugaacaauagcuacgagugcgacauccccaucggcgcuggcaucugugccagcuaccagacacagacaaacagccacagacgggcuagaagcguggccagccagagcaucauugccuacacaaugucucugggcgccgagaacagcguggccuacuccaacaacucuaucgcuauccccaucaacuucaccaucagcgugaccaccgagauccugccuguguccaugaccaagaccagcguggacugcaccauguacaucugcggcgauuccaccgagugcuccaaccugcugcugcaguacggcagcuucugcacccagcugaauagagcccugacagggaucgccguggaacaggacaagaacacccaagagguguucgcccaagugaagcaaaucuacaagaccccuccuaucaaggacuucggcggcuucaauuucagccagauucugcccgauccuagcaagcccagcaagcggagcuucaucgaggaccugcuguucaacaaagugacacuggccgacgccggcuucaucaagcaguauggcgauugucugggcgacauugccgccagggaucugauuugcgcccagaaguuuaacggacugacagugcugccuccucugcugaccgaugagaugaucgcccaguacacaucugcccugcuggccggcacaaucacaagcggcuggacauuuggagcuggcgccgcucugcagauccccuuugcuaugcagauggccuaccgguucaacggcaucggagugacccagaaugugcuguacgagaaccagaagcugaucgccaaccaguucaacagcgccaucggcaagauccaggacagccugagcagcacagcaagcgcccugggaaagcugcaggacguggucaaccagaaugcccaggcacugaacacccuggucaagcagcuguccuccaacuucggcgccaucagcucugugcugaacgauauccuggccagacuggacccuccugaggccgaggugcagaucgacagacugaucacaggcagacugcagagccuccagacauacgugacccagcagcugaucagagccgccgagauuagagccucugccaaucuggccgccaccaagaugucugagugugugcugggccagagcaagagaguggacuuuugcggcaagggcuaccaccugaugagcuucccucagucugccccucacggcgugguguuucugcacgugacauaugugcccgcucaagagaagaauuucaccaccgcuccagccaucugccacgacggcaaagcccacuuuccuagagaaggcguguucguguccaacggcacccauugguucgugacacagcggaacuucuacgagccccagaucaucaccacccacaacaccuucgugucuggcaacugcgacguugugaucggcauugugaacaauaccguguacgacccucugcagcccgagcuggacagcuucaaagaggaacuggacaaguacuuuaagaaccacacaagccccgacguggaccugggcgauaucagcggaaucaaugccagcgucgugaacauccagaaagagaucgaccggcugaacgagguggccaagaaucugaacgagagccugaucgaccugcaagaacuggggaaguacgagcaguacaucaaguggcccugguacaucuggcugggcuuuaucgccggacugauugccaucgugauggucacaaucaugcuguguugcaugaccagcugcuguagcugccugaagggcuguuguagcuguggcagcugcugcaaguucgacgaggacgauucugagcccgugcugaagggcgugaaacugcacuacaccugaggacuaguuauaagacugacuagcccgaugggccucccaacgggcccuccuccccuccuugcaccgagauuaauaaaaaaaaaaaaaaaaaaaaaaaaaaaaaaaaaaaaaaaaaaaaaaaaaaaaaaaaaaaaaaaaugcaucccccccccccccccccccccccccccccccaaaggcucuuuucagagccaccagaauu

SEQ ID NO: 23382 - RNA, 4039 nt, Artificial Sequence
  SARS-CoV-2/Wuhan/WIV05/2019__EPI_ISL_402128 spike protein mRNA gc mod (1-1273)(K986P_V987P_K986P_V987P_K417N_E484K_N501Y_D614G)
aggagaaagcuuaccauguucguguuucuggugcugcugccccugguguccagccagugugugaaccugaccaccagaacacagcugccuccagccuacaccaacagcuucaccagaggcguguacuaccccgacaagguguucagauccagcgugcugcacucuacccaggaccuguuccugccuuucuucagcaacgugaccugguuccacgccauccacguguccggcaccaauggcaccaagagauucgacaaccccgugcugcccuucaacgacgggguguacuuugccagcaccgagaaguccaacaucaucagaggcuggaucuucggcaccacacuggacagcaagacccagagccugcugaucgugaacaacgccaccaacguggucaucaaagugugcgaguuccaguucugcaacgaccccuuccugggcgucuacuaccacaagaacaacaagagcuggauggaaagcgaguuccggguguacagcagcgccaacaacugcaccuucgaguacgugucccagccuuuccugauggaccuggaaggcaagcagggcaacuucaagaaccugcgcgaguucguguucaagaacaucgacggcuacuucaaaaucuacagcaagcacaccccuaucaaccucgugcgggaucugccucagggcuucucugcucuggaaccccugguggaucugcccaucggcaucaacaucacccgguuucagacacugcuggcccugcacagaagcuaccugacaccuggcgauagcagcagcggauggacagcuggugccgccgcuuacuaugugggcuaccugcagccuagaaccuuccugcugaaguacaacgagaacggcaccaucaccgacgccguggauugugcucuggauccucugagcgagacaaagugcacccugaaguccuucaccguggaaaagggcaucuaccagaccagcaacuuccgggugcagcccaccgaauccaucgugcgguuccccaauaucaccaaucugugccccuucggcgagguguucaaugccaccagauucgccucuguguacgccuggaaccggaagcggaucagcaauugcguggccgacuacuccgugcuguacaacuccgccagcuucagcaccuucaagugcuacggcguguccccuaccaagcugaacgaccugugcuucacaaacguguacgccgacagcuucgugauccggggagaugaagugcggcagauugccccuggacagacaggcaacaucgccgacuacaacuacaagcugcccgacgacuucaccggcugugugauugccuggaacagcaacaaccuggacuccaaagucggcggcaacuacaauuaccuguaccggcuguuccggaaguccaaucugaagcccuucgagcgggacaucagcaccgaaaucuaucaggccggcagcaccccuugcaacggcgugaagggcuucaacugcuacuucccacugcaguccuacggcuuucagcccacauacggcgugggcuaucagcccuacagagugguggugcugagcuucgaacugcugcaugcuccugccacagugugcggcccuaagaaaagcaccaaucucgugaagaacaaaugcgugaacuucaacuucaacggccugaccggcaccggcgugcugacagagagcaacaagaaguuccugccauuccagcaguuuggccgggauaucgccgauaccacagacgccguuagagauccccagacacuggaaauccuggacaucaccccaugcagcuucggcggagugucugugaucaccccuggcaccaacaccagcaaucagguggcagugcuguaccagggcgugaacuguaccgaagugcccguggccauucacgccgaucagcugacaccuacauggcggguguacuccaccggcagcaauguguuucagaccagagccggcugucugaucggagccgagcacgugaacaauagcuacgagugcgacauccccaucggcgcuggcaucugugccagcuaccagacacagacaaacagccccagacgggcuagaagcguggccagccagagcaucauugccuacacaaugucucugggcgccgagaacagcguggccuacuccaacaacucuaucgcuauccccaccaacuucaccaucagcgugaccaccgagauccugccuguguccaugaccaagaccagcguggacugcaccauguacaucugcggcgauuccaccgagugcuccaaccugcugcugcaguacggcagcuucugcacccagcugaauagagcccugacagggaucgccguggaacaggacaagaacacccaagagguguucgcccaagugaagcaaaucuacaagaccccuccuaucaaggacuucggcggcuucaauuucagccagauucugcccgauccuagcaagcccagcaagcggagcuucaucgaggaccugcuguucaacaaagugacacuggccgacgccggcuucaucaagcaguauggcgauugucugggcgacauugccgccagggaucugauuugcgcccagaaguuuaacggacugacagugcugccuccucugcugaccgaugagaugaucgcccaguacacaucugcccugcuggccggcacaaucacaagcggcuggacauuuggagcuggcgccgcucugcagauccccuuugcuaugcagauggccuaccgguucaacggcaucggagugacccagaaugugcuguacgagaaccagaagcugaucgccaaccaguucaacagcgccaucggcaagauccaggacagccugagcagcacagcaagcgcccugggaaagcugcaggacguggucaaccagaaugcccaggcacugaacacccuggucaagcagcuguccuccaacuucggcgccaucagcucugugcugaacgauauccugagcagacuggacccuccugaggccgaggugcagaucgacagacugaucacaggcagacugcagagccuccagacauacgugacccagcagcugaucagagccgccgagauuagagccucugccaaucuggccgccaccaagaugucugagugugugcugggccagagcaagagaguggacuuuugcggcaagggcuaccaccugaugagcuucccucagucugccccucacggcgugguguuucugcacgugacauaugugcccgcucaagagaagaauuucaccaccgcuccagccaucugccacgacggcaaagcccacuuuccuagagaaggcguguucguguccaacggcacccauugguucgugacacagcggaacuucuacgagccccagaucaucaccaccgacaacaccuucgugucuggcaacugcgacguugugaucggcauugugaacaauaccguguacgacccucugcagcccgagcuggacagcuucaaagaggaacuggacaaguacuuuaagaaccacacaagccccgacguggaccugggcgauaucagcggaaucaaugccagcgucgugaacauccagaaagagaucgaccggcugaacgagguggccaagaaucugaacgagagccugaucgaccugcaagaacuggggaaguacgagcaguacaucaaguggcccugguacaucuggcugggcuuuaucgccggacugauugccaucgugauggucacaaucaugcuguguugcaugaccagcugcuguagcugccugaagggcuguuguagcuguggcagcugcugcaaguucgacgaggacgauucugagcccgugcugaagggcgugaaacugcacuacaccugaggacuaguuauaagacugacuagcccgaugggccucccaacgggcccuccuccccuccuugcaccgagauuaauaaaaaaaaaaaaaaaaaaaaaaaaaaaaaaaaaaaaaaaaaaaaaaaaaaaaaaaaaaaaaaaaugcaucccccccccccccccccccccccccccccccaaaggcucuuuucagagccaccagaauu

SEQ ID NO: 23383 - RNA, 4030 nt, Artificial Sequence
  SARS-CoV-2/Wuhan/WIV05/2019__EPI_ISL_402128 spike protein mRNA gc mod (1-1273)(K986P_V987P_K986P_V987P_L18F_D80A_D215G_L242del_A243del_ L244del_R246I_K417N_E484K_N501Y_D614G_A701V)
aggagaaagcuuaccauguucguguuucuggugcugcugccccugguguccagccagugugugaacuucaccaccagaacacagcugccuccagccuacaccaacagcuucaccagaggcguguacuaccccgacaagguguucagauccagcgugcugcacucuacccaggaccuguuccugccuuucuucagcaacgugaccugguuccacgccauccacguguccggcaccaauggcaccaagagauucgccaaccccgugcugcccuucaacgacgggguguacuuugccagcaccgagaaguccaacaucaucagaggcuggaucuucggcaccacacuggacagcaagacccagagccugcugaucgugaacaacgccaccaacguggucaucaaagugugcgaguuccaguucugcaacgaccccuuccugggcgucuacuaccacaagaacaacaagagcuggauggaaagcgaguuccggguguacagcagcgccaacaacugcaccuucgaguacgugucccagccuuuccugauggaccuggaaggcaagcagggcaacuucaagaaccugcgcgaguucguguucaagaacaucgacggcuacuucaaaaucuacagcaagcacaccccuaucaaccucgugcggggccugccucagggcuucucugcucuggaaccccugguggaucugcccaucggcaucaacaucacccgguuucagacacugcacaucagcuaccugacaccuggcgauagcagcagcggauggacagcuggugccgccgcuuacuaugugggcuaccugcagccuagaaccuuccugcugaaguacaacgagaacggcaccaucaccgacgccguggauugugcucuggauccucugagcgagacaaagugcacccugaaguccuucaccguggaaaagggcaucuaccagaccagcaacuuccgggugcagcccaccgaauccaucgugcgguuccccaauaucaccaaucugugccccuucggcgagguguucaaugccaccagauucgccucuguguacgccuggaaccggaagcggaucagcaauugcguggccgacuacuccgugcuguacaacuccgccagcuucagcaccuucaagugcuacggcguguccccuaccaagcugaacgaccugugcuucacaaacguguacgccgacagcuucgugauccggggagaugaagugcggcagauugccccuggacagacaggcaacaucgccgacuacaacuacaagcugcccgacgacuucaccggcugugugauugccuggaacagcaacaaccuggacuccaaagucggcggcaacuacaauuaccuguaccggcuguuccggaaguccaaucugaagcccuucgagcgggacaucagcaccgaaaucuaucaggccggcagcaccccuugcaacggcgugaagggcuucaacugcuacuucccacugcaguccuacggcuuucagcccacauacggcgugggcuaucagcccuacagagugguggugcugagcuucgaacugcugcaugcuccugccacagugugcggcccuaagaaaagcaccaaucucgugaagaacaaaugcgugaacuucaacuucaacggccugaccggcaccggcgugcugacagagagcaacaagaaguuccugccauuccagcaguuuggccgggauaucgccgauaccacagacgccguuagagauccccagacacuggaaauccuggacaucaccccaugcagcuucggcggagugucugugaucaccccuggcaccaacaccagcaaucagguggcagugcuguaccagggcgugaacuguaccgaagugcccguggccauucacgccgaucagcugacaccuacauggcggguguacuccaccggcagcaauguguuucagaccagagccggcugucugaucggagccgagcacgugaacaauagcuacgagugcgacauccccaucggcgcuggcaucugugccagcuaccagacacagacaaacagccccagacgggcuagaagcguggccagccagagcaucauugccuacacaaugucucugggcguggagaacagcguggccuacuccaacaacucuaucgcuauccccaccaacuucaccaucagcgugaccaccgagauccugccuguguccaugaccaagaccagcguggacugcaccauguacaucugcggcgauuccaccgagugcuccaaccugcugcugcaguacggcagcuucugcacccagcugaauagagcccugacagggaucgccguggaacaggacaagaacacccaagagguguucgcccaagugaagcaaaucuacaagaccccuccuaucaaggacuucggcggcuucaauuucagccagauucugcccgauccuagcaagcccagcaagcggagcuucaucgaggaccugcuguucaacaaagugacacuggccgacgccggcuucaucaagcaguauggcgauugucugggcgacauugccgccagggaucugauuugcgcccagaaguuuaacggacugacagugcugccuccucugcugaccgaugagaugaucgcccaguacacaucugcccugcuggccggcacaaucacaagcggcuggacauuuggagcuggcgccgcucugcagauccccuuugcuaugcagauggccuaccgguucaacggcaucggagugacccagaaugugcuguacgagaaccagaagcugaucgccaaccaguucaacagcgccaucggcaagauccaggacagccugagcagcacagcaagcgcccugggaaagcugcaggacguggucaaccagaaugcccaggcacugaacacccuggucaagcagcuguccuccaacuucggcgccaucagcucugugcugaacgauauccugagcagacuggacccuccugaggccgaggugcagaucgacagacugaucacaggcagacugcagagccuccagacauacgugacccagcagcugaucagagccgccgagauuagagccucugccaaucuggccgccaccaagaugucugagugugugcugggccagagcaagagaguggacuuuugcggcaagggcuaccaccugaugagcuucccucagucugccccucacggcgugguguuucugcacgugacauaugugcccgcucaagagaagaauuucaccaccgcuccagccaucugccacgacggcaaagcccacuuuccuagagaaggcguguucguguccaacggcacccauugguucgugacacagcggaacuucuacgagccccagaucaucaccaccgacaacaccuucgugucuggcaacugcgacguugugaucggcauugugaacaauaccguguacgacccucugcagcccgagcuggacagcuucaaagaggaacuggacaaguacuuuaagaaccacacaagccccgacguggaccugggcgauaucagcggaaucaaugccagcgucgugaacauccagaaagagaucgaccggcugaacgagguggccaagaaucugaacgagagccugaucgaccugcaagaacuggggaaguacgagcaguacaucaaguggcccugguacaucuggcugggcuuuaucgccggacugauugccaucgugauggucacaaucaugcuguguugcaugaccagcugcuguagcugccugaagggcuguuguagcuguggcagcugcugcaaguucgacgaggacgauucugagcccgugcugaagggcgugaaacugcacuacaccugaggacuaguuauaagacugacuagcccgaugggccucccaacgggcccuccuccccuccuugcaccgagauuaauaaaaaaaaaaaaaaaaaaaaaaaaaaaaaaaaaaaaaaaaaaaaaaaaaaaaaaaaaaaaaaaaugcaucccccccccccccccccccccccccccccccaaaggcucuuuucagagccaccagaauu

SEQ ID NO: 23384 - RNA, 4039 nt, Artificial Sequence
  SARS-CoV-2/Wuhan/WIV05/2019__EPI_ISL_402128 spike protein mRNA gc mod (1-1273)(K986P_V987P_K986P_V987P_E484K_D614G)
aggagaaagcuuaccauguucguguuucuggugcugcugccccugguguccagccagugugugaaccugaccaccagaacacagcugccuccagccuacaccaacagcuucaccagaggcguguacuaccccgacaagguguucagauccagcgugcugcacucuacccaggaccuguuccugccuuucuucagcaacgugaccugguuccacgccauccacguguccggcaccaauggcaccaagagauucgacaaccccgugcugcccuucaacgacgggguguacuuugccagcaccgagaaguccaacaucaucagaggcuggaucuucggcaccacacuggacagcaagacccagagccugcugaucgugaacaacgccaccaacguggucaucaaagugugcgaguuccaguucugcaacgaccccuuccugggcgucuacuaccacaagaacaacaagagcuggauggaaagcgaguuccggguguacagcagcgccaacaacugcaccuucgaguacgugucccagccuuuccugauggaccuggaaggcaagcagggcaacuucaagaaccugcgcgaguucguguucaagaacaucgacggcuacuucaaaaucuacagcaagcacaccccuaucaaccucgugcgggaucugccucagggcuucucugcucuggaaccccugguggaucugcccaucggcaucaacaucacccgguuucagacacugcuggcccugcacagaagcuaccugacaccuggcgauagcagcagcggauggacagcuggugccgccgcuuacuaugugggcuaccugcagccuagaaccuuccugcugaaguacaacgagaacggcaccaucaccgacgccguggauugugcucuggauccucugagcgagacaaagugcacccugaaguccuucaccguggaaaagggcaucuaccagaccagcaacuuccgggugcagcccaccgaauccaucgugcgguuccccaauaucaccaaucugugccccuucggcgagguguucaaugccaccagauucgccucuguguacgccuggaaccggaagcggaucagcaauugcguggccgacuacuccgugcuguacaacuccgccagcuucagcaccuucaagugcuacggcguguccccuaccaagcugaacgaccugugcuucacaaacguguacgccgacagcuucgugauccggggagaugaagugcggcagauugccccuggacagacaggcaagaucgccgacuacaacuacaagcugcccgacgacuucaccggcugugugauugccuggaacagcaacaaccuggacuccaaagucggcggcaacuacaauuaccuguaccggcuguuccggaaguccaaucugaagcccuucgagcgggacaucagcaccgaaaucuaucaggccggcagcaccccuugcaacggcgugaagggcuucaacugcuacuucccacugcaguccuacggcuuucagcccacaaauggcgugggcuaucagcccuacagagugguggugcugagcuucgaacugcugcaugcuccugccacagugugcggcccuaagaaaagcaccaaucucgugaagaacaaaugcgugaacuucaacuucaacggccugaccggcaccggcgugcugacagagagcaacaagaaguuccugccauuccagcaguuuggccgggauaucgccgauaccacagacgccguuagagauccccagacacuggaaauccuggacaucaccccaugcagcuucggcggagugucugugaucaccccuggcaccaacaccagcaaucagguggcagugcuguaccagggcgugaacuguaccgaagugcccguggccauucacgccgaucagcugacaccuacauggcggguguacuccaccggcagcaauguguuucagaccagagccggcugucugaucggagccgagcacgugaacaauagcuacgagugcgacauccccaucggcgcuggcaucugugccagcuaccagacacagacaaacagccccagacgggcuagaagcguggccagccagagcaucauugccuacacaaugucucugggcgccgagaacagcguggccuacuccaacaacucuaucgcuauccccaccaacuucaccaucagcgugaccaccgagauccugccuguguccaugaccaagaccagcguggacugcaccauguacaucugcggcgauuccaccgagugcuccaaccugcugcugcaguacggcagcuucugcacccagcugaauagagcccugacagggaucgccguggaacaggacaagaacacccaagagguguucgcccaagugaagcaaaucuacaagaccccuccuaucaaggacuucggcggcuucaauuucagccagauucugcccgauccuagcaagcccagcaagcggagcuucaucgaggaccugcuguucaacaaagugacacuggccgacgccggcuucaucaagcaguauggcgauugucugggcgacauugccgccagggaucugauuugcgcccagaaguuuaacggacugacagugcugccuccucugcugaccgaugagaugaucgcccaguacacaucugcccugcuggccggcacaaucacaagcggcuggacauuuggagcuggcgccgcucugcagauccccuuugcuaugcagauggccuaccgguucaacggcaucggagugacccagaaugugcuguacgagaaccagaagcugaucgccaaccaguucaacagcgccaucggcaagauccaggacagccugagcagcacagcaagcgcccugggaaagcugcaggacguggucaaccagaaugcccaggcacugaacacccuggucaagcagcuguccuccaacuucggcgccaucagcucugugcugaacgauauccugagcagacuggacccuccugaggccgaggugcagaucgacagacugaucacaggcagacugcagagccuccagacauacgugacccagcagcugaucagagccgccgagauuagagccucugccaaucuggccgccaccaagaugucugagugugugcugggccagagcaagagaguggacuuuugcggcaagggcuaccaccugaugagcuucccucagucugccccucacggcgugguguuucugcacgugacauaugugcccgcucaagagaagaauuucaccaccgcuccagccaucugccacgacggcaaagcccacuuuccuagagaaggcguguucguguccaacggcacccauugguucgugacacagcggaacuucuacgagccccagaucaucaccaccgacaacaccuucgugucuggcaacugcgacguugugaucggcauugugaacaauaccguguacgacccucugcagcccgagcuggacagcuucaaagaggaacuggacaaguacuuuaagaaccacacaagccccgacguggaccugggcgauaucagcggaaucaaugccagcgucgugaacauccagaaagagaucgaccggcugaacgagguggccaagaaucugaacgagagccugaucgaccugcaagaacuggggaaguacgagcaguacaucaaguggcccugguacaucuggcugggcuuuaucgccggacugauugccaucgugauggucacaaucaugcuguguugcaugaccagcugcuguagcugccugaagggcuguuguagcuguggcagcugcugcaaguucgacgaggacgauucugagcccgugcugaagggcgugaaacugcacuacaccugaggacuaguuauaagacugacuagcccgaugggccucccaacgggcccuccuccccuccuugcaccgagauuaauaaaaaaaaaaaaaaaaaaaaaaaaaaaaaaaaaaaaaaaaaaaaaaaaaaaaaaaaaaaaaaaaugcaucccccccccccccccccccccccccccccccaaaggcucuuuucagagccaccagaauu

SEQ ID NO: 23385 - RNA, 4039 nt, Artificial Sequence
  SARS-CoV-2/Wuhan/WIV05/2019__EPI_ISL_402128 spike protein mRNA gc mod (1-1273)(K986P_V987P_K986P_V987P_L18F_T20N_P26S_D138Y_R190S_K417T _E484K_N501Y_D614G_H655Y_T1027I)
aggagaaagcuuaccauguucguguuucuggugcugcugccccugguguccagccagugugugaacuucaccaacagaacacagcugccuagcgccuacaccaacagcuucaccagaggcguguacuaccccgacaagguguucagauccagcgugcugcacucuacccaggaccuguuccugccuuucuucagcaacgugaccugguuccacgccauccacguguccggcaccaauggcaccaagagauucgacaaccccgugcugcccuucaacgacgggguguacuuugccagcaccgagaaguccaacaucaucagaggcuggaucuucggcaccacacuggacagcaagacccagagccugcugaucgugaacaacgccaccaacguggucaucaaagugugcgaguuccaguucugcaacuaccccuuccugggcgucuacuaccacaagaacaacaagagcuggauggaaagcgaguuccggguguacagcagcgccaacaacugcaccuucgaguacgugucccagccuuuccugauggaccuggaaggcaagcagggcaacuucaagaaccugagcgaguucguguucaagaacaucgacggcuacuucaaaaucuacagcaagcacaccccuaucaaccucgugcgggaucugccucagggcuucucugcucuggaaccccugguggaucugcccaucggcaucaacaucacccgguuucagacacugcuggcccugcacagaagcuaccugacaccuggcgauagcagcagcggauggacagcuggugccgccgcuuacuaugugggcuaccugcagccuagaaccuuccugcugaaguacaacgagaacggcaccaucaccgacgccguggauugugcucuggauccucugagcgagacaaagugcacccugaaguccuucaccguggaaaagggcaucuaccagaccagcaacuuccgggugcagcccaccgaauccaucgugcgguuccccaauaucaccaaucugugccccuucggcgagguguucaaugccaccagauucgccucuguguacgccuggaaccggaagcggaucagcaauugcguggccgacuacuccgugcuguacaacuccgccagcuucagcaccuucaagugcuacggcguguccccuaccaagcugaacgaccugugcuucacaaacguguacgccgacagcuucgugauccggggagaugaagugcggcagauugccccuggacagacaggcaccaucgccgacuacaacuacaagcugcccgacgacuucaccggcugugugauugccuggaacagcaacaaccuggacuccaaagucggcggcaacuacaauuaccuguaccggcuguuccggaaguccaaucugaagcccuucgagcgggacaucagcaccgaaaucuaucaggccggcagcaccccuugcaacggcgugaagggcuucaacugcuacuucccacugcaguccuacggcuuucagcccacauacggcgugggcuaucagcccuacagagugguggugcugagcuucgaacugcugcaugcuccugccacagugugcggcccuaagaaaagcaccaaucucgugaagaacaaaugcgugaacuucaacuucaacggccugaccggcaccggcgugcugacagagagcaacaagaaguuccugccauuccagcaguuuggccgggauaucgccgauaccacagacgccguuagagauccccagacacuggaaauccuggacaucaccccaugcagcuucggcggagugucugugaucaccccuggcaccaacaccagcaaucagguggcagugcuguaccagggcgugaacuguaccgaagugcccguggccauucacgccgaucagcugacaccuacauggcggguguacuccaccggcagcaauguguuucagaccagagccggcugucugaucggagccgaguacgugaacaauagcuacgagugcgacauccccaucggcgcuggcaucugugccagcuaccagacacagacaaacagccccagacgggcuagaagcguggccagccagagcaucauugccuacacaaugucucugggcgccgagaacagcguggccuacuccaacaacucuaucgcuauccccaccaacuucaccaucagcgugaccaccgagauccugccuguguccaugaccaagaccagcguggacugcaccauguacaucugcggcgauuccaccgagugcuccaaccugcugcugcaguacggcagcuucugcacccagcugaauagagcccugacagggaucgccguggaacaggacaagaacacccaagagguguucgcccaagugaagcaaaucuacaagaccccuccuaucaaggacuucggcggcuucaauuucagccagauucugcccgauccuagcaagcccagcaagcggagcuucaucgaggaccugcuguucaacaaagugacacuggccgacgccggcuucaucaagcaguauggcgauugucugggcgacauugccgccagggaucugauuugcgcccagaaguuuaacggacugacagugcugccuccucugcugaccgaugagaugaucgcccaguacacaucugcccugcuggccggcacaaucacaagcggcuggacauuuggagcuggcgccgcucugcagauccccuuugcuaugcagauggccuaccgguucaacggcaucggagugacccagaaugugcuguacgagaaccagaagcugaucgccaaccaguucaacagcgccaucggcaagauccaggacagccugagcagcacagcaagcgcccugggaaagcugcaggacguggucaaccagaaugcccaggcacugaacacccuggucaagcagcuguccuccaacuucggcgccaucagcucugugcugaacgauauccugagcagacuggacccuccugaggccgaggugcagaucgacagacugaucacaggcagacugcagagccuccagacauacgugacccagcagcugaucagagccgccgagauuagagccucugccaaucuggccgccaucaagaugucugagugugugcugggccagagcaagagaguggacuuuugcggcaagggcuaccaccugaugagcuucccucagucugccccucacggcgugguguuucugcacgugacauaugugcccgcucaagagaagaauuucaccaccgcuccagccaucugccacgacggcaaagcccacuuuccuagagaaggcguguucguguccaacggcacccauugguucgugacacagcggaacuucuacgagccccagaucaucaccaccgacaacaccuucgugucuggcaacugcgacguugugaucggcauugugaacaauaccguguacgacccucugcagcccgagcuggacagcuucaaagaggaacuggacaaguacuuuaagaaccacacaagccccgacguggaccugggcgauaucagcggaaucaaugccagcgucgugaacauccagaaagagaucgaccggcugaacgagguggccaagaaucugaacgagagccugaucgaccugcaagaacuggggaaguacgagcaguacaucaaguggcccugguacaucuggcugggcuuuaucgccggacugauugccaucgugauggucacaaucaugcuguguugcaugaccagcugcuguagcugccugaagggcuguuguagcuguggcagcugcugcaaguucgacgaggacgauucugagcccgugcugaagggcgugaaacugcacuacaccugaggacuaguuauaagacugacuagcccgaugggccucccaacgggcccuccuccccuccuugcaccgagauuaauaaaaaaaaaaaaaaaaaaaaaaaaaaaaaaaaaaaaaaaaaaaaaaaaaaaaaaaaaaaaaaaaugcaucccccccccccccccccccccccccccccccaaaggcucuuuucagagccaccagaauu

SEQ ID NO: 23386 - RNA, 4039 nt, Artificial Sequence
  SARS-CoV-2/Wuhan/WIV05/2019__EPI_ISL_402128 spike protein mRNA gc mod (1-1273)(K986P_V987P_K986P_V987P_S13I_W152C_L452R_D614G)
aggagaaagcuuaccauguucguguuucuggugcugcugccccugguguccauccagugugugaaccugaccaccagaacacagcugccuccagccuacaccaacagcuucaccagaggcguguacuaccccgacaagguguucagauccagcgugcugcacucuacccaggaccuguuccugccuuucuucagcaacgugaccugguuccacgccauccacguguccggcaccaauggcaccaagagauucgacaaccccgugcugcccuucaacgacgggguguacuuugccagcaccgagaaguccaacaucaucagaggcuggaucuucggcaccacacuggacagcaagacccagagccugcugaucgugaacaacgccaccaacguggucaucaaagugugcgaguuccaguucugcaacgaccccuuccugggcgucuacuaccacaagaacaacaagagcugcauggaaagcgaguuccggguguacagcagcgccaacaacugcaccuucgaguacgugucccagccuuuccugauggaccuggaaggcaagcagggcaacuucaagaaccugcgcgaguucguguucaagaacaucgacggcuacuucaaaaucuacagcaagcacaccccuaucaaccucgugcgggaucugccucagggcuucucugcucuggaaccccugguggaucugcccaucggcaucaacaucacccgguuucagacacugcuggcccugcacagaagcuaccugacaccuggcgauagcagcagcggauggacagcuggugccgccgcuuacuaugugggcuaccugcagccuagaaccuuccugcugaaguacaacgagaacggcaccaucaccgacgccguggauugugcucuggauccucugagcgagacaaagugcacccugaaguccuucaccguggaaaagggcaucuaccagaccagcaacuuccgggugcagcccaccgaauccaucgugcgguuccccaauaucaccaaucugugccccuucggcgagguguucaaugccaccagauucgccucuguguacgccuggaaccggaagcggaucagcaauugcguggccgacuacuccgugcuguacaacuccgccagcuucagcaccuucaagugcuacggcguguccccuaccaagcugaacgaccugugcuucacaaacguguacgccgacagcuucgugauccggggagaugaagugcggcagauugccccuggacagacaggcaagaucgccgacuacaacuacaagcugcccgacgacuucaccggcugugugauugccuggaacagcaacaaccuggacuccaaagucggcggcaacuacaauuaccgcuaccggcuguuccggaaguccaaucugaagcccuucgagcgggacaucagcaccgaaaucuaucaggccggcagcaccccuugcaacggcguggaaggcuucaacugcuacuucccacugcaguccuacggcuuucagcccacaaauggcgugggcuaucagcccuacagagugguggugcugagcuucgaacugcugcaugcuccugccacagugugcggcccuaagaaaagcaccaaucucgugaagaacaaaugcgugaacuucaacuucaacggccugaccggcaccggcgugcugacagagagcaacaagaaguuccugccauuccagcaguuuggccgggauaucgccgauaccacagacgccguuagagauccccagacacuggaaauccuggacaucaccccaugcagcuucggcggagugucugugaucaccccuggcaccaacaccagcaaucagguggcagugcuguaccagggcgugaacuguaccgaagugcccguggccauucacgccgaucagcugacaccuacauggcggguguacuccaccggcagcaauguguuucagaccagagccggcugucugaucggagccgagcacgugaacaauagcuacgagugcgacauccccaucggcgcuggcaucugugccagcuaccagacacagacaaacagccccagacgggcuagaagcguggccagccagagcaucauugccuacacaaugucucugggcgccgagaacagcguggccuacuccaacaacucuaucgcuauccccaccaacuucaccaucagcgugaccaccgagauccugccuguguccaugaccaagaccagcguggacugcaccauguacaucugcggcgauuccaccgagugcuccaaccugcugcugcaguacggcagcuucugcacccagcugaauagagcccugacagggaucgccguggaacaggacaagaacacccaagagguguucgcccaagugaagcaaaucuacaagaccccuccuaucaaggacuucggcggcuucaauuucagccagauucugcccgauccuagcaagcccagcaagcggagcuucaucgaggaccugcuguucaacaaagugacacuggccgacgccggcuucaucaagcaguauggcgauugucugggcgacauugccgccagggaucugauuugcgcccagaaguuuaacggacugacagugcugccuccucugcugaccgaugagaugaucgcccaguacacaucugcccugcuggccggcacaaucacaagcggcuggacauuuggagcuggcgccgcucugcagauccccuuugcuaugcagauggccuaccgguucaacggcaucggagugacccagaaugugcuguacgagaaccagaagcugaucgccaaccaguucaacagcgccaucggcaagauccaggacagccugagcagcacagcaagcgcccugggaaagcugcaggacguggucaaccagaaugcccaggcacugaacacccuggucaagcagcuguccuccaacuucggcgccaucagcucugugcugaacgauauccugagcagacuggacccuccugaggccgaggugcagaucgacagacugaucacaggcagacugcagagccuccagacauacgugacccagcagcugaucagagccgccgagauuagagccucugccaaucuggccgccaccaagaugucugagugugugcugggccagagcaagagaguggacuuuugcggcaagggcuaccaccugaugagcuucccucagucugccccucacggcgugguguuucugcacgugacauaugugcccgcucaagagaagaauuucaccaccgcuccagccaucugccacgacggcaaagcccacuuuccuagagaaggcguguucguguccaacggcacccauugguucgugacacagcggaacuucuacgagccccagaucaucaccaccgacaacaccuucgugucuggcaacugcgacguugugaucggcauugugaacaauaccguguacgacccucugcagcccgagcuggacagcuucaaagaggaacuggacaaguacuuuaagaaccacacaagccccgacguggaccugggcgauaucagcggaaucaaugccagcgucgugaacauccagaaagagaucgaccggcugaacgagguggccaagaaucugaacgagagccugaucgaccugcaagaacuggggaaguacgagcaguacaucaaguggcccugguacaucuggcugggcuuuaucgccggacugauugccaucgugauggucacaaucaugcuguguugcaugaccagcugcuguagcugccugaagggcuguuguagcuguggcagcugcugcaaguucgacgaggacgauucugagcccgugcugaagggcgugaaacugcacuacaccugaggacuaguuauaagacugacuagcccgaugggccucccaacgggcccuccuccccuccuugcaccgagauuaauaaaaaaaaaaaaaaaaaaaaaaaaaaaaaaaaaaaaaaaaaaaaaaaaaaaaaaaaaaaaaaaaugcaucccccccccccccccccccccccccccccccaaaggcucuuuucagagccaccagaauu

SEQ ID NO: 23387 - RNA, 4039 nt, Artificial Sequence
  SARS-CoV-2/Wuhan/WIV05/2019__EPI_ISL_402128 spike protein mRNA gc mod (1-1273)(K986P_V987P)
aggagaaagcuuaccauguucguguuccuggugcugcugccucugguguccagccagugugugaaccugaccaccagaacacagcugccuccagccuacaccaacagcuuuaccagaggcguguacuaccccgacaagguguucagauccagcgugcugcacucuacccaggaccuguuccugccuuucuucagcaacgugaccugguuccacgccauccacguguccggcaccaauggcaccaagagauucgacaaccccgugcugcccuucaacgacgggguguacuuugccagcaccgagaaguccaacaucaucagaggcuggaucuucggcaccacacuggacagcaagacccagagccugcugaucgugaacaacgccaccaacguggucaucaaagugugcgaguuccaguucugcaacgaccccuuccugggcgucuacuaccacaagaacaacaagagcuggauggaaagcgaguuccggguguacagcagcgccaacaacugcaccuucgaguacgugucccagccuuuccugauggaccuggaaggcaagcagggcaacuucaagaaccugcgcgaguucguguuuaagaacaucgacggcuacuucaagaucuacagcaagcacaccccuaucaaccucgugcgggaucugccucagggcuucucugcucuggaaccccugguggaucugcccaucggcaucaacaucacccgguuucagacacugcuggcccugcacagaagcuaccugacaccuggcgauagcagcagcggauggacagcuggugccgccgcuuacuaugugggcuaccugcagccuagaaccuuccugcugaaguacaacgagaacggcaccaucaccgacgccguggauugugcucuggauccucugagcgagacaaagugcacccugaaguccuucaccguggaaaagggcaucuaccagaccagcaacuuccgggugcagcccaccgaauccaucgugcgguuccccaauaucaccaaucugugccccuucggcgagguguucaaugccaccagauucgccucuguguacgccuggaaccggaagcggaucagcaauugcguggccgacuacuccgugcuguacaacuccgccagcuucagcaccuucaagugcuacggcguguccccuaccaagcugaacgaccugugcuucacaaacguguacgccgacagcuucgugauccggggagaugaagugcggcagauugccccuggacagacaggcaagaucgccgacuacaacuacaagcugcccgacgacuucaccggcugugugauugccuggaacagcaacaaccuggacuccaaagucggcggcaacuacaauuaccuguaccggcuguuccggaaguccaaucugaagcccuucgagcgggacaucuccaccgagaucuaucaggccggcagcaccccuuguaacggcguggaaggcuucaacugcuacuucccacugcaguccuacggcuuucagcccacaaauggcgugggcuaucagcccuacagagugguggugcugagcuucgaacugcugcaugccccugccacagugugcggcccuaagaaaagcaccaaucucgugaagaacaaaugcgugaacuucaacuucaacggccugaccggcaccggcgugcugacagagagcaacaagaaguuccugccauuccagcaguuuggccgggauaucgccgauaccacagacgccguuagagauccccagacacuggaaauccuggacaucaccccuugcagcuucggcggagugucugugaucaccccuggcaccaacaccagcaaucagguggcagugcuguaccaggacgugaacuguaccgaagugcccguggccauucacgccgaucagcugacaccuacauggcggguguacuccaccggcagcaauguguuucagaccagagccggcugucugaucggagccgagcacgugaacaauagcuacgagugcgacauccccaucggcgcuggaaucugcgccagcuaccagacacagacaaacagcccucggagagccagaagcguggccagccagagcaucauugccuacacaaugucucugggcgccgagaacagcguggccuacuccaacaacucuaucgcuauccccaccaacuucaccaucagcgugaccacagagauccugccuguguccaugaccaagaccagcguggacugcaccauguacaucugcggcgauuccaccgagugcuccaaccugcugcugcaguacggcagcuucugcacccagcugaauagagcccugacagggaucgccguggaacaggacaagaacacccaagagguguucgcccaagugaagcagaucuacaagaccccuccuaucaaggacuucggcggcuucaauuucagccagauucugcccgauccuagcaagcccagcaagcggagcuucaucgaggaccugcuguucaacaaagugacacuggccgacgccggcuucaucaagcaguauggcgauugucugggcgacauugccgccagggaucugauuugcgcccagaaguuuaacggacugacagugcugccuccucugcugaccgaugagaugaucgcccaguacacaucugcccugcuggccggcacaaucacaagcggcuggacauuuggagcaggcgccgcucugcagauccccuuugcuaugcagauggccuaccgguucaacggcaucggagugacccagaaugugcuguacgagaaccagaagcugaucgccaaccaguucaacagcgccaucggcaagauccaggacagccugagcagcacagcaagcgcccugggaaagcugcaggacguggucaaccagaaugcccaggcacugaacacccuggucaagcagcuguccuccaacuucggcgccaucagcucugugcugaacgauauccugagcagacuggacccuccugaggccgaggugcagaucgacagacugaucacaggcagacugcagagccuccagacauacgugacccagcagcugaucagagccgccgagauuagagccucugccaaucuggccgccaccaagaugucugagugugugcugggccagagcaagagaguggacuuuugcggcaagggcuaccaccugaugagcuucccucagucugccccucacggcgugguguuucugcacgugacauaugugcccgcucaagagaagaauuucaccaccgcuccagccaucugccacgacggcaaagcccacuuuccuagagaaggcguguucguguccaacggcacccauugguucgugacacagcggaacuucuacgagccccagaucaucaccaccgacaacaccuucgugucuggcaacugcgacgucgugaucggcauugugaacaauaccguguacgacccucugcagcccgagcuggacagcuucaaagaggaacuggacaaguacuuuaagaaccacacaagccccgacguggaccugggcgauaucagcggaaucaaugccagcgucgugaacauccagaaagagaucgaccggcugaacgagguggccaagaaucugaacgagagccugaucgaccugcaagaacuggggaaguacgagcaguacaucaaguggcccugguacaucuggcugggcuuuaucgccggacugauugccaucgugauggucacaaucaugcuguguugcaugaccagcugcuguagcugccugaagggcuguuguagcuguggcagcugcugcaaguucgacgaggacgauucugagcccgugcugaagggcgugaaacugcacuacacaugaggacuaguuauaagacugacuagcccgaugggccucccaacgggcccuccuccccuccuugcaccgagauuaauaaaaaaaaaaaaaaaaaaaaaaaaaaaaaaaaaaaaaaaaaaaaaaaaaaaaaaaaaaaaaaaaugcaucccccccccccccccccccccccccccccccaaaggcucuuuucagagccaccagaauu

SEQ ID NO: 23388 - RNA, 4039 nt, Artificial Sequence
  SARS-CoV-2/Wuhan/WIV05/2019__EPI_ISL_402128 spike protein mRNA gc mod (1-1273)(K986P_V987P_ D614G)
aggagaaagcuuaccauguucguguuccuggugcugcugccucugguguccagccagugugugaaccugaccaccagaacacagcugccuccagccuacaccaacagcuuuaccagaggcguguacuaccccgacaagguguucagauccagcgugcugcacucuacccaggaccuguuccugccuuucuucagcaacgugaccugguuccacgccauccacguguccggcaccaauggcaccaagagauucgacaaccccgugcugcccuucaacgacgggguguacuuugccagcaccgagaaguccaacaucaucagaggcuggaucuucggcaccacacuggacagcaagacccagagccugcugaucgugaacaacgccaccaacguggucaucaaagugugcgaguuccaguucugcaacgaccccuuccugggcgucuacuaccacaagaacaacaagagcuggauggaaagcgaguuccggguguacagcagcgccaacaacugcaccuucgaguacgugucccagccuuuccugauggaccuggaaggcaagcagggcaacuucaagaaccugcgcgaguucguguuuaagaacaucgacggcuacuucaagaucuacagcaagcacaccccuaucaaccucgugcgggaucugccucagggcuucucugcucuggaaccccugguggaucugcccaucggcaucaacaucacccgguuucagacacugcuggcccugcacagaagcuaccugacaccuggcgauagcagcagcggauggacagcuggugccgccgcuuacuaugugggcuaccugcagccuagaaccuuccugcugaaguacaacgagaacggcaccaucaccgacgccguggauugugcucuggauccucugagcgagacaaagugcacccugaaguccuucaccguggaaaagggcaucuaccagaccagcaacuuccgggugcagcccaccgaauccaucgugcgguuccccaauaucaccaaucugugccccuucggcgagguguucaaugccaccagauucgccucuguguacgccuggaaccggaagcggaucagcaauugcguggccgacuacuccgugcuguacaacuccgccagcuucagcaccuucaagugcuacggcguguccccuaccaagcugaacgaccugugcuucacaaacguguacgccgacagcuucgugauccggggagaugaagugcggcagauugccccuggacagacaggcaagaucgccgacuacaacuacaagcugcccgacgacuucaccggcugugugauugccuggaacagcaacaaccuggacuccaaagucggcggcaacuacaauuaccuguaccggcuguuccggaaguccaaucugaagcccuucgagcgggacaucuccaccgagaucuaucaggccggcagcaccccuuguaacggcguggaaggcuucaacugcuacuucccacugcaguccuacggcuuucagcccacaaauggcgugggcuaucagcccuacagagugguggugcugagcuucgaacugcugcaugccccugccacagugugcggcccuaagaaaagcaccaaucucgugaagaacaaaugcgugaacuucaacuucaacggccugaccggcaccggcgugcugacagagagcaacaagaaguuccugccauuccagcaguuuggccgggauaucgccgauaccacagacgccguuagagauccccagacacuggaaauccuggacaucaccccuugcagcuucggcggagugucugugaucaccccuggcaccaacaccagcaaucagguggcagugcuguaccagggcgugaacuguaccgaagugcccguggccauucacgccgaucagcugacaccuacauggcggguguacuccaccggcagcaauguguuucagaccagagccggcugucugaucggagccgagcacgugaacaauagcuacgagugcgacauccccaucggcgcuggaaucugcgccagcuaccagacacagacaaacagcccucggagagccagaagcguggccagccagagcaucauugccuacacaaugucucugggcgccgagaacagcguggccuacuccaacaacucuaucgcuauccccaccaacuucaccaucagcgugaccacagagauccugccuguguccaugaccaagaccagcguggacugcaccauguacaucugcggcgauuccaccgagugcuccaaccugcugcugcaguacggcagcuucugcacccagcugaauagagcccugacagggaucgccguggaacaggacaagaacacccaagagguguucgcccaagugaagcagaucuacaagaccccuccuaucaaggacuucggcggcuucaauuucagccagauucugcccgauccuagcaagcccagcaagcggagcuucaucgaggaccugcuguucaacaaagugacacuggccgacgccggcuucaucaagcaguauggcgauugucugggcgacauugccgccagggaucugauuugcgcccagaaguuuaacggacugacagugcugccuccucugcugaccgaugagaugaucgcccaguacacaucugcccugcuggccggcacaaucacaagcggcuggacauuuggagcaggcgccgcucugcagauccccuuugcuaugcagauggccuaccgguucaacggcaucggagugacccagaaugugcuguacgagaaccagaagcugaucgccaaccaguucaacagcgccaucggcaagauccaggacagccugagcagcacagcaagcgcccugggaaagcugcaggacguggucaaccagaaugcccaggcacugaacacccuggucaagcagcuguccuccaacuucggcgccaucagcucugugcugaacgauauccugagcagacuggacccuccugaggccgaggugcagaucgacagacugaucacaggcagacugcagagccuccagacauacgugacccagcagcugaucagagccgccgagauuagagccucugccaaucuggccgccaccaagaugucugagugugugcugggccagagcaagagaguggacuuuugcggcaagggcuaccaccugaugagcuucccucagucugccccucacggcgugguguuucugcacgugacauaugugcccgcucaagagaagaauuucaccaccgcuccagccaucugccacgacggcaaagcccacuuuccuagagaaggcguguucguguccaacggcacccauugguucgugacacagcggaacuucuacgagccccagaucaucaccaccgacaacaccuucgugucuggcaacugcgacgucgugaucggcauugugaacaauaccguguacgacccucugcagcccgagcuggacagcuucaaagaggaacuggacaaguacuuuaagaaccacacaagccccgacguggaccugggcgauaucagcggaaucaaugccagcgucgugaacauccagaaagagaucgaccggcugaacgagguggccaagaaucugaacgagagccugaucgaccugcaagaacuggggaaguacgagcaguacaucaaguggcccugguacaucuggcugggcuuuaucgccggacugauugccaucgugauggucacaaucaugcuguguugcaugaccagcugcuguagcugccugaagggcuguuguagcuguggcagcugcugcaaguucgacgaggacgauucugagcccgugcugaagggcgugaaacugcacuacacaugaggacuaguuauaagacugacuagcccgaugggccucccaacgggcccuccuccccuccuugcaccgagauuaauaaaaaaaaaaaaaaaaaaaaaaaaaaaaaaaaaaaaaaaaaaaaaaaaaaaaaaaaaaaaaaaaugcaucccccccccccccccccccccccccccccccaaaggcucuuuucagagccaccagaauu

SEQ ID NO: 23389 - RNA, 4039 nt, Artificial Sequence
  SARS-CoV-2/Wuhan/WIV05/2019__EPI_ISL_402128 spike protein mRNA gc mod (1-1273)(K986P_V987P_A222V_D614G)
aggagaaagcuuaccauguucguguuccuggugcugcugccucugguguccagccagugugugaaccugaccaccagaacacagcugccuccagccuacaccaacagcuuuaccagaggcguguacuaccccgacaagguguucagauccagcgugcugcacucuacccaggaccuguuccugccuuucuucagcaacgugaccugguuccacgccauccacguguccggcaccaauggcaccaagagauucgacaaccccgugcugcccuucaacgacgggguguacuuugccagcaccgagaaguccaacaucaucagaggcuggaucuucggcaccacacuggacagcaagacccagagccugcugaucgugaacaacgccaccaacguggucaucaaagugugcgaguuccaguucugcaacgaccccuuccugggcgucuacuaccacaagaacaacaagagcuggauggaaagcgaguuccggguguacagcagcgccaacaacugcaccuucgaguacgugucccagccuuuccugauggaccuggaaggcaagcagggcaacuucaagaaccugcgcgaguucguguuuaagaacaucgacggcuacuucaagaucuacagcaagcacaccccuaucaaccucgugcgggaucugccucagggcuucucugugcuggaaccccugguggaucugcccaucggcaucaacaucacccgguuucagacacugcuggcccugcacagaagcuaccugacaccuggcgauagcagcagcggauggacagcuggugccgccgcuuacuaugugggcuaccugcagccuagaaccuuccugcugaaguacaacgagaacggcaccaucaccgacgccguggauugugcucuggauccucugagcgagacaaagugcacccugaaguccuucaccguggaaaagggcaucuaccagaccagcaacuuccgggugcagcccaccgaauccaucgugcgguuccccaauaucaccaaucugugccccuucggcgagguguucaaugccaccagauucgccucuguguacgccuggaaccggaagcggaucagcaauugcguggccgacuacuccgugcuguacaacuccgccagcuucagcaccuucaagugcuacggcguguccccuaccaagcugaacgaccugugcuucacaaacguguacgccgacagcuucgugauccggggagaugaagugcggcagauugccccuggacagacaggcaagaucgccgacuacaacuacaagcugcccgacgacuucaccggcugugugauugccuggaacagcaacaaccuggacuccaaagucggcggcaacuacaauuaccuguaccggcuguuccggaaguccaaucugaagcccuucgagcgggacaucuccaccgagaucuaucaggccggcagcaccccuuguaacggcguggaaggcuucaacugcuacuucccacugcaguccuacggcuuucagcccacaaauggcgugggcuaucagcccuacagagugguggugcugagcuucgaacugcugcaugccccugccacagugugcggcccuaagaaaagcaccaaucucgugaagaacaaaugcgugaacuucaacuucaacggccugaccggcaccggcgugcugacagagagcaacaagaaguuccugccauuccagcaguuuggccgggauaucgccgauaccacagacgccguuagagauccccagacacuggaaauccuggacaucaccccuugcagcuucggcggagugucugugaucaccccuggcaccaacaccagcaaucagguggcagugcuguaccagggcgugaacuguaccgaagugcccguggccauucacgccgaucagcugacaccuacauggcggguguacuccaccggcagcaauguguuucagaccagagccggcugucugaucggagccgagcacgugaacaauagcuacgagugcgacauccccaucggcgcuggaaucugcgccagcuaccagacacagacaaacagcccucggagagccagaagcguggccagccagagcaucauugccuacacaaugucucugggcgccgagaacagcguggccuacuccaacaacucuaucgcuauccccaccaacuucaccaucagcgugaccacagagauccugccuguguccaugaccaagaccagcguggacugcaccauguacaucugcggcgauuccaccgagugcuccaaccugcugcugcaguacggcagcuucugcacccagcugaauagagcccugacagggaucgccguggaacaggacaagaacacccaagagguguucgcccaagugaagcagaucuacaagaccccuccuaucaaggacuucggcggcuucaauuucagccagauucugcccgauccuagcaagcccagcaagcggagcuucaucgaggaccugcuguucaacaaagugacacuggccgacgccggcuucaucaagcaguauggcgauugucugggcgacauugccgccagggaucugauuugcgcccagaaguuuaacggacugacagugcugccuccucugcugaccgaugagaugaucgcccaguacacaucugcccugcuggccggcacaaucacaagcggcuggacauuuggagcaggcgccgcucugcagauccccuuugcuaugcagauggccuaccgguucaacggcaucggagugacccagaaugugcuguacgagaaccagaagcugaucgccaaccaguucaacagcgccaucggcaagauccaggacagccugagcagcacagcaagcgcccugggaaagcugcaggacguggucaaccagaaugcccaggcacugaacacccuggucaagcagcuguccuccaacuucggcgccaucagcucugugcugaacgauauccugagcagacuggacccuccugaggccgaggugcagaucgacagacugaucacaggcagacugcagagccuccagacauacgugacccagcagcugaucagagccgccgagauuagagccucugccaaucuggccgccaccaagaugucugagugugugcugggccagagcaagagaguggacuuuugcggcaagggcuaccaccugaugagcuucccucagucugccccucacggcgugguguuucugcacgugacauaugugcccgcucaagagaagaauuucaccaccgcuccagccaucugccacgacggcaaagcccacuuuccuagagaaggcguguucguguccaacggcacccauugguucgugacacagcggaacuucuacgagccccagaucaucaccaccgacaacaccuucgugucuggcaacugcgacgucgugaucggcauugugaacaauaccguguacgacccucugcagcccgagcuggacagcuucaaagaggaacuggacaaguacuuuaagaaccacacaagccccgacguggaccugggcgauaucagcggaaucaaugccagcgucgugaacauccagaaagagaucgaccggcugaacgagguggccaagaaucugaacgagagccugaucgaccugcaagaacuggggaaguacgagcaguacaucaaguggcccugguacaucuggcugggcuuuaucgccggacugauugccaucgugauggucacaaucaugcuguguugcaugaccagcugcuguagcugccugaagggcuguuguagcuguggcagcugcugcaaguucgacgaggacgauucugagcccgugcugaagggcgugaaacugcacuacacaugaggacuaguuauaagacugacuagcccgaugggccucccaacgggcccuccuccccuccuugcaccgagauuaauaaaaaaaaaaaaaaaaaaaaaaaaaaaaaaaaaaaaaaaaaaaaaaaaaaaaaaaaaaaaaaaaugcaucccccccccccccccccccccccccccccccaaaggcucuuuucagagccaccagaauu

SEQ ID NO: 23390 - RNA, 4039 nt, Artificial Sequence
  SARS-CoV-2/Wuhan/WIV05/2019__EPI_ISL_402128 spike protein mRNA gc mod (1-1273)(K986P_V987P_N439K_D614G)
aggagaaagcuuaccauguucguguuccuggugcugcugccucugguguccagccagugugugaaccugaccaccagaacacagcugccuccagccuacaccaacagcuuuaccagaggcguguacuaccccgacaagguguucagauccagcgugcugcacucuacccaggaccuguuccugccuuucuucagcaacgugaccugguuccacgccauccacguguccggcaccaauggcaccaagagauucgacaaccccgugcugcccuucaacgacgggguguacuuugccagcaccgagaaguccaacaucaucagaggcuggaucuucggcaccacacuggacagcaagacccagagccugcugaucgugaacaacgccaccaacguggucaucaaagugugcgaguuccaguucugcaacgaccccuuccugggcgucuacuaccacaagaacaacaagagcuggauggaaagcgaguuccggguguacagcagcgccaacaacugcaccuucgaguacgugucccagccuuuccugauggaccuggaaggcaagcagggcaacuucaagaaccugcgcgaguucguguuuaagaacaucgacggcuacuucaagaucuacagcaagcacaccccuaucaaccucgugcgggaucugccucagggcuucucugcucuggaaccccugguggaucugcccaucggcaucaacaucacccgguuucagacacugcuggcccugcacagaagcuaccugacaccuggcgauagcagcagcggauggacagcuggugccgccgcuuacuaugugggcuaccugcagccuagaaccuuccugcugaaguacaacgagaacggcaccaucaccgacgccguggauugugcucuggauccucugagcgagacaaagugcacccugaaguccuucaccguggaaaagggcaucuaccagaccagcaacuuccgggugcagcccaccgaauccaucgugcgguuccccaauaucaccaaucugugccccuucggcgagguguucaaugccaccagauucgccucuguguacgccuggaaccggaagcggaucagcaauugcguggccgacuacuccgugcuguacaacuccgccagcuucagcaccuucaagugcuacggcguguccccuaccaagcugaacgaccugugcuucacaaacguguacgccgacagcuucgugauccggggagaugaagugcggcagauugccccuggacagacaggcaagaucgccgacuacaacuacaagcugcccgacgacuucaccggcugugugauugccuggaacagcaagaaccuggacuccaaagucggcggcaacuacaauuaccuguaccggcuguuccggaaguccaaucugaagcccuucgagcgggacaucuccaccgagaucuaucaggccggcagcaccccuuguaacggcguggaaggcuucaacugcuacuucccacugcaguccuacggcuuucagcccacaaauggcgugggcuaucagcccuacagagugguggugcugagcuucgaacugcugcaugccccugccacagugugcggcccuaagaaaagcaccaaucucgugaagaacaaaugcgugaacuucaacuucaacggccugaccggcaccggcgugcugacagagagcaacaagaaguuccugccauuccagcaguuuggccgggauaucgccgauaccacagacgccguuagagauccccagacacuggaaauccuggacaucaccccuugcagcuucggcggagugucugugaucaccccuggcaccaacaccagcaaucagguggcagugcuguaccagggcgugaacuguaccgaagugcccguggccauucacgccgaucagcugacaccuacauggcggguguacuccaccggcagcaauguguuucagaccagagccggcugucugaucggagccgagcacgugaacaauagcuacgagugcgacauccccaucggcgcuggaaucugcgccagcuaccagacacagacaaacagcccucggagagccagaagcguggccagccagagcaucauugccuacacaaugucucugggcgccgagaacagcguggccuacuccaacaacucuaucgcuauccccaccaacuucaccaucagcgugaccacagagauccugccuguguccaugaccaagaccagcguggacugcaccauguacaucugcggcgauuccaccgagugcuccaaccugcugcugcaguacggcagcuucugcacccagcugaauagagcccugacagggaucgccguggaacaggacaagaacacccaagagguguucgcccaagugaagcagaucuacaagaccccuccuaucaaggacuucggcggcuucaauuucagccagauucugcccgauccuagcaagcccagcaagcggagcuucaucgaggaccugcuguucaacaaagugacacuggccgacgccggcuucaucaagcaguauggcgauugucugggcgacauugccgccagggaucugauuugcgcccagaaguuuaacggacugacagugcugccuccucugcugaccgaugagaugaucgcccaguacacaucugcccugcuggccggcacaaucacaagcggcuggacauuuggagcaggcgccgcucugcagauccccuuugcuaugcagauggccuaccgguucaacggcaucggagugacccagaaugugcuguacgagaaccagaagcugaucgccaaccaguucaacagcgccaucggcaagauccaggacagccugagcagcacagcaagcgcccugggaaagcugcaggacguggucaaccagaaugcccaggcacugaacacccuggucaagcagcuguccuccaacuucggcgccaucagcucugugcugaacgauauccugagcagacuggacccuccugaggccgaggugcagaucgacagacugaucacaggcagacugcagagccuccagacauacgugacccagcagcugaucagagccgccgagauuagagccucugccaaucuggccgccaccaagaugucugagugugugcugggccagagcaagagaguggacuuuugcggcaagggcuaccaccugaugagcuucccucagucugccccucacggcgugguguuucugcacgugacauaugugcccgcucaagagaagaauuucaccaccgcuccagccaucugccacgacggcaaagcccacuuuccuagagaaggcguguucguguccaacggcacccauugguucgugacacagcggaacuucuacgagccccagaucaucaccaccgacaacaccuucgugucuggcaacugcgacgucgugaucggcauugugaacaauaccguguacgacccucugcagcccgagcuggacagcuucaaagaggaacuggacaaguacuuuaagaaccacacaagccccgacguggaccugggcgauaucagcggaaucaaugccagcgucgugaacauccagaaagagaucgaccggcugaacgagguggccaagaaucugaacgagagccugaucgaccugcaagaacuggggaaguacgagcaguacaucaaguggcccugguacaucuggcugggcuuuaucgccggacugauugccaucgugauggucacaaucaugcuguguugcaugaccagcugcuguagcugccugaagggcuguuguagcuguggcagcugcugcaaguucgacgaggacgauucugagcccgugcugaagggcgugaaacugcacuacacaugaggacuaguuauaagacugacuagcccgaugggccucccaacgggcccuccuccccuccuugcaccgagauuaauaaaaaaaaaaaaaaaaaaaaaaaaaaaaaaaaaaaaaaaaaaaaaaaaaaaaaaaaaaaaaaaaugcaucccccccccccccccccccccccccccccccaaaggcucuuuucagagccaccagaauu

SEQ ID NO: 23391 - RNA, 4039 nt, Artificial Sequence
  SARS-CoV-2/Wuhan/WIV05/2019__EPI_ISL_402128 spike protein mRNA gc mod (1-1273)(K986P_V987P_S477N_D614G)
aggagaaagcuuaccauguucguguuccuggugcugcugccucugguguccagccagugugugaaccugaccaccagaacacagcugccuccagccuacaccaacagcuuuaccagaggcguguacuaccccgacaagguguucagauccagcgugcugcacucuacccaggaccuguuccugccuuucuucagcaacgugaccugguuccacgccauccacguguccggcaccaauggcaccaagagauucgacaaccccgugcugcccuucaacgacgggguguacuuugccagcaccgagaaguccaacaucaucagaggcuggaucuucggcaccacacuggacagcaagacccagagccugcugaucgugaacaacgccaccaacguggucaucaaagugugcgaguuccaguucugcaacgaccccuuccugggcgucuacuaccacaagaacaacaagagcuggauggaaagcgaguuccggguguacagcagcgccaacaacugcaccuucgaguacgugucccagccuuuccugauggaccuggaaggcaagcagggcaacuucaagaaccugcgcgaguucguguuuaagaacaucgacggcuacuucaagaucuacagcaagcacaccccuaucaaccucgugcgggaucugccucagggcuucucugcucuggaaccccugguggaucugcccaucggcaucaacaucacccgguuucagacacugcuggcccugcacagaagcuaccugacaccuggcgauagcagcagcggauggacagcuggugccgccgcuuacuaugugggcuaccugcagccuagaaccuuccugcugaaguacaacgagaacggcaccaucaccgacgccguggauugugcucuggauccucugagcgagacaaagugcacccugaaguccuucaccguggaaaagggcaucuaccagaccagcaacuuccgggugcagcccaccgaauccaucgugcgguuccccaauaucaccaaucugugccccuucggcgagguguucaaugccaccagauucgccucuguguacgccuggaaccggaagcggaucagcaauugcguggccgacuacuccgugcuguacaacuccgccagcuucagcaccuucaagugcuacggcguguccccuaccaagcugaacgaccugugcuucacaaacguguacgccgacagcuucgugauccggggagaugaagugcggcagauugccccuggacagacaggcaagaucgccgacuacaacuacaagcugcccgacgacuucaccggcugugugauugccuggaacagcaacaaccuggacuccaaagucggcggcaacuacaauuaccuguaccggcuguuccggaaguccaaucugaagcccuucgagcgggacaucuccaccgagaucuaucaggccggcaacaccccuuguaacggcguggaaggcuucaacugcuacuucccacugcaguccuacggcuuucagcccacaaauggcgugggcuaucagcccuacagagugguggugcugagcuucgaacugcugcaugccccugccacagugugcggcccuaagaaaagcaccaaucucgugaagaacaaaugcgugaacuucaacuucaacggccugaccggcaccggcgugcugacagagagcaacaagaaguuccugccauuccagcaguuuggccgggauaucgccgauaccacagacgccguuagagauccccagacacuggaaauccuggacaucaccccuugcagcuucggcggagugucugugaucaccccuggcaccaacaccagcaaucagguggcagugcuguaccagggcgugaacuguaccgaagugcccguggccauucacgccgaucagcugacaccuacauggcggguguacuccaccggcagcaauguguuucagaccagagccggcugucugaucggagccgagcacgugaacaauagcuacgagugcgacauccccaucggcgcuggaaucugcgccagcuaccagacacagacaaacagcccucggagagccagaagcguggccagccagagcaucauugccuacacaaugucucugggcgccgagaacagcguggccuacuccaacaacucuaucgcuauccccaccaacuucaccaucagcgugaccacagagauccugccuguguccaugaccaagaccagcguggacugcaccauguacaucugcggcgauuccaccgagugcuccaaccugcugcugcaguacggcagcuucugcacccagcugaauagagcccugacagggaucgccguggaacaggacaagaacacccaagagguguucgcccaagugaagcagaucuacaagaccccuccuaucaaggacuucggcggcuucaauuucagccagauucugcccgauccuagcaagcccagcaagcggagcuucaucgaggaccugcuguucaacaaagugacacuggccgacgccggcuucaucaagcaguauggcgauugucugggcgacauugccgccagggaucugauuugcgcccagaaguuuaacggacugacagugcugccuccucugcugaccgaugagaugaucgcccaguacacaucugcccugcuggccggcacaaucacaagcggcuggacauuuggagcaggcgccgcucugcagauccccuuugcuaugcagauggccuaccgguucaacggcaucggagugacccagaaugugcuguacgagaaccagaagcugaucgccaaccaguucaacagcgccaucggcaagauccaggacagccugagcagcacagcaagcgcccugggaaagcugcaggacguggucaaccagaaugcccaggcacugaacacccuggucaagcagcuguccuccaacuucggcgccaucagcucugugcugaacgauauccugagcagacuggacccuccugaggccgaggugcagaucgacagacugaucacaggcagacugcagagccuccagacauacgugacccagcagcugaucagagccgccgagauuagagccucugccaaucuggccgccaccaagaugucugagugugugcugggccagagcaagagaguggacuuuugcggcaagggcuaccaccugaugagcuucccucagucugccccucacggcgugguguuucugcacgugacauaugugcccgcucaagagaagaauuucaccaccgcuccagccaucugccacgacggcaaagcccacuuuccuagagaaggcguguucguguccaacggcacccauugguucgugacacagcggaacuucuacgagccccagaucaucaccaccgacaacaccuucgugucuggcaacugcgacgucgugaucggcauugugaacaauaccguguacgacccucugcagcccgagcuggacagcuucaaagaggaacuggacaaguacuuuaagaaccacacaagccccgacguggaccugggcgauaucagcggaaucaaugccagcgucgugaacauccagaaagagaucgaccggcugaacgagguggccaagaaucugaacgagagccugaucgaccugcaagaacuggggaaguacgagcaguacaucaaguggcccugguacaucuggcugggcuuuaucgccggacugauugccaucgugauggucacaaucaugcuguguugcaugaccagcugcuguagcugccugaagggcuguuguagcuguggcagcugcugcaaguucgacgaggacgauucugagcccgugcugaagggcgugaaacugcacuacacaugaggacuaguuauaagacugacuagcccgaugggccucccaacgggcccuccuccccuccuugcaccgagauuaauaaaaaaaaaaaaaaaaaaaaaaaaaaaaaaaaaaaaaaaaaaaaaaaaaaaaaaaaaaaaaaaaugcaucccccccccccccccccccccccccccccccaaaggcucuuuucagagccaccagaauu

SEQ ID NO: 23392 - RNA, 4039 nt, Artificial Sequence
  SARS-CoV-2/Wuhan/WIV05/2019__EPI_ISL_402128 spike protein mRNA gc mod (1-1273)(K986P_V987P_N501Y_D614G)
aggagaaagcuuaccauguucguguuccuggugcugcugccucugguguccagccagugugugaaccugaccaccagaacacagcugccuccagccuacaccaacagcuuuaccagaggcguguacuaccccgacaagguguucagauccagcgugcugcacucuacccaggaccuguuccugccuuucuucagcaacgugaccugguuccacgccauccacguguccggcaccaauggcaccaagagauucgacaaccccgugcugcccuucaacgacgggguguacuuugccagcaccgagaaguccaacaucaucagaggcuggaucuucggcaccacacuggacagcaagacccagagccugcugaucgugaacaacgccaccaacguggucaucaaagugugcgaguuccaguucugcaacgaccccuuccugggcgucuacuaccacaagaacaacaagagcuggauggaaagcgaguuccggguguacagcagcgccaacaacugcaccuucgaguacgugucccagccuuuccugauggaccuggaaggcaagcagggcaacuucaagaaccugcgcgaguucguguuuaagaacaucgacggcuacuucaagaucuacagcaagcacaccccuaucaaccucgugcgggaucugccucagggcuucucugcucuggaaccccugguggaucugcccaucggcaucaacaucacccgguuucagacacugcuggcccugcacagaagcuaccugacaccuggcgauagcagcagcggauggacagcuggugccgccgcuuacuaugugggcuaccugcagccuagaaccuuccugcugaaguacaacgagaacggcaccaucaccgacgccguggauugugcucuggauccucugagcgagacaaagugcacccugaaguccuucaccguggaaaagggcaucuaccagaccagcaacuuccgggugcagcccaccgaauccaucgugcgguuccccaauaucaccaaucugugccccuucggcgagguguucaaugccaccagauucgccucuguguacgccuggaaccggaagcggaucagcaauugcguggccgacuacuccgugcuguacaacuccgccagcuucagcaccuucaagugcuacggcguguccccuaccaagcugaacgaccugugcuucacaaacguguacgccgacagcuucgugauccggggagaugaagugcggcagauugccccuggacagacaggcaagaucgccgacuacaacuacaagcugcccgacgacuucaccggcugugugauugccuggaacagcaacaaccuggacuccaaagucggcggcaacuacaauuaccuguaccggcuguuccggaaguccaaucugaagcccuucgagcgggacaucuccaccgagaucuaucaggccggcagcaccccuuguaacggcguggaaggcuucaacugcuacuucccacugcaguccuacggcuuucagcccacauacggcgugggcuaucagcccuacagagugguggugcugagcuucgaacugcugcaugccccugccacagugugcggcccuaagaaaagcaccaaucucgugaagaacaaaugcgugaacuucaacuucaacggccugaccggcaccggcgugcugacagagagcaacaagaaguuccugccauuccagcaguuuggccgggauaucgccgauaccacagacgccguuagagauccccagacacuggaaauccuggacaucaccccuugcagcuucggcggagugucugugaucaccccuggcaccaacaccagcaaucagguggcagugcuguaccagggcgugaacuguaccgaagugcccguggccauucacgccgaucagcugacaccuacauggcggguguacuccaccggcagcaauguguuucagaccagagccggcugucugaucggagccgagcacgugaacaauagcuacgagugcgacauccccaucggcgcuggaaucugcgccagcuaccagacacagacaaacagcccucggagagccagaagcguggccagccagagcaucauugccuacacaaugucucugggcgccgagaacagcguggccuacuccaacaacucuaucgcuauccccaccaacuucaccaucagcgugaccacagagauccugccuguguccaugaccaagaccagcguggacugcaccauguacaucugcggcgauuccaccgagugcuccaaccugcugcugcaguacggcagcuucugcacccagcugaauagagcccugacagggaucgccguggaacaggacaagaacacccaagagguguucgcccaagugaagcagaucuacaagaccccuccuaucaaggacuucggcggcuucaauuucagccagauucugcccgauccuagcaagcccagcaagcggagcuucaucgaggaccugcuguucaacaaagugacacuggccgacgccggcuucaucaagcaguauggcgauugucugggcgacauugccgccagggaucugauuugcgcccagaaguuuaacggacugacagugcugccuccucugcugaccgaugagaugaucgcccaguacacaucugcccugcuggccggcacaaucacaagcggcuggacauuuggagcaggcgccgcucugcagauccccuuugcuaugcagauggccuaccgguucaacggcaucggagugacccagaaugugcuguacgagaaccagaagcugaucgccaaccaguucaacagcgccaucggcaagauccaggacagccugagcagcacagcaagcgcccugggaaagcugcaggacguggucaaccagaaugcccaggcacugaacacccuggucaagcagcuguccuccaacuucggcgccaucagcucugugcugaacgauauccugagcagacuggacccuccugaggccgaggugcagaucgacagacugaucacaggcagacugcagagccuccagacauacgugacccagcagcugaucagagccgccgagauuagagccucugccaaucuggccgccaccaagaugucugagugugugcugggccagagcaagagaguggacuuuugcggcaagggcuaccaccugaugagcuucccucagucugccccucacggcgugguguuucugcacgugacauaugugcccgcucaagagaagaauuucaccaccgcuccagccaucugccacgacggcaaagcccacuuuccuagagaaggcguguucguguccaacggcacccauugguucgugacacagcggaacuucuacgagccccagaucaucaccaccgacaacaccuucgugucuggcaacugcgacgucgugaucggcauugugaacaauaccguguacgacccucugcagcccgagcuggacagcuucaaagaggaacuggacaaguacuuuaagaaccacacaagccccgacguggaccugggcgauaucagcggaaucaaugccagcgucgugaacauccagaaagagaucgaccggcugaacgagguggccaagaaucugaacgagagccugaucgaccugcaagaacuggggaaguacgagcaguacaucaaguggcccugguacaucuggcugggcuuuaucgccggacugauugccaucgugauggucacaaucaugcuguguugcaugaccagcugcuguagcugccugaagggcuguuguagcuguggcagcugcugcaaguucgacgaggacgauucugagcccgugcugaagggcgugaaacugcacuacacaugaggacuaguuauaagacugacuagcccgaugggccucccaacgggcccuccuccccuccuugcaccgagauuaauaaaaaaaaaaaaaaaaaaaaaaaaaaaaaaaaaaaaaaaaaaaaaaaaaaaaaaaaaaaaaaaaugcaucccccccccccccccccccccccccccccccaaaggcucuuuucagagccaccagaauu

SEQ ID NO: 23393 - RNA, 4033 nt, Artificial Sequence
  SARS-CoV-2/Wuhan/WIV05/2019__EPI_ISL_402128 spike protein mRNA gc mod (1-1273)(K986P_V987P_H69del_V70del_D614G)
aggagaaagcuuaccauguucguguuccuggugcugcugccucugguguccagccagugugugaaccugaccaccagaacacagcugccuccagccuacaccaacagcuuuaccagaggcguguacuaccccgacaagguguucagauccagcgugcugcacucuacccaggaccuguuccugccuuucuucagcaacgugaccugguuccacgccaucuccggcaccaauggcaccaagagauucgacaaccccgugcugcccuucaacgacgggguguacuuugccagcaccgagaaguccaacaucaucagaggcuggaucuucggcaccacacuggacagcaagacccagagccugcugaucgugaacaacgccaccaacguggucaucaaagugugcgaguuccaguucugcaacgaccccuuccugggcgucuacuaccacaagaacaacaagagcuggauggaaagcgaguuccggguguacagcagcgccaacaacugcaccuucgaguacgugucccagccuuuccugauggaccuggaaggcaagcagggcaacuucaagaaccugcgcgaguucguguuuaagaacaucgacggcuacuucaagaucuacagcaagcacaccccuaucaaccucgugcgggaucugccucagggcuucucugcucuggaaccccugguggaucugcccaucggcaucaacaucacccgguuucagacacugcuggcccugcacagaagcuaccugacaccuggcgauagcagcagcggauggacagcuggugccgccgcuuacuaugugggcuaccugcagccuagaaccuuccugcugaaguacaacgagaacggcaccaucaccgacgccguggauugugcucuggauccucugagcgagacaaagugcacccugaaguccuucaccguggaaaagggcaucuaccagaccagcaacuuccgggugcagcccaccgaauccaucgugcgguuccccaauaucaccaaucugugccccuucggcgagguguucaaugccaccagauucgccucuguguacgccuggaaccggaagcggaucagcaauugcguggccgacuacuccgugcuguacaacuccgccagcuucagcaccuucaagugcuacggcguguccccuaccaagcugaacgaccugugcuucacaaacguguacgccgacagcuucgugauccggggagaugaagugcggcagauugccccuggacagacaggcaagaucgccgacuacaacuacaagcugcccgacgacuucaccggcugugugauugccuggaacagcaacaaccuggacuccaaagucggcggcaacuacaauuaccuguaccggcuguuccggaaguccaaucugaagcccuucgagcgggacaucuccaccgagaucuaucaggccggcagcaccccuuguaacggcguggaaggcuucaacugcuacuucccacugcaguccuacggcuuucagcccacaaauggcgugggcuaucagcccuacagagugguggugcugagcuucgaacugcugcaugccccugccacagugugcggcccuaagaaaagcaccaaucucgugaagaacaaaugcgugaacuucaacuucaacggccugaccggcaccggcgugcugacagagagcaacaagaaguuccugccauuccagcaguuuggccgggauaucgccgauaccacagacgccguuagagauccccagacacuggaaauccuggacaucaccccuugcagcuucggcggagugucugugaucaccccuggcaccaacaccagcaaucagguggcagugcuguaccagggcgugaacuguaccgaagugcccguggccauucacgccgaucagcugacaccuacauggcggguguacuccaccggcagcaauguguuucagaccagagccggcugucugaucggagccgagcacgugaacaauagcuacgagugcgacauccccaucggcgcuggaaucugcgccagcuaccagacacagacaaacagcccucggagagccagaagcguggccagccagagcaucauugccuacacaaugucucugggcgccgagaacagcguggccuacuccaacaacucuaucgcuauccccaccaacuucaccaucagcgugaccacagagauccugccuguguccaugaccaagaccagcguggacugcaccauguacaucugcggcgauuccaccgagugcuccaaccugcugcugcaguacggcagcuucugcacccagcugaauagagcccugacagggaucgccguggaacaggacaagaacacccaagagguguucgcccaagugaagcagaucuacaagaccccuccuaucaaggacuucggcggcuucaauuucagccagauucugcccgauccuagcaagcccagcaagcggagcuucaucgaggaccugcuguucaacaaagugacacuggccgacgccggcuucaucaagcaguauggcgauugucugggcgacauugccgccagggaucugauuugcgcccagaaguuuaacggacugacagugcugccuccucugcugaccgaugagaugaucgcccaguacacaucugcccugcuggccggcacaaucacaagcggcuggacauuuggagcaggcgccgcucugcagauccccuuugcuaugcagauggccuaccgguucaacggcaucggagugacccagaaugugcuguacgagaaccagaagcugaucgccaaccaguucaacagcgccaucggcaagauccaggacagccugagcagcacagcaagcgcccugggaaagcugcaggacguggucaaccagaaugcccaggcacugaacacccuggucaagcagcuguccuccaacuucggcgccaucagcucugugcugaacgauauccugagcagacuggacccuccugaggccgaggugcagaucgacagacugaucacaggcagacugcagagccuccagacauacgugacccagcagcugaucagagccgccgagauuagagccucugccaaucuggccgccaccaagaugucugagugugugcugggccagagcaagagaguggacuuuugcggcaagggcuaccaccugaugagcuucccucagucugccccucacggcgugguguuucugcacgugacauaugugcccgcucaagagaagaauuucaccaccgcuccagccaucugccacgacggcaaagcccacuuuccuagagaaggcguguucguguccaacggcacccauugguucgugacacagcggaacuucuacgagccccagaucaucaccaccgacaacaccuucgugucuggcaacugcgacgucgugaucggcauugugaacaauaccguguacgacccucugcagcccgagcuggacagcuucaaagaggaacuggacaaguacuuuaagaaccacacaagccccgacguggaccugggcgauaucagcggaaucaaugccagcgucgugaacauccagaaagagaucgaccggcugaacgagguggccaagaaucugaacgagagccugaucgaccugcaagaacuggggaaguacgagcaguacaucaaguggcccugguacaucuggcugggcuuuaucgccggacugauugccaucgugauggucacaaucaugcuguguugcaugaccagcugcuguagcugccugaagggcuguuguagcuguggcagcugcugcaaguucgacgaggacgauucugagcccgugcugaagggcgugaaacugcacuacacaugaggacuaguuauaagacugacuagcccgaugggccucccaacgggcccuccuccccuccuugcaccgagauuaauaaaaaaaaaaaaaaaaaaaaaaaaaaaaaaaaaaaaaaaaaaaaaaaaaaaaaaaaaaaaaaaaugcaucccccccccccccccccccccccccccccccaaaggcucuuuucagagccaccagaauu

SEQ ID NO: 23394 - RNA, 4039 nt, Artificial Sequence
  SARS-CoV-2/Wuhan/WIV05/2019__EPI_ISL_402128 spike protein mRNA gc mod (1-1273)(K986P_V987P_Y453F_D614G)
aggagaaagcuuaccauguucguguuccuggugcugcugccucugguguccagccagugugugaaccugaccaccagaacacagcugccuccagccuacaccaacagcuuuaccagaggcguguacuaccccgacaagguguucagauccagcgugcugcacucuacccaggaccuguuccugccuuucuucagcaacgugaccugguuccacgccauccacguguccggcaccaauggcaccaagagauucgacaaccccgugcugcccuucaacgacgggguguacuuugccagcaccgagaaguccaacaucaucagaggcuggaucuucggcaccacacuggacagcaagacccagagccugcugaucgugaacaacgccaccaacguggucaucaaagugugcgaguuccaguucugcaacgaccccuuccugggcgucuacuaccacaagaacaacaagagcuggauggaaagcgaguuccggguguacagcagcgccaacaacugcaccuucgaguacgugucccagccuuuccugauggaccuggaaggcaagcagggcaacuucaagaaccugcgcgaguucguguuuaagaacaucgacggcuacuucaagaucuacagcaagcacaccccuaucaaccucgugcgggaucugccucagggcuucucugcucuggaaccccugguggaucugcccaucggcaucaacaucacccgguuucagacacugcuggcccugcacagaagcuaccugacaccuggcgauagcagcagcggauggacagcuggugccgccgcuuacuaugugggcuaccugcagccuagaaccuuccugcugaaguacaacgagaacggcaccaucaccgacgccguggauugugcucuggauccucugagcgagacaaagugcacccugaaguccuucaccguggaaaagggcaucuaccagaccagcaacuuccgggugcagcccaccgaauccaucgugcgguuccccaauaucaccaaucugugccccuucggcgagguguucaaugccaccagauucgccucuguguacgccuggaaccggaagcggaucagcaauugcguggccgacuacuccgugcuguacaacuccgccagcuucagcaccuucaagugcuacggcguguccccuaccaagcugaacgaccugugcuucacaaacguguacgccgacagcuucgugauccggggagaugaagugcggcagauugccccuggacagacaggcaagaucgccgacuacaacuacaagcugcccgacgacuucaccggcugugugauugccuggaacagcaacaaccuggacuccaaagucggcggcaacuacaauuaccuguuccggcuguuccggaaguccaaucugaagcccuucgagcgggacaucuccaccgagaucuaucaggccggcagcaccccuuguaacggcguggaaggcuucaacugcuacuucccacugcaguccuacggcuuucagcccacaaauggcgugggcuaucagcccuacagagugguggugcugagcuucgaacugcugcaugccccugccacagugugcggcccuaagaaaagcaccaaucucgugaagaacaaaugcgugaacuucaacuucaacggccugaccggcaccggcgugcugacagagagcaacaagaaguuccugccauuccagcaguuuggccgggauaucgccgauaccacagacgccguuagagauccccagacacuggaaauccuggacaucaccccuugcagcuucggcggagugucugugaucaccccuggcaccaacaccagcaaucagguggcagugcuguaccagggcgugaacuguaccgaagugcccguggccauucacgccgaucagcugacaccuacauggcggguguacuccaccggcagcaauguguuucagaccagagccggcugucugaucggagccgagcacgugaacaauagcuacgagugcgacauccccaucggcgcuggaaucugcgccagcuaccagacacagacaaacagcccucggagagccagaagcguggccagccagagcaucauugccuacacaaugucucugggcgccgagaacagcguggccuacuccaacaacucuaucgcuauccccaccaacuucaccaucagcgugaccacagagauccugccuguguccaugaccaagaccagcguggacugcaccauguacaucugcggcgauuccaccgagugcuccaaccugcugcugcaguacggcagcuucugcacccagcugaauagagcccugacagggaucgccguggaacaggacaagaacacccaagagguguucgcccaagugaagcagaucuacaagaccccuccuaucaaggacuucggcggcuucaauuucagccagauucugcccgauccuagcaagcccagcaagcggagcuucaucgaggaccugcuguucaacaaagugacacuggccgacgccggcuucaucaagcaguauggcgauugucugggcgacauugccgccagggaucugauuugcgcccagaaguuuaacggacugacagugcugccuccucugcugaccgaugagaugaucgcccaguacacaucugcccugcuggccggcacaaucacaagcggcuggacauuuggagcaggcgccgcucugcagauccccuuugcuaugcagauggccuaccgguucaacggcaucggagugacccagaaugugcuguacgagaaccagaagcugaucgccaaccaguucaacagcgccaucggcaagauccaggacagccugagcagcacagcaagcgcccugggaaagcugcaggacguggucaaccagaaugcccaggcacugaacacccuggucaagcagcuguccuccaacuucggcgccaucagcucugugcugaacgauauccugagcagacuggacccuccugaggccgaggugcagaucgacagacugaucacaggcagacugcagagccuccagacauacgugacccagcagcugaucagagccgccgagauuagagccucugccaaucuggccgccaccaagaugucugagugugugcugggccagagcaagagaguggacuuuugcggcaagggcuaccaccugaugagcuucccucagucugccccucacggcgugguguuucugcacgugacauaugugcccgcucaagagaagaauuucaccaccgcuccagccaucugccacgacggcaaagcccacuuuccuagagaaggcguguucguguccaacggcacccauugguucgugacacagcggaacuucuacgagccccagaucaucaccaccgacaacaccuucgugucuggcaacugcgacgucgugaucggcauugugaacaauaccguguacgacccucugcagcccgagcuggacagcuucaaagaggaacuggacaaguacuuuaagaaccacacaagccccgacguggaccugggcgauaucagcggaaucaaugccagcgucgugaacauccagaaagagaucgaccggcugaacgagguggccaagaaucugaacgagagccugaucgaccugcaagaacuggggaaguacgagcaguacaucaaguggcccugguacaucuggcugggcuuuaucgccggacugauugccaucgugauggucacaaucaugcuguguugcaugaccagcugcuguagcugccugaagggcuguuguagcuguggcagcugcugcaaguucgacgaggacgauucugagcccgugcugaagggcgugaaacugcacuacacaugaggacuaguuauaagacugacuagcccgaugggccucccaacgggcccuccuccccuccuugcaccgagauuaauaaaaaaaaaaaaaaaaaaaaaaaaaaaaaaaaaaaaaaaaaaaaaaaaaaaaaaaaaaaaaaaaugcaucccccccccccccccccccccccccccccccaaaggcucuuuucagagccaccagaauu

SEQ ID NO: 23395 - RNA, 4039 nt, Artificial Sequence
  SARS-CoV-2/Wuhan/WIV05/2019__EPI_ISL_402128 spike protein mRNA gc mod (1-1273)(K986P_V987P_D614G_I692V)
aggagaaagcuuaccauguucguguuccuggugcugcugccucugguguccagccagugugugaaccugaccaccagaacacagcugccuccagccuacaccaacagcuuuaccagaggcguguacuaccccgacaagguguucagauccagcgugcugcacucuacccaggaccuguuccugccuuucuucagcaacgugaccugguuccacgccauccacguguccggcaccaauggcaccaagagauucgacaaccccgugcugcccuucaacgacgggguguacuuugccagcaccgagaaguccaacaucaucagaggcuggaucuucggcaccacacuggacagcaagacccagagccugcugaucgugaacaacgccaccaacguggucaucaaagugugcgaguuccaguucugcaacgaccccuuccugggcgucuacuaccacaagaacaacaagagcuggauggaaagcgaguuccggguguacagcagcgccaacaacugcaccuucgaguacgugucccagccuuuccugauggaccuggaaggcaagcagggcaacuucaagaaccugcgcgaguucguguuuaagaacaucgacggcuacuucaagaucuacagcaagcacaccccuaucaaccucgugcgggaucugccucagggcuucucugcucuggaaccccugguggaucugcccaucggcaucaacaucacccgguuucagacacugcuggcccugcacagaagcuaccugacaccuggcgauagcagcagcggauggacagcuggugccgccgcuuacuaugugggcuaccugcagccuagaaccuuccugcugaaguacaacgagaacggcaccaucaccgacgccguggauugugcucuggauccucugagcgagacaaagugcacccugaaguccuucaccguggaaaagggcaucuaccagaccagcaacuuccgggugcagcccaccgaauccaucgugcgguuccccaauaucaccaaucugugccccuucggcgagguguucaaugccaccagauucgccucuguguacgccuggaaccggaagcggaucagcaauugcguggccgacuacuccgugcuguacaacuccgccagcuucagcaccuucaagugcuacggcguguccccuaccaagcugaacgaccugugcuucacaaacguguacgccgacagcuucgugauccggggagaugaagugcggcagauugccccuggacagacaggcaagaucgccgacuacaacuacaagcugcccgacgacuucaccggcugugugauugccuggaacagcaacaaccuggacuccaaagucggcggcaacuacaauuaccuguaccggcuguuccggaaguccaaucugaagcccuucgagcgggacaucuccaccgagaucuaucaggccggcagcaccccuuguaacggcguggaaggcuucaacugcuacuucccacugcaguccuacggcuuucagcccacaaauggcgugggcuaucagcccuacagagugguggugcugagcuucgaacugcugcaugccccugccacagugugcggcccuaagaaaagcaccaaucucgugaagaacaaaugcgugaacuucaacuucaacggccugaccggcaccggcgugcugacagagagcaacaagaaguuccugccauuccagcaguuuggccgggauaucgccgauaccacagacgccguuagagauccccagacacuggaaauccuggacaucaccccuugcagcuucggcggagugucugugaucaccccuggcaccaacaccagcaaucagguggcagugcuguaccagggcgugaacuguaccgaagugcccguggccauucacgccgaucagcugacaccuacauggcggguguacuccaccggcagcaauguguuucagaccagagccggcugucugaucggagccgagcacgugaacaauagcuacgagugcgacauccccaucggcgcuggaaucugcgccagcuaccagacacagacaaacagcccucggagagccagaagcguggccagccagagcgugauugccuacacaaugucucugggcgccgagaacagcguggccuacuccaacaacucuaucgcuauccccaccaacuucaccaucagcgugaccacagagauccugccuguguccaugaccaagaccagcguggacugcaccauguacaucugcggcgauuccaccgagugcuccaaccugcugcugcaguacggcagcuucugcacccagcugaauagagcccugacagggaucgccguggaacaggacaagaacacccaagagguguucgcccaagugaagcagaucuacaagaccccuccuaucaaggacuucggcggcuucaauuucagccagauucugcccgauccuagcaagcccagcaagcggagcuucaucgaggaccugcuguucaacaaagugacacuggccgacgccggcuucaucaagcaguauggcgauugucugggcgacauugccgccagggaucugauuugcgcccagaaguuuaacggacugacagugcugccuccucugcugaccgaugagaugaucgcccaguacacaucugcccugcuggccggcacaaucacaagcggcuggacauuuggagcaggcgccgcucugcagauccccuuugcuaugcagauggccuaccgguucaacggcaucggagugacccagaaugugcuguacgagaaccagaagcugaucgccaaccaguucaacagcgccaucggcaagauccaggacagccugagcagcacagcaagcgcccugggaaagcugcaggacguggucaaccagaaugcccaggcacugaacacccuggucaagcagcuguccuccaacuucggcgccaucagcucugugcugaacgauauccugagcagacuggacccuccugaggccgaggugcagaucgacagacugaucacaggcagacugcagagccuccagacauacgugacccagcagcugaucagagccgccgagauuagagccucugccaaucuggccgccaccaagaugucugagugugugcugggccagagcaagagaguggacuuuugcggcaagggcuaccaccugaugagcuucccucagucugccccucacggcgugguguuucugcacgugacauaugugcccgcucaagagaagaauuucaccaccgcuccagccaucugccacgacggcaaagcccacuuuccuagagaaggcguguucguguccaacggcacccauugguucgugacacagcggaacuucuacgagccccagaucaucaccaccgacaacaccuucgugucuggcaacugcgacgucgugaucggcauugugaacaauaccguguacgacccucugcagcccgagcuggacagcuucaaagaggaacuggacaaguacuuuaagaaccacacaagccccgacguggaccugggcgauaucagcggaaucaaugccagcgucgugaacauccagaaagagaucgaccggcugaacgagguggccaagaaucugaacgagagccugaucgaccugcaagaacuggggaaguacgagcaguacaucaaguggcccugguacaucuggcugggcuuuaucgccggacugauugccaucgugauggucacaaucaugcuguguugcaugaccagcugcuguagcugccugaagggcuguuguagcuguggcagcugcugcaaguucgacgaggacgauucugagcccgugcugaagggcgugaaacugcacuacacaugaggacuaguuauaagacugacuagcccgaugggccucccaacgggcccuccuccccuccuugcaccgagauuaauaaaaaaaaaaaaaaaaaaaaaaaaaaaaaaaaaaaaaaaaaaaaaaaaaaaaaaaaaaaaaaaaugcaucccccccccccccccccccccccccccccccaaaggcucuuuucagagccaccagaauu

SEQ ID NO: 23396 - RNA, 4039 nt, Artificial Sequence
  SARS-CoV-2/Wuhan/WIV05/2019__EPI_ISL_402128 spike protein mRNA gc mod (1-1273)(K986P_V987P_D614G_M1229I)
aggagaaagcuuaccauguucguguuccuggugcugcugccucugguguccagccagugugugaaccugaccaccagaacacagcugccuccagccuacaccaacagcuuuaccagaggcguguacuaccccgacaagguguucagauccagcgugcugcacucuacccaggaccuguuccugccuuucuucagcaacgugaccugguuccacgccauccacguguccggcaccaauggcaccaagagauucgacaaccccgugcugcccuucaacgacgggguguacuuugccagcaccgagaaguccaacaucaucagaggcuggaucuucggcaccacacuggacagcaagacccagagccugcugaucgugaacaacgccaccaacguggucaucaaagugugcgaguuccaguucugcaacgaccccuuccugggcgucuacuaccacaagaacaacaagagcuggauggaaagcgaguuccggguguacagcagcgccaacaacugcaccuucgaguacgugucccagccuuuccugauggaccuggaaggcaagcagggcaacuucaagaaccugcgcgaguucguguuuaagaacaucgacggcuacuucaagaucuacagcaagcacaccccuaucaaccucgugcgggaucugccucagggcuucucugcucuggaaccccugguggaucugcccaucggcaucaacaucacccgguuucagacacugcuggcccugcacagaagcuaccugacaccuggcgauagcagcagcggauggacagcuggugccgccgcuuacuaugugggcuaccugcagccuagaaccuuccugcugaaguacaacgagaacggcaccaucaccgacgccguggauugugcucuggauccucugagcgagacaaagugcacccugaaguccuucaccguggaaaagggcaucuaccagaccagcaacuuccgggugcagcccaccgaauccaucgugcgguuccccaauaucaccaaucugugccccuucggcgagguguucaaugccaccagauucgccucuguguacgccuggaaccggaagcggaucagcaauugcguggccgacuacuccgugcuguacaacuccgccagcuucagcaccuucaagugcuacggcguguccccuaccaagcugaacgaccugugcuucacaaacguguacgccgacagcuucgugauccggggagaugaagugcggcagauugccccuggacagacaggcaagaucgccgacuacaacuacaagcugcccgacgacuucaccggcugugugauugccuggaacagcaacaaccuggacuccaaagucggcggcaacuacaauuaccuguaccggcuguuccggaaguccaaucugaagcccuucgagcgggacaucuccaccgagaucuaucaggccggcagcaccccuuguaacggcguggaaggcuucaacugcuacuucccacugcaguccuacggcuuucagcccacaaauggcgugggcuaucagcccuacagagugguggugcugagcuucgaacugcugcaugccccugccacagugugcggcccuaagaaaagcaccaaucucgugaagaacaaaugcgugaacuucaacuucaacggccugaccggcaccggcgugcugacagagagcaacaagaaguuccugccauuccagcaguuuggccgggauaucgccgauaccacagacgccguuagagauccccagacacuggaaauccuggacaucaccccuugcagcuucggcggagugucugugaucaccccuggcaccaacaccagcaaucagguggcagugcuguaccagggcgugaacuguaccgaagugcccguggccauucacgccgaucagcugacaccuacauggcggguguacuccaccggcagcaauguguuucagaccagagccggcugucugaucggagccgagcacgugaacaauagcuacgagugcgacauccccaucggcgcuggaaucugcgccagcuaccagacacagacaaacagcccucggagagccagaagcguggccagccagagcaucauugccuacacaaugucucugggcgccgagaacagcguggccuacuccaacaacucuaucgcuauccccaccaacuucaccaucagcgugaccacagagauccugccuguguccaugaccaagaccagcguggacugcaccauguacaucugcggcgauuccaccgagugcuccaaccugcugcugcaguacggcagcuucugcacccagcugaauagagcccugacagggaucgccguggaacaggacaagaacacccaagagguguucgcccaagugaagcagaucuacaagaccccuccuaucaaggacuucggcggcuucaauuucagccagauucugcccgauccuagcaagcccagcaagcggagcuucaucgaggaccugcuguucaacaaagugacacuggccgacgccggcuucaucaagcaguauggcgauugucugggcgacauugccgccagggaucugauuugcgcccagaaguuuaacggacugacagugcugccuccucugcugaccgaugagaugaucgcccaguacacaucugcccugcuggccggcacaaucacaagcggcuggacauuuggagcaggcgccgcucugcagauccccuuugcuaugcagauggccuaccgguucaacggcaucggagugacccagaaugugcuguacgagaaccagaagcugaucgccaaccaguucaacagcgccaucggcaagauccaggacagccugagcagcacagcaagcgcccugggaaagcugcaggacguggucaaccagaaugcccaggcacugaacacccuggucaagcagcuguccuccaacuucggcgccaucagcucugugcugaacgauauccugagcagacuggacccuccugaggccgaggugcagaucgacagacugaucacaggcagacugcagagccuccagacauacgugacccagcagcugaucagagccgccgagauuagagccucugccaaucuggccgccaccaagaugucugagugugugcugggccagagcaagagaguggacuuuugcggcaagggcuaccaccugaugagcuucccucagucugccccucacggcgugguguuucugcacgugacauaugugcccgcucaagagaagaauuucaccaccgcuccagccaucugccacgacggcaaagcccacuuuccuagagaaggcguguucguguccaacggcacccauugguucgugacacagcggaacuucuacgagccccagaucaucaccaccgacaacaccuucgugucuggcaacugcgacgucgugaucggcauugugaacaauaccguguacgacccucugcagcccgagcuggacagcuucaaagaggaacuggacaaguacuuuaagaaccacacaagccccgacguggaccugggcgauaucagcggaaucaaugccagcgucgugaacauccagaaagagaucgaccggcugaacgagguggccaagaaucugaacgagagccugaucgaccugcaagaacuggggaaguacgagcaguacaucaaguggcccugguacaucuggcugggcuuuaucgccggacugauugccaucgugaucgucacaaucaugcuguguugcaugaccagcugcuguagcugccugaagggcuguuguagcuguggcagcugcugcaaguucgacgaggacgauucugagcccgugcugaagggcgugaaacugcacuacacaugaggacuaguuauaagacugacuagcccgaugggccucccaacgggcccuccuccccuccuugcaccgagauuaauaaaaaaaaaaaaaaaaaaaaaaaaaaaaaaaaaaaaaaaaaaaaaaaaaaaaaaaaaaaaaaaaugcaucccccccccccccccccccccccccccccccaaaggcucuuuucagagccaccagaauu

SEQ ID NO: 23397 - RNA, 4033 nt, Artificial Sequence
  SARS-CoV-2/Wuhan/WIV05/2019__EPI_ISL_402128 spike protein mRNA gc mod (1-1273)(K986P_V987P_H69del_V70del_A222V_Y453F_S477N_D614G_I692V)
aggagaaagcuuaccauguucguguuccuggugcugcugccucugguguccagccagugugugaaccugaccaccagaacacagcugccuccagccuacaccaacagcuuuaccagaggcguguacuaccccgacaagguguucagauccagcgugcugcacucuacccaggaccuguuccugccuuucuucagcaacgugaccugguuccacgccaucuccggcaccaauggcaccaagagauucgacaaccccgugcugcccuucaacgacgggguguacuuugccagcaccgagaaguccaacaucaucagaggcuggaucuucggcaccacacuggacagcaagacccagagccugcugaucgugaacaacgccaccaacguggucaucaaagugugcgaguuccaguucugcaacgaccccuuccugggcgucuacuaccacaagaacaacaagagcuggauggaaagcgaguuccggguguacagcagcgccaacaacugcaccuucgaguacgugucccagccuuuccugauggaccuggaaggcaagcagggcaacuucaagaaccugcgcgaguucguguuuaagaacaucgacggcuacuucaagaucuacagcaagcacaccccuaucaaccucgugcgggaucugccucagggcuucucugugcuggaaccccugguggaucugcccaucggcaucaacaucacccgguuucagacacugcuggcccugcacagaagcuaccugacaccuggcgauagcagcagcggauggacagcuggugccgccgcuuacuaugugggcuaccugcagccuagaaccuuccugcugaaguacaacgagaacggcaccaucaccgacgccguggauugugcucuggauccucugagcgagacaaagugcacccugaaguccuucaccguggaaaagggcaucuaccagaccagcaacuuccgggugcagcccaccgaauccaucgugcgguuccccaauaucaccaaucugugccccuucggcgagguguucaaugccaccagauucgccucuguguacgccuggaaccggaagcggaucagcaauugcguggccgacuacuccgugcuguacaacuccgccagcuucagcaccuucaagugcuacggcguguccccuaccaagcugaacgaccugugcuucacaaacguguacgccgacagcuucgugauccggggagaugaagugcggcagauugccccuggacagacaggcaagaucgccgacuacaacuacaagcugcccgacgacuucaccggcugugugauugccuggaacagcaacaaccuggacuccaaagucggcggcaacuacaauuaccuguuccggcuguuccggaaguccaaucugaagcccuucgagcgggacaucuccaccgagaucuaucaggccggcaacaccccuuguaacggcguggaaggcuucaacugcuacuucccacugcaguccuacggcuuucagcccacaaauggcgugggcuaucagcccuacagagugguggugcugagcuucgaacugcugcaugccccugccacagugugcggcccuaagaaaagcaccaaucucgugaagaacaaaugcgugaacuucaacuucaacggccugaccggcaccggcgugcugacagagagcaacaagaaguuccugccauuccagcaguuuggccgggauaucgccgauaccacagacgccguuagagauccccagacacuggaaauccuggacaucaccccuugcagcuucggcggagugucugugaucaccccuggcaccaacaccagcaaucagguggcagugcuguaccagggcgugaacuguaccgaagugcccguggccauucacgccgaucagcugacaccuacauggcggguguacuccaccggcagcaauguguuucagaccagagccggcugucugaucggagccgagcacgugaacaauagcuacgagugcgacauccccaucggcgcuggaaucugcgccagcuaccagacacagacaaacagcccucggagagccagaagcguggccagccagagcgugauugccuacacaaugucucugggcgccgagaacagcguggccuacuccaacaacucuaucgcuauccccaccaacuucaccaucagcgugaccacagagauccugccuguguccaugaccaagaccagcguggacugcaccauguacaucugcggcgauuccaccgagugcuccaaccugcugcugcaguacggcagcuucugcacccagcugaauagagcccugacagggaucgccguggaacaggacaagaacacccaagagguguucgcccaagugaagcagaucuacaagaccccuccuaucaaggacuucggcggcuucaauuucagccagauucugcccgauccuagcaagcccagcaagcggagcuucaucgaggaccugcuguucaacaaagugacacuggccgacgccggcuucaucaagcaguauggcgauugucugggcgacauugccgccagggaucugauuugcgcccagaaguuuaacggacugacagugcugccuccucugcugaccgaugagaugaucgcccaguacacaucugcccugcuggccggcacaaucacaagcggcuggacauuuggagcaggcgccgcucugcagauccccuuugcuaugcagauggccuaccgguucaacggcaucggagugacccagaaugugcuguacgagaaccagaagcugaucgccaaccaguucaacagcgccaucggcaagauccaggacagccugagcagcacagcaagcgcccugggaaagcugcaggacguggucaaccagaaugcccaggcacugaacacccuggucaagcagcuguccuccaacuucggcgccaucagcucugugcugaacgauauccugagcagacuggacccuccugaggccgaggugcagaucgacagacugaucacaggcagacugcagagccuccagacauacgugacccagcagcugaucagagccgccgagauuagagccucugccaaucuggccgccaccaagaugucugagugugugcugggccagagcaagagaguggacuuuugcggcaagggcuaccaccugaugagcuucccucagucugccccucacggcgugguguuucugcacgugacauaugugcccgcucaagagaagaauuucaccaccgcuccagccaucugccacgacggcaaagcccacuuuccuagagaaggcguguucguguccaacggcacccauugguucgugacacagcggaacuucuacgagccccagaucaucaccaccgacaacaccuucgugucuggcaacugcgacgucgugaucggcauugugaacaauaccguguacgacccucugcagcccgagcuggacagcuucaaagaggaacuggacaaguacuuuaagaaccacacaagccccgacguggaccugggcgauaucagcggaaucaaugccagcgucgugaacauccagaaagagaucgaccggcugaacgagguggccaagaaucugaacgagagccugaucgaccugcaagaacuggggaaguacgagcaguacaucaaguggcccugguacaucuggcugggcuuuaucgccggacugauugccaucgugauggucacaaucaugcuguguugcaugaccagcugcuguagcugccugaagggcuguuguagcuguggcagcugcugcaaguucgacgaggacgauucugagcccgugcugaagggcgugaaacugcacuacacaugaggacuaguuauaagacugacuagcccgaugggccucccaacgggcccuccuccccuccuugcaccgagauuaauaaaaaaaaaaaaaaaaaaaaaaaaaaaaaaaaaaaaaaaaaaaaaaaaaaaaaaaaaaaaaaaaugcaucccccccccccccccccccccccccccccccaaaggcucuuuucagagccaccagaauu

SEQ ID NO: 23398 - RNA, 4033 nt, Artificial Sequence
  SARS-CoV-2/Wuhan/WIV05/2019__EPI_ISL_402128 spike protein mRNA gc mod (1-1273)(K986P_V987P_H69del_V70del_Y453F_D614G_I692V_M1229I)
aggagaaagcuuaccauguucguguuccuggugcugcugccucugguguccagccagugugugaaccugaccaccagaacacagcugccuccagccuacaccaacagcuuuaccagaggcguguacuaccccgacaagguguucagauccagcgugcugcacucuacccaggaccuguuccugccuuucuucagcaacgugaccugguuccacgccaucuccggcaccaauggcaccaagagauucgacaaccccgugcugcccuucaacgacgggguguacuuugccagcaccgagaaguccaacaucaucagaggcuggaucuucggcaccacacuggacagcaagacccagagccugcugaucgugaacaacgccaccaacguggucaucaaagugugcgaguuccaguucugcaacgaccccuuccugggcgucuacuaccacaagaacaacaagagcuggauggaaagcgaguuccggguguacagcagcgccaacaacugcaccuucgaguacgugucccagccuuuccugauggaccuggaaggcaagcagggcaacuucaagaaccugcgcgaguucguguuuaagaacaucgacggcuacuucaagaucuacagcaagcacaccccuaucaaccucgugcgggaucugccucagggcuucucugcucuggaaccccugguggaucugcccaucggcaucaacaucacccgguuucagacacugcuggcccugcacagaagcuaccugacaccuggcgauagcagcagcggauggacagcuggugccgccgcuuacuaugugggcuaccugcagccuagaaccuuccugcugaaguacaacgagaacggcaccaucaccgacgccguggauugugcucuggauccucugagcgagacaaagugcacccugaaguccuucaccguggaaaagggcaucuaccagaccagcaacuuccgggugcagcccaccgaauccaucgugcgguuccccaauaucaccaaucugugccccuucggcgagguguucaaugccaccagauucgccucuguguacgccuggaaccggaagcggaucagcaauugcguggccgacuacuccgugcuguacaacuccgccagcuucagcaccuucaagugcuacggcguguccccuaccaagcugaacgaccugugcuucacaaacguguacgccgacagcuucgugauccggggagaugaagugcggcagauugccccuggacagacaggcaagaucgccgacuacaacuacaagcugcccgacgacuucaccggcugugugauugccuggaacagcaacaaccuggacuccaaagucggcggcaacuacaauuaccuguuccggcuguuccggaaguccaaucugaagcccuucgagcgggacaucuccaccgagaucuaucaggccggcagcaccccuuguaacggcguggaaggcuucaacugcuacuucccacugcaguccuacggcuuucagcccacaaauggcgugggcuaucagcccuacagagugguggugcugagcuucgaacugcugcaugccccugccacagugugcggcccuaagaaaagcaccaaucucgugaagaacaaaugcgugaacuucaacuucaacggccugaccggcaccggcgugcugacagagagcaacaagaaguuccugccauuccagcaguuuggccgggauaucgccgauaccacagacgccguuagagauccccagacacuggaaauccuggacaucaccccuugcagcuucggcggagugucugugaucaccccuggcaccaacaccagcaaucagguggcagugcuguaccagggcgugaacuguaccgaagugcccguggccauucacgccgaucagcugacaccuacauggcggguguacuccaccggcagcaauguguuucagaccagagccggcugucugaucggagccgagcacgugaacaauagcuacgagugcgacauccccaucggcgcuggaaucugcgccagcuaccagacacagacaaacagcccucggagagccagaagcguggccagccagagcgugauugccuacacaaugucucugggcgccgagaacagcguggccuacuccaacaacucuaucgcuauccccaccaacuucaccaucagcgugaccacagagauccugccuguguccaugaccaagaccagcguggacugcaccauguacaucugcggcgauuccaccgagugcuccaaccugcugcugcaguacggcagcuucugcacccagcugaauagagcccugacagggaucgccguggaacaggacaagaacacccaagagguguucgcccaagugaagcagaucuacaagaccccuccuaucaaggacuucggcggcuucaauuucagccagauucugcccgauccuagcaagcccagcaagcggagcuucaucgaggaccugcuguucaacaaagugacacuggccgacgccggcuucaucaagcaguauggcgauugucugggcgacauugccgccagggaucugauuugcgcccagaaguuuaacggacugacagugcugccuccucugcugaccgaugagaugaucgcccaguacacaucugcccugcuggccggcacaaucacaagcggcuggacauuuggagcaggcgccgcucugcagauccccuuugcuaugcagauggccuaccgguucaacggcaucggagugacccagaaugugcuguacgagaaccagaagcugaucgccaaccaguucaacagcgccaucggcaagauccaggacagccugagcagcacagcaagcgcccugggaaagcugcaggacguggucaaccagaaugcccaggcacugaacacccuggucaagcagcuguccuccaacuucggcgccaucagcucugugcugaacgauauccugagcagacuggacccuccugaggccgaggugcagaucgacagacugaucacaggcagacugcagagccuccagacauacgugacccagcagcugaucagagccgccgagauuagagccucugccaaucuggccgccaccaagaugucugagugugugcugggccagagcaagagaguggacuuuugcggcaagggcuaccaccugaugagcuucccucagucugccccucacggcgugguguuucugcacgugacauaugugcccgcucaagagaagaauuucaccaccgcuccagccaucugccacgacggcaaagcccacuuuccuagagaaggcguguucguguccaacggcacccauugguucgugacacagcggaacuucuacgagccccagaucaucaccaccgacaacaccuucgugucuggcaacugcgacgucgugaucggcauugugaacaauaccguguacgacccucugcagcccgagcuggacagcuucaaagaggaacuggacaaguacuuuaagaaccacacaagccccgacguggaccugggcgauaucagcggaaucaaugccagcgucgugaacauccagaaagagaucgaccggcugaacgagguggccaagaaucugaacgagagccugaucgaccugcaagaacuggggaaguacgagcaguacaucaaguggcccugguacaucuggcugggcuuuaucgccggacugauugccaucgugaucgucacaaucaugcuguguugcaugaccagcugcuguagcugccugaagggcuguuguagcuguggcagcugcugcaaguucgacgaggacgauucugagcccgugcugaagggcgugaaacugcacuacacaugaggacuaguuauaagacugacuagcccgaugggccucccaacgggcccuccuccccuccuugcaccgagauuaauaaaaaaaaaaaaaaaaaaaaaaaaaaaaaaaaaaaaaaaaaaaaaaaaaaaaaaaaaaaaaaaaugcaucccccccccccccccccccccccccccccccaaaggcucuuuucagagccaccagaauu

SEQ ID NO: 23399 - RNA, 4030 nt, Artificial Sequence
  SARS-CoV-2/Wuhan/WIV05/2019__EPI_ISL_402128 spike protein mRNA gc mod (1-1273)(K986P_V987P_K986P_V987P_H69del_V70del_Y144del_N501Y_A570 D_D614G_P681H_T716I_S982A_D1118H)
aggagaaagcuuaccauguucguguuccuggugcugcugccucugguguccagccagugugugaaccugaccaccagaacacagcugccuccagccuacaccaacagcuuuaccagaggcguguacuaccccgacaagguguucagauccagcgugcugcacucuacccaggaccuguuccugccuuucuucagcaacgugaccugguuccacgccaucuccggcaccaauggcaccaagagauucgacaaccccgugcugcccuucaacgacgggguguacuuugccagcaccgagaaguccaacaucaucagaggcuggaucuucggcaccacacuggacagcaagacccagagccugcugaucgugaacaacgccaccaacguggucaucaaagugugcgaguuccaguucugcaacgaccccuuccugggcgucuaccacaagaacaacaagagcuggauggaaagcgaguuccggguguacagcagcgccaacaacugcaccuucgaguacgugucccagccuuuccugauggaccuggaaggcaagcagggcaacuucaagaaccugcgcgaguucguguuuaagaacaucgacggcuacuucaagaucuacagcaagcacaccccuaucaaccucgugcgggaucugccucagggcuucucugcucuggaaccccugguggaucugcccaucggcaucaacaucacccgguuucagacacugcuggcccugcacagaagcuaccugacaccuggcgauagcagcagcggauggacagcuggugccgccgcuuacuaugugggcuaccugcagccuagaaccuuccugcugaaguacaacgagaacggcaccaucaccgacgccguggauugugcucuggauccucugagcgagacaaagugcacccugaaguccuucaccguggaaaagggcaucuaccagaccagcaacuuccgggugcagcccaccgaauccaucgugcgguuccccaauaucaccaaucugugccccuucggcgagguguucaaugccaccagauucgccucuguguacgccuggaaccggaagcggaucagcaauugcguggccgacuacuccgugcuguacaacuccgccagcuucagcaccuucaagugcuacggcguguccccuaccaagcugaacgaccugugcuucacaaacguguacgccgacagcuucgugauccggggagaugaagugcggcagauugccccuggacagacaggcaagaucgccgacuacaacuacaagcugcccgacgacuucaccggcugugugauugccuggaacagcaacaaccuggacuccaaagucggcggcaacuacaauuaccuguaccggcuguuccggaaguccaaucugaagcccuucgagcgggacaucuccaccgagaucuaucaggccggcagcaccccuuguaacggcguggaaggcuucaacugcuacuucccacugcaguccuacggcuuucagcccacauacggcgugggcuaucagcccuacagagugguggugcugagcuucgaacugcugcaugccccugccacagugugcggcccuaagaaaagcaccaaucucgugaagaacaaaugcgugaacuucaacuucaacggccugaccggcaccggcgugcugacagagagcaacaagaaguuccugccauuccagcaguuuggccgggauaucgacgauaccacagacgccguuagagauccccagacacuggaaauccuggacaucaccccuugcagcuucggcggagugucugugaucaccccuggcaccaacaccagcaaucagguggcagugcuguaccagggcgugaacuguaccgaagugcccguggccauucacgccgaucagcugacaccuacauggcggguguacuccaccggcagcaauguguuucagaccagagccggcugucugaucggagccgagcacgugaacaauagcuacgagugcgacauccccaucggcgcuggaaucugcgccagcuaccagacacagacaaacagccaccggagagccagaagcguggccagccagagcaucauugccuacacaaugucucugggcgccgagaacagcguggccuacuccaacaacucuaucgcuauccccaucaacuucaccaucagcgugaccacagagauccugccuguguccaugaccaagaccagcguggacugcaccauguacaucugcggcgauuccaccgagugcuccaaccugcugcugcaguacggcagcuucugcacccagcugaauagagcccugacagggaucgccguggaacaggacaagaacacccaagagguguucgcccaagugaagcagaucuacaagaccccuccuaucaaggacuucggcggcuucaauuucagccagauucugcccgauccuagcaagcccagcaagcggagcuucaucgaggaccugcuguucaacaaagugacacuggccgacgccggcuucaucaagcaguauggcgauugucugggcgacauugccgccagggaucugauuugcgcccagaaguuuaacggacugacagugcugccuccucugcugaccgaugagaugaucgcccaguacacaucugcccugcuggccggcacaaucacaagcggcuggacauuuggagcaggcgccgcucugcagauccccuuugcuaugcagauggccuaccgguucaacggcaucggagugacccagaaugugcuguacgagaaccagaagcugaucgccaaccaguucaacagcgccaucggcaagauccaggacagccugagcagcacagcaagcgcccugggaaagcugcaggacguggucaaccagaaugcccaggcacugaacacccuggucaagcagcuguccuccaacuucggcgccaucagcucugugcugaacgauauccuggccagacuggacccuccugaggccgaggugcagaucgacagacugaucacaggcagacugcagagccuccagacauacgugacccagcagcugaucagagccgccgagauuagagccucugccaaucuggccgccaccaagaugucugagugugugcugggccagagcaagagaguggacuuuugcggcaagggcuaccaccugaugagcuucccucagucugccccucacggcgugguguuucugcacgugacauaugugcccgcucaagagaagaauuucaccaccgcuccagccaucugccacgacggcaaagcccacuuuccuagagaaggcguguucguguccaacggcacccauugguucgugacacagcggaacuucuacgagccccagaucaucaccacccacaacaccuucgugucuggcaacugcgacgucgugaucggcauugugaacaauaccguguacgacccucugcagcccgagcuggacagcuucaaagaggaacuggacaaguacuuuaagaaccacacaagccccgacguggaccugggcgauaucagcggaaucaaugccagcgucgugaacauccagaaagagaucgaccggcugaacgagguggccaagaaucugaacgagagccugaucgaccugcaagaacuggggaaguacgagcaguacaucaaguggcccugguacaucuggcugggcuuuaucgccggacugauugccaucgugauggucacaaucaugcuguguugcaugaccagcugcuguagcugccugaagggcuguuguagcuguggcagcugcugcaaguucgacgaggacgauucugagcccgugcugaagggcgugaaacugcacuacacaugaggacuaguuauaagacugacuagcccgaugggccucccaacgggcccuccuccccuccuugcaccgagauuaauaaaaaaaaaaaaaaaaaaaaaaaaaaaaaaaaaaaaaaaaaaaaaaaaaaaaaaaaaaaaaaaaugcaucccccccccccccccccccccccccccccccaaaggcucuuuucagagccaccagaauu

SEQ ID NO: 23400 - RNA, 4039 nt, Artificial Sequence
  SARS-CoV-2/Wuhan/WIV05/2019__EPI_ISL_402128 spike protein mRNA gc mod (1-1273)(K986P_V987P_K986P_V987P_K417N_E484K_N501Y_D614G)
aggagaaagcuuaccauguucguguuccuggugcugcugccucugguguccagccagugugugaaccugaccaccagaacacagcugccuccagccuacaccaacagcuuuaccagaggcguguacuaccccgacaagguguucagauccagcgugcugcacucuacccaggaccuguuccugccuuucuucagcaacgugaccugguuccacgccauccacguguccggcaccaauggcaccaagagauucgacaaccccgugcugcccuucaacgacgggguguacuuugccagcaccgagaaguccaacaucaucagaggcuggaucuucggcaccacacuggacagcaagacccagagccugcugaucgugaacaacgccaccaacguggucaucaaagugugcgaguuccaguucugcaacgaccccuuccugggcgucuacuaccacaagaacaacaagagcuggauggaaagcgaguuccggguguacagcagcgccaacaacugcaccuucgaguacgugucccagccuuuccugauggaccuggaaggcaagcagggcaacuucaagaaccugcgcgaguucguguuuaagaacaucgacggcuacuucaagaucuacagcaagcacaccccuaucaaccucgugcgggaucugccucagggcuucucugcucuggaaccccugguggaucugcccaucggcaucaacaucacccgguuucagacacugcuggcccugcacagaagcuaccugacaccuggcgauagcagcagcggauggacagcuggugccgccgcuuacuaugugggcuaccugcagccuagaaccuuccugcugaaguacaacgagaacggcaccaucaccgacgccguggauugugcucuggauccucugagcgagacaaagugcacccugaaguccuucaccguggaaaagggcaucuaccagaccagcaacuuccgggugcagcccaccgaauccaucgugcgguuccccaauaucaccaaucugugccccuucggcgagguguucaaugccaccagauucgccucuguguacgccuggaaccggaagcggaucagcaauugcguggccgacuacuccgugcuguacaacuccgccagcuucagcaccuucaagugcuacggcguguccccuaccaagcugaacgaccugugcuucacaaacguguacgccgacagcuucgugauccggggagaugaagugcggcagauugccccuggacagacaggcaacaucgccgacuacaacuacaagcugcccgacgacuucaccggcugugugauugccuggaacagcaacaaccuggacuccaaagucggcggcaacuacaauuaccuguaccggcuguuccggaaguccaaucugaagcccuucgagcgggacaucuccaccgagaucuaucaggccggcagcaccccuuguaacggcgugaagggcuucaacugcuacuucccacugcaguccuacggcuuucagcccacauacggcgugggcuaucagcccuacagagugguggugcugagcuucgaacugcugcaugccccugccacagugugcggcccuaagaaaagcaccaaucucgugaagaacaaaugcgugaacuucaacuucaacggccugaccggcaccggcgugcugacagagagcaacaagaaguuccugccauuccagcaguuuggccgggauaucgccgauaccacagacgccguuagagauccccagacacuggaaauccuggacaucaccccuugcagcuucggcggagugucugugaucaccccuggcaccaacaccagcaaucagguggcagugcuguaccagggcgugaacuguaccgaagugcccguggccauucacgccgaucagcugacaccuacauggcggguguacuccaccggcagcaauguguuucagaccagagccggcugucugaucggagccgagcacgugaacaauagcuacgagugcgacauccccaucggcgcuggaaucugcgccagcuaccagacacagacaaacagcccucggagagccagaagcguggccagccagagcaucauugccuacacaaugucucugggcgccgagaacagcguggccuacuccaacaacucuaucgcuauccccaccaacuucaccaucagcgugaccacagagauccugccuguguccaugaccaagaccagcguggacugcaccauguacaucugcggcgauuccaccgagugcuccaaccugcugcugcaguacggcagcuucugcacccagcugaauagagcccugacagggaucgccguggaacaggacaagaacacccaagagguguucgcccaagugaagcagaucuacaagaccccuccuaucaaggacuucggcggcuucaauuucagccagauucugcccgauccuagcaagcccagcaagcggagcuucaucgaggaccugcuguucaacaaagugacacuggccgacgccggcuucaucaagcaguauggcgauugucugggcgacauugccgccagggaucugauuugcgcccagaaguuuaacggacugacagugcugccuccucugcugaccgaugagaugaucgcccaguacacaucugcccugcuggccggcacaaucacaagcggcuggacauuuggagcaggcgccgcucugcagauccccuuugcuaugcagauggccuaccgguucaacggcaucggagugacccagaaugugcuguacgagaaccagaagcugaucgccaaccaguucaacagcgccaucggcaagauccaggacagccugagcagcacagcaagcgcccugggaaagcugcaggacguggucaaccagaaugcccaggcacugaacacccuggucaagcagcuguccuccaacuucggcgccaucagcucugugcugaacgauauccugagcagacuggacccuccugaggccgaggugcagaucgacagacugaucacaggcagacugcagagccuccagacauacgugacccagcagcugaucagagccgccgagauuagagccucugccaaucuggccgccaccaagaugucugagugugugcugggccagagcaagagaguggacuuuugcggcaagggcuaccaccugaugagcuucccucagucugccccucacggcgugguguuucugcacgugacauaugugcccgcucaagagaagaauuucaccaccgcuccagccaucugccacgacggcaaagcccacuuuccuagagaaggcguguucguguccaacggcacccauugguucgugacacagcggaacuucuacgagccccagaucaucaccaccgacaacaccuucgugucuggcaacugcgacgucgugaucggcauugugaacaauaccguguacgacccucugcagcccgagcuggacagcuucaaagaggaacuggacaaguacuuuaagaaccacacaagccccgacguggaccugggcgauaucagcggaaucaaugccagcgucgugaacauccagaaagagaucgaccggcugaacgagguggccaagaaucugaacgagagccugaucgaccugcaagaacuggggaaguacgagcaguacaucaaguggcccugguacaucuggcugggcuuuaucgccggacugauugccaucgugauggucacaaucaugcuguguugcaugaccagcugcuguagcugccugaagggcuguuguagcuguggcagcugcugcaaguucgacgaggacgauucugagcccgugcugaagggcgugaaacugcacuacacaugaggacuaguuauaagacugacuagcccgaugggccucccaacgggcccuccuccccuccuugcaccgagauuaauaaaaaaaaaaaaaaaaaaaaaaaaaaaaaaaaaaaaaaaaaaaaaaaaaaaaaaaaaaaaaaaaugcaucccccccccccccccccccccccccccccccaaaggcucuuuucagagccaccagaauu

SEQ ID NO: 23401 - RNA, 4030 nt, Artificial Sequence
  SARS-CoV-2/Wuhan/WIV05/2019__EPI_ISL_402128 spike protein mRNA gc mod (1-1273)(K986P_V987P_K986P_V987P_L18F_D80A_D215G_L242del_A243del_ L244del_R246I_K417N_E484K_N501Y_D614G_A701V)
aggagaaagcuuaccauguucguguuccuggugcugcugccucugguguccagccagugugugaacuucaccaccagaacacagcugccuccagccuacaccaacagcuuuaccagaggcguguacuaccccgacaagguguucagauccagcgugcugcacucuacccaggaccuguuccugccuuucuucagcaacgugaccugguuccacgccauccacguguccggcaccaauggcaccaagagauucgccaaccccgugcugcccuucaacgacgggguguacuuugccagcaccgagaaguccaacaucaucagaggcuggaucuucggcaccacacuggacagcaagacccagagccugcugaucgugaacaacgccaccaacguggucaucaaagugugcgaguuccaguucugcaacgaccccuuccugggcgucuacuaccacaagaacaacaagagcuggauggaaagcgaguuccggguguacagcagcgccaacaacugcaccuucgaguacgugucccagccuuuccugauggaccuggaaggcaagcagggcaacuucaagaaccugcgcgaguucguguuuaagaacaucgacggcuacuucaagaucuacagcaagcacaccccuaucaaccucgugcggggccugccucagggcuucucugcucuggaaccccugguggaucugcccaucggcaucaacaucacccgguuucagacacugcacaucagcuaccugacaccuggcgauagcagcagcggauggacagcuggugccgccgcuuacuaugugggcuaccugcagccuagaaccuuccugcugaaguacaacgagaacggcaccaucaccgacgccguggauugugcucuggauccucugagcgagacaaagugcacccugaaguccuucaccguggaaaagggcaucuaccagaccagcaacuuccgggugcagcccaccgaauccaucgugcgguuccccaauaucaccaaucugugccccuucggcgagguguucaaugccaccagauucgccucuguguacgccuggaaccggaagcggaucagcaauugcguggccgacuacuccgugcuguacaacuccgccagcuucagcaccuucaagugcuacggcguguccccuaccaagcugaacgaccugugcuucacaaacguguacgccgacagcuucgugauccggggagaugaagugcggcagauugccccuggacagacaggcaacaucgccgacuacaacuacaagcugcccgacgacuucaccggcugugugauugccuggaacagcaacaaccuggacuccaaagucggcggcaacuacaauuaccuguaccggcuguuccggaaguccaaucugaagcccuucgagcgggacaucuccaccgagaucuaucaggccggcagcaccccuuguaacggcgugaagggcuucaacugcuacuucccacugcaguccuacggcuuucagcccacauacggcgugggcuaucagcccuacagagugguggugcugagcuucgaacugcugcaugccccugccacagugugcggcccuaagaaaagcaccaaucucgugaagaacaaaugcgugaacuucaacuucaacggccugaccggcaccggcgugcugacagagagcaacaagaaguuccugccauuccagcaguuuggccgggauaucgccgauaccacagacgccguuagagauccccagacacuggaaauccuggacaucaccccuugcagcuucggcggagugucugugaucaccccuggcaccaacaccagcaaucagguggcagugcuguaccagggcgugaacuguaccgaagugcccguggccauucacgccgaucagcugacaccuacauggcggguguacuccaccggcagcaauguguuucagaccagagccggcugucugaucggagccgagcacgugaacaauagcuacgagugcgacauccccaucggcgcuggaaucugcgccagcuaccagacacagacaaacagcccucggagagccagaagcguggccagccagagcaucauugccuacacaaugucucugggcguggagaacagcguggccuacuccaacaacucuaucgcuauccccaccaacuucaccaucagcgugaccacagagauccugccuguguccaugaccaagaccagcguggacugcaccauguacaucugcggcgauuccaccgagugcuccaaccugcugcugcaguacggcagcuucugcacccagcugaauagagcccugacagggaucgccguggaacaggacaagaacacccaagagguguucgcccaagugaagcagaucuacaagaccccuccuaucaaggacuucggcggcuucaauuucagccagauucugcccgauccuagcaagcccagcaagcggagcuucaucgaggaccugcuguucaacaaagugacacuggccgacgccggcuucaucaagcaguauggcgauugucugggcgacauugccgccagggaucugauuugcgcccagaaguuuaacggacugacagugcugccuccucugcugaccgaugagaugaucgcccaguacacaucugcccugcuggccggcacaaucacaagcggcuggacauuuggagcaggcgccgcucugcagauccccuuugcuaugcagauggccuaccgguucaacggcaucggagugacccagaaugugcuguacgagaaccagaagcugaucgccaaccaguucaacagcgccaucggcaagauccaggacagccugagcagcacagcaagcgcccugggaaagcugcaggacguggucaaccagaaugcccaggcacugaacacccuggucaagcagcuguccuccaacuucggcgccaucagcucugugcugaacgauauccugagcagacuggacccuccugaggccgaggugcagaucgacagacugaucacaggcagacugcagagccuccagacauacgugacccagcagcugaucagagccgccgagauuagagccucugccaaucuggccgccaccaagaugucugagugugugcugggccagagcaagagaguggacuuuugcggcaagggcuaccaccugaugagcuucccucagucugccccucacggcgugguguuucugcacgugacauaugugcccgcucaagagaagaauuucaccaccgcuccagccaucugccacgacggcaaagcccacuuuccuagagaaggcguguucguguccaacggcacccauugguucgugacacagcggaacuucuacgagccccagaucaucaccaccgacaacaccuucgugucuggcaacugcgacgucgugaucggcauugugaacaauaccguguacgacccucugcagcccgagcuggacagcuucaaagaggaacuggacaaguacuuuaagaaccacacaagccccgacguggaccugggcgauaucagcggaaucaaugccagcgucgugaacauccagaaagagaucgaccggcugaacgagguggccaagaaucugaacgagagccugaucgaccugcaagaacuggggaaguacgagcaguacaucaaguggcccugguacaucuggcugggcuuuaucgccggacugauugccaucgugauggucacaaucaugcuguguugcaugaccagcugcuguagcugccugaagggcuguuguagcuguggcagcugcugcaaguucgacgaggacgauucugagcccgugcugaagggcgugaaacugcacuacacaugaggacuaguuauaagacugacuagcccgaugggccucccaacgggcccuccuccccuccuugcaccgagauuaauaaaaaaaaaaaaaaaaaaaaaaaaaaaaaaaaaaaaaaaaaaaaaaaaaaaaaaaaaaaaaaaaugcaucccccccccccccccccccccccccccccccaaaggcucuuuucagagccaccagaauu

SEQ ID NO: 23402 - RNA, 4039 nt, Artificial Sequence
  SARS-CoV-2/Wuhan/WIV05/2019__EPI_ISL_402128 spike protein mRNA gc mod (1-1273)(K986P_V987P_K986P_V987P_E484K_D614G)
aggagaaagcuuaccauguucguguuccuggugcugcugccucugguguccagccagugugugaaccugaccaccagaacacagcugccuccagccuacaccaacagcuuuaccagaggcguguacuaccccgacaagguguucagauccagcgugcugcacucuacccaggaccuguuccugccuuucuucagcaacgugaccugguuccacgccauccacguguccggcaccaauggcaccaagagauucgacaaccccgugcugcccuucaacgacgggguguacuuugccagcaccgagaaguccaacaucaucagaggcuggaucuucggcaccacacuggacagcaagacccagagccugcugaucgugaacaacgccaccaacguggucaucaaagugugcgaguuccaguucugcaacgaccccuuccugggcgucuacuaccacaagaacaacaagagcuggauggaaagcgaguuccggguguacagcagcgccaacaacugcaccuucgaguacgugucccagccuuuccugauggaccuggaaggcaagcagggcaacuucaagaaccugcgcgaguucguguuuaagaacaucgacggcuacuucaagaucuacagcaagcacaccccuaucaaccucgugcgggaucugccucagggcuucucugcucuggaaccccugguggaucugcccaucggcaucaacaucacccgguuucagacacugcuggcccugcacagaagcuaccugacaccuggcgauagcagcagcggauggacagcuggugccgccgcuuacuaugugggcuaccugcagccuagaaccuuccugcugaaguacaacgagaacggcaccaucaccgacgccguggauugugcucuggauccucugagcgagacaaagugcacccugaaguccuucaccguggaaaagggcaucuaccagaccagcaacuuccgggugcagcccaccgaauccaucgugcgguuccccaauaucaccaaucugugccccuucggcgagguguucaaugccaccagauucgccucuguguacgccuggaaccggaagcggaucagcaauugcguggccgacuacuccgugcuguacaacuccgccagcuucagcaccuucaagugcuacggcguguccccuaccaagcugaacgaccugugcuucacaaacguguacgccgacagcuucgugauccggggagaugaagugcggcagauugccccuggacagacaggcaagaucgccgacuacaacuacaagcugcccgacgacuucaccggcugugugauugccuggaacagcaacaaccuggacuccaaagucggcggcaacuacaauuaccuguaccggcuguuccggaaguccaaucugaagcccuucgagcgggacaucuccaccgagaucuaucaggccggcagcaccccuuguaacggcgugaagggcuucaacugcuacuucccacugcaguccuacggcuuucagcccacaaauggcgugggcuaucagcccuacagagugguggugcugagcuucgaacugcugcaugccccugccacagugugcggcccuaagaaaagcaccaaucucgugaagaacaaaugcgugaacuucaacuucaacggccugaccggcaccggcgugcugacagagagcaacaagaaguuccugccauuccagcaguuuggccgggauaucgccgauaccacagacgccguuagagauccccagacacuggaaauccuggacaucaccccuugcagcuucggcggagugucugugaucaccccuggcaccaacaccagcaaucagguggcagugcuguaccagggcgugaacuguaccgaagugcccguggccauucacgccgaucagcugacaccuacauggcggguguacuccaccggcagcaauguguuucagaccagagccggcugucugaucggagccgagcacgugaacaauagcuacgagugcgacauccccaucggcgcuggaaucugcgccagcuaccagacacagacaaacagcccucggagagccagaagcguggccagccagagcaucauugccuacacaaugucucugggcgccgagaacagcguggccuacuccaacaacucuaucgcuauccccaccaacuucaccaucagcgugaccacagagauccugccuguguccaugaccaagaccagcguggacugcaccauguacaucugcggcgauuccaccgagugcuccaaccugcugcugcaguacggcagcuucugcacccagcugaauagagcccugacagggaucgccguggaacaggacaagaacacccaagagguguucgcccaagugaagcagaucuacaagaccccuccuaucaaggacuucggcggcuucaauuucagccagauucugcccgauccuagcaagcccagcaagcggagcuucaucgaggaccugcuguucaacaaagugacacuggccgacgccggcuucaucaagcaguauggcgauugucugggcgacauugccgccagggaucugauuugcgcccagaaguuuaacggacugacagugcugccuccucugcugaccgaugagaugaucgcccaguacacaucugcccugcuggccggcacaaucacaagcggcuggacauuuggagcaggcgccgcucugcagauccccuuugcuaugcagauggccuaccgguucaacggcaucggagugacccagaaugugcuguacgagaaccagaagcugaucgccaaccaguucaacagcgccaucggcaagauccaggacagccugagcagcacagcaagcgcccugggaaagcugcaggacguggucaaccagaaugcccaggcacugaacacccuggucaagcagcuguccuccaacuucggcgccaucagcucugugcugaacgauauccugagcagacuggacccuccugaggccgaggugcagaucgacagacugaucacaggcagacugcagagccuccagacauacgugacccagcagcugaucagagccgccgagauuagagccucugccaaucuggccgccaccaagaugucugagugugugcugggccagagcaagagaguggacuuuugcggcaagggcuaccaccugaugagcuucccucagucugccccucacggcgugguguuucugcacgugacauaugugcccgcucaagagaagaauuucaccaccgcuccagccaucugccacgacggcaaagcccacuuuccuagagaaggcguguucguguccaacggcacccauugguucgugacacagcggaacuucuacgagccccagaucaucaccaccgacaacaccuucgugucuggcaacugcgacgucgugaucggcauugugaacaauaccguguacgacccucugcagcccgagcuggacagcuucaaagaggaacuggacaaguacuuuaagaaccacacaagccccgacguggaccugggcgauaucagcggaaucaaugccagcgucgugaacauccagaaagagaucgaccggcugaacgagguggccaagaaucugaacgagagccugaucgaccugcaagaacuggggaaguacgagcaguacaucaaguggcccugguacaucuggcugggcuuuaucgccggacugauugccaucgugauggucacaaucaugcuguguugcaugaccagcugcuguagcugccugaagggcuguuguagcuguggcagcugcugcaaguucgacgaggacgauucugagcccgugcugaagggcgugaaacugcacuacacaugaggacuaguuauaagacugacuagcccgaugggccucccaacgggcccuccuccccuccuugcaccgagauuaauaaaaaaaaaaaaaaaaaaaaaaaaaaaaaaaaaaaaaaaaaaaaaaaaaaaaaaaaaaaaaaaaugcaucccccccccccccccccccccccccccccccaaaggcucuuuucagagccaccagaauu

SEQ ID NO: 23403 - RNA, 4039 nt, Artificial Sequence
  SARS-CoV-2/Wuhan/WIV05/2019__EPI_ISL_402128 spike protein mRNA gc mod (1-1273)(K986P_V987P_K986P_V987P_L18F_T20N_P26S_D138Y_R190S_K417T _E484K_N501Y_D614G_H655Y_T1027I)
aggagaaagcuuaccauguucguguuccuggugcugcugccucugguguccagccagugugugaacuucaccaacagaacacagcugccuagcgccuacaccaacagcuuuaccagaggcguguacuaccccgacaagguguucagauccagcgugcugcacucuacccaggaccuguuccugccuuucuucagcaacgugaccugguuccacgccauccacguguccggcaccaauggcaccaagagauucgacaaccccgugcugcccuucaacgacgggguguacuuugccagcaccgagaaguccaacaucaucagaggcuggaucuucggcaccacacuggacagcaagacccagagccugcugaucgugaacaacgccaccaacguggucaucaaagugugcgaguuccaguucugcaacuaccccuuccugggcgucuacuaccacaagaacaacaagagcuggauggaaagcgaguuccggguguacagcagcgccaacaacugcaccuucgaguacgugucccagccuuuccugauggaccuggaaggcaagcagggcaacuucaagaaccugagcgaguucguguuuaagaacaucgacggcuacuucaagaucuacagcaagcacaccccuaucaaccucgugcgggaucugccucagggcuucucugcucuggaaccccugguggaucugcccaucggcaucaacaucacccgguuucagacacugcuggcccugcacagaagcuaccugacaccuggcgauagcagcagcggauggacagcuggugccgccgcuuacuaugugggcuaccugcagccuagaaccuuccugcugaaguacaacgagaacggcaccaucaccgacgccguggauugugcucuggauccucugagcgagacaaagugcacccugaaguccuucaccguggaaaagggcaucuaccagaccagcaacuuccgggugcagcccaccgaauccaucgugcgguuccccaauaucaccaaucugugccccuucggcgagguguucaaugccaccagauucgccucuguguacgccuggaaccggaagcggaucagcaauugcguggccgacuacuccgugcuguacaacuccgccagcuucagcaccuucaagugcuacggcguguccccuaccaagcugaacgaccugugcuucacaaacguguacgccgacagcuucgugauccggggagaugaagugcggcagauugccccuggacagacaggcaccaucgccgacuacaacuacaagcugcccgacgacuucaccggcugugugauugccuggaacagcaacaaccuggacuccaaagucggcggcaacuacaauuaccuguaccggcuguuccggaaguccaaucugaagcccuucgagcgggacaucuccaccgagaucuaucaggccggcagcaccccuuguaacggcgugaagggcuucaacugcuacuucccacugcaguccuacggcuuucagcccacauacggcgugggcuaucagcccuacagagugguggugcugagcuucgaacugcugcaugccccugccacagugugcggcccuaagaaaagcaccaaucucgugaagaacaaaugcgugaacuucaacuucaacggccugaccggcaccggcgugcugacagagagcaacaagaaguuccugccauuccagcaguuuggccgggauaucgccgauaccacagacgccguuagagauccccagacacuggaaauccuggacaucaccccuugcagcuucggcggagugucugugaucaccccuggcaccaacaccagcaaucagguggcagugcuguaccagggcgugaacuguaccgaagugcccguggccauucacgccgaucagcugacaccuacauggcggguguacuccaccggcagcaauguguuucagaccagagccggcugucugaucggagccgaguacgugaacaauagcuacgagugcgacauccccaucggcgcuggaaucugcgccagcuaccagacacagacaaacagcccucggagagccagaagcguggccagccagagcaucauugccuacacaaugucucugggcgccgagaacagcguggccuacuccaacaacucuaucgcuauccccaccaacuucaccaucagcgugaccacagagauccugccuguguccaugaccaagaccagcguggacugcaccauguacaucugcggcgauuccaccgagugcuccaaccugcugcugcaguacggcagcuucugcacccagcugaauagagcccugacagggaucgccguggaacaggacaagaacacccaagagguguucgcccaagugaagcagaucuacaagaccccuccuaucaaggacuucggcggcuucaauuucagccagauucugcccgauccuagcaagcccagcaagcggagcuucaucgaggaccugcuguucaacaaagugacacuggccgacgccggcuucaucaagcaguauggcgauugucugggcgacauugccgccagggaucugauuugcgcccagaaguuuaacggacugacagugcugccuccucugcugaccgaugagaugaucgcccaguacacaucugcccugcuggccggcacaaucacaagcggcuggacauuuggagcaggcgccgcucugcagauccccuuugcuaugcagauggccuaccgguucaacggcaucggagugacccagaaugugcuguacgagaaccagaagcugaucgccaaccaguucaacagcgccaucggcaagauccaggacagccugagcagcacagcaagcgcccugggaaagcugcaggacguggucaaccagaaugcccaggcacugaacacccuggucaagcagcuguccuccaacuucggcgccaucagcucugugcugaacgauauccugagcagacuggacccuccugaggccgaggugcagaucgacagacugaucacaggcagacugcagagccuccagacauacgugacccagcagcugaucagagccgccgagauuagagccucugccaaucuggccgccaucaagaugucugagugugugcugggccagagcaagagaguggacuuuugcggcaagggcuaccaccugaugagcuucccucagucugccccucacggcgugguguuucugcacgugacauaugugcccgcucaagagaagaauuucaccaccgcuccagccaucugccacgacggcaaagcccacuuuccuagagaaggcguguucguguccaacggcacccauugguucgugacacagcggaacuucuacgagccccagaucaucaccaccgacaacaccuucgugucuggcaacugcgacgucgugaucggcauugugaacaauaccguguacgacccucugcagcccgagcuggacagcuucaaagaggaacuggacaaguacuuuaagaaccacacaagccccgacguggaccugggcgauaucagcggaaucaaugccagcgucgugaacauccagaaagagaucgaccggcugaacgagguggccaagaaucugaacgagagccugaucgaccugcaagaacuggggaaguacgagcaguacaucaaguggcccugguacaucuggcugggcuuuaucgccggacugauugccaucgugauggucacaaucaugcuguguugcaugaccagcugcuguagcugccugaagggcuguuguagcuguggcagcugcugcaaguucgacgaggacgauucugagcccgugcugaagggcgugaaacugcacuacacaugaggacuaguuauaagacugacuagcccgaugggccucccaacgggcccuccuccccuccuugcaccgagauuaauaaaaaaaaaaaaaaaaaaaaaaaaaaaaaaaaaaaaaaaaaaaaaaaaaaaaaaaaaaaaaaaaugcaucccccccccccccccccccccccccccccccaaaggcucuuuucagagccaccagaauu

SEQ ID NO: 23404 - RNA, 4039 nt, Artificial Sequence
  SARS-CoV-2/Wuhan/WIV05/2019__EPI_ISL_402128 spike protein mRNA gc mod (1-1273)(K986P_V987P_K986P_V987P_S13I_W152C_L452R_D614G)
aggagaaagcuuaccauguucguguuccuggugcugcugccucugguguccauccagugugugaaccugaccaccagaacacagcugccuccagccuacaccaacagcuuuaccagaggcguguacuaccccgacaagguguucagauccagcgugcugcacucuacccaggaccuguuccugccuuucuucagcaacgugaccugguuccacgccauccacguguccggcaccaauggcaccaagagauucgacaaccccgugcugcccuucaacgacgggguguacuuugccagcaccgagaaguccaacaucaucagaggcuggaucuucggcaccacacuggacagcaagacccagagccugcugaucgugaacaacgccaccaacguggucaucaaagugugcgaguuccaguucugcaacgaccccuuccugggcgucuacuaccacaagaacaacaagagcugcauggaaagcgaguuccggguguacagcagcgccaacaacugcaccuucgaguacgugucccagccuuuccugauggaccuggaaggcaagcagggcaacuucaagaaccugcgcgaguucguguuuaagaacaucgacggcuacuucaagaucuacagcaagcacaccccuaucaaccucgugcgggaucugccucagggcuucucugcucuggaaccccugguggaucugcccaucggcaucaacaucacccgguuucagacacugcuggcccugcacagaagcuaccugacaccuggcgauagcagcagcggauggacagcuggugccgccgcuuacuaugugggcuaccugcagccuagaaccuuccugcugaaguacaacgagaacggcaccaucaccgacgccguggauugugcucuggauccucugagcgagacaaagugcacccugaaguccuucaccguggaaaagggcaucuaccagaccagcaacuuccgggugcagcccaccgaauccaucgugcgguuccccaauaucaccaaucugugccccuucggcgagguguucaaugccaccagauucgccucuguguacgccuggaaccggaagcggaucagcaauugcguggccgacuacuccgugcuguacaacuccgccagcuucagcaccuucaagugcuacggcguguccccuaccaagcugaacgaccugugcuucacaaacguguacgccgacagcuucgugauccggggagaugaagugcggcagauugccccuggacagacaggcaagaucgccgacuacaacuacaagcugcccgacgacuucaccggcugugugauugccuggaacagcaacaaccuggacuccaaagucggcggcaacuacaauuaccgcuaccggcuguuccggaaguccaaucugaagcccuucgagcgggacaucuccaccgagaucuaucaggccggcagcaccccuuguaacggcguggaaggcuucaacugcuacuucccacugcaguccuacggcuuucagcccacaaauggcgugggcuaucagcccuacagagugguggugcugagcuucgaacugcugcaugccccugccacagugugcggcccuaagaaaagcaccaaucucgugaagaacaaaugcgugaacuucaacuucaacggccugaccggcaccggcgugcugacagagagcaacaagaaguuccugccauuccagcaguuuggccgggauaucgccgauaccacagacgccguuagagauccccagacacuggaaauccuggacaucaccccuugcagcuucggcggagugucugugaucaccccuggcaccaacaccagcaaucagguggcagugcuguaccagggcgugaacuguaccgaagugcccguggccauucacgccgaucagcugacaccuacauggcggguguacuccaccggcagcaauguguuucagaccagagccggcugucugaucggagccgagcacgugaacaauagcuacgagugcgacauccccaucggcgcuggaaucugcgccagcuaccagacacagacaaacagcccucggagagccagaagcguggccagccagagcaucauugccuacacaaugucucugggcgccgagaacagcguggccuacuccaacaacucuaucgcuauccccaccaacuucaccaucagcgugaccacagagauccugccuguguccaugaccaagaccagcguggacugcaccauguacaucugcggcgauuccaccgagugcuccaaccugcugcugcaguacggcagcuucugcacccagcugaauagagcccugacagggaucgccguggaacaggacaagaacacccaagagguguucgcccaagugaagcagaucuacaagaccccuccuaucaaggacuucggcggcuucaauuucagccagauucugcccgauccuagcaagcccagcaagcggagcuucaucgaggaccugcuguucaacaaagugacacuggccgacgccggcuucaucaagcaguauggcgauugucugggcgacauugccgccagggaucugauuugcgcccagaaguuuaacggacugacagugcugccuccucugcugaccgaugagaugaucgcccaguacacaucugcccugcuggccggcacaaucacaagcggcuggacauuuggagcaggcgccgcucugcagauccccuuugcuaugcagauggccuaccgguucaacggcaucggagugacccagaaugugcuguacgagaaccagaagcugaucgccaaccaguucaacagcgccaucggcaagauccaggacagccugagcagcacagcaagcgcccugggaaagcugcaggacguggucaaccagaaugcccaggcacugaacacccuggucaagcagcuguccuccaacuucggcgccaucagcucugugcugaacgauauccugagcagacuggacccuccugaggccgaggugcagaucgacagacugaucacaggcagacugcagagccuccagacauacgugacccagcagcugaucagagccgccgagauuagagccucugccaaucuggccgccaccaagaugucugagugugugcugggccagagcaagagaguggacuuuugcggcaagggcuaccaccugaugagcuucccucagucugccccucacggcgugguguuucugcacgugacauaugugcccgcucaagagaagaauuucaccaccgcuccagccaucugccacgacggcaaagcccacuuuccuagagaaggcguguucguguccaacggcacccauugguucgugacacagcggaacuucuacgagccccagaucaucaccaccgacaacaccuucgugucuggcaacugcgacgucgugaucggcauugugaacaauaccguguacgacccucugcagcccgagcuggacagcuucaaagaggaacuggacaaguacuuuaagaaccacacaagccccgacguggaccugggcgauaucagcggaaucaaugccagcgucgugaacauccagaaagagaucgaccggcugaacgagguggccaagaaucugaacgagagccugaucgaccugcaagaacuggggaaguacgagcaguacaucaaguggcccugguacaucuggcugggcuuuaucgccggacugauugccaucgugauggucacaaucaugcuguguugcaugaccagcugcuguagcugccugaagggcuguuguagcuguggcagcugcugcaaguucgacgaggacgauucugagcccgugcugaagggcgugaaacugcacuacacaugaggacuaguuauaagacugacuagcccgaugggccucccaacgggcccuccuccccuccuugcaccgagauuaauaaaaaaaaaaaaaaaaaaaaaaaaaaaaaaaaaaaaaaaaaaaaaaaaaaaaaaaaaaaaaaaaugcaucccccccccccccccccccccccccccccccaaaggcucuuuucagagccaccagaauu

SEQ ID NO: 23405 - RNA, 1424 nt, Artificial Sequence; identical to SEQ ID NO: 22787
  SARS-CoV-2/Wuhan/WIV05/2019__EPI_ISL_402128 spike protein mRNA gc (1-15,334-528) Ferritin construct R10340

SEQ ID NO: 23406 - RNA, 1022 nt, Artificial Sequence; identical to SEQ ID NO: 22788
  SARS-CoV-2/Wuhan/WIV05/2019__EPI_ISL_402128 spike protein mRNA gc (334-528) Foldon construct R9927

SEQ ID NO: 23407 - RNA, 1400 nt, Artificial Sequence; identical to SEQ ID NO: 22789
  SARS-CoV-2/Wuhan/WIV05/2019__EPI_ISL_402128 spike protein mRNA gc (1-15,334-528) LumSynth construct R10338

SEQ ID NO: 23408 - RNA, 1361 nt, Artificial Sequence; identical to SEQ ID NO: 22790
  SARS-CoV-2/Wuhan/WIV05/2019__EPI_ISL_402128 spike protein mRNA gc (334-528) LumSynth construct R10339

SEQ ID NO: 23409 - RNA, 4094 nt, Artificial Sequence; identical to SEQ ID NO: 148
  SARS-CoV-2/Wuhan/WIV05/2019__EPI_ISL_402128 spike protein mRNA gc (1-1273) R9488, R9492, R10161

SEQ ID NO: 23410 - RNA, 4094 nt, Artificial Sequence; identical to SEQ ID NO: 22791
  SARS-CoV-2/Wuhan/WIV05/2019__EPI_ISL_402128 spike protein mRNA gc (1-1273)(D614G) R10182

SEQ ID NO: 23411 - RNA, 4094 nt, Artificial Sequence; identical to SEQ ID NO: 22793
  SARS-CoV-2/Wuhan/WIV05/2019__EPI_ISL_402128 spike protein mRNA gc (1-1273)(A222V_D614G) R10278

SEQ ID NO: 23412 - RNA, 4094 nt, Artificial Sequence; identical to SEQ ID NO: 22795
  SARS-CoV-2/Wuhan/WIV05/2019__EPI_ISL_402128 spike protein mRNA gc (1-1273)(N439K_D614G) R10298

SEQ ID NO: 23413 - RNA, 4094 nt, Artificial Sequence; identical to SEQ ID NO: 22797
  SARS-CoV-2/Wuhan/WIV05/2019__EPI_ISL_402128 spike protein mRNA gc (1-1273)(S477N_D614G) R10287

SEQ ID NO: 23414 - RNA, 4094 nt, Artificial Sequence; identical to SEQ ID NO: 22799
  SARS-CoV-2/Wuhan/WIV05/2019__EPI_ISL_402128 spike protein mRNA gc (1-1273)(N501Y_D614G)

SEQ ID NO: 23415 - RNA, 4088 nt, Artificial Sequence; identical to SEQ ID NO: 22801
  SARS-CoV-2/Wuhan/WIV05/2019__EPI_ISL_402128 spike protein mRNA gc (1-1273)(H69del_V70del_D614G) R10274

SEQ ID NO: 23416 - RNA, 4094 nt, Artificial Sequence; identical to SEQ ID NO: 22803
  SARS-CoV-2/Wuhan/WIV05/2019__EPI_ISL_402128 spike protein mRNA gc (1-1273)(Y453F_D614G) R10282

SEQ ID NO: 23417 - RNA, 4094 nt, Artificial Sequence; identical to SEQ ID NO: 22805
  SARS-CoV-2/Wuhan/WIV05/2019__EPI_ISL_402128 spike protein mRNA gc (1-1273)(D614G_I692V) R10290

SEQ ID NO: 23418 - RNA, 4094 nt, Artificial Sequence; identical to SEQ ID NO: 22807
  SARS-CoV-2/Wuhan/WIV05/2019__EPI_ISL_402128 spike protein mRNA gc (1-1273)(D614G_M1229I)

SEQ ID NO: 23419 - RNA, 4088 nt, Artificial Sequence; identical to SEQ ID NO: 22809
  SARS-CoV-2/Wuhan/WIV05/2019__EPI_ISL_402128 spike protein mRNA gc (1-1273)(H69del_V70del_A222V_Y453F_S477N_D614G_I692V) R10294

SEQ ID NO: 23420 - RNA, 4088 nt, Artificial Sequence; identical to SEQ ID NO: 22811
  SARS-CoV-2/Wuhan/WIV05/2019__EPI_ISL_402128 spike protein mRNA gc (1-1273)(H69del_V70del_Y453F_D614G_I692V_M1229I)

SEQ ID NO: 23421 - RNA, 4085 nt, Artificial Sequence
  SARS-CoV-2/Wuhan/WIV05/2019__EPI_ISL_402128 spike protein mRNA gc (1-1273)(H69del_V70del_Y144del_N501Y_A570D_D614G_P681H_T716I_S982 A_D1118H) R10356
aggagagucccgcagucggcguccagcggcucugcuuguucgugugugugucguugcaggccuuauucaagcuuaccauguucguguuccugguccuccugccccuggugagcucccagugcgugaaccucaccacccgcacgcagcugccgcccgccuacaccaacagcuucacccggggcgucuacuaccccgacaagguguuccgcuccagcgugcugcacuccacccaggaccucuuccugcccuucuucagcaacgucacgugguuccacgccaucuccgggaccaacggcaccaagcgguucgacaacccggugcugcccuucaacgacggggucuacuucgcgagcaccgagaaguccaacaucauccgcggcuggaucuucgggacgacccucgacagcaagacccagucccugcugaucgugaacaacgccaccaacguggucaucaaggugugcgaguuccaguucugcaacgaccccuuccucggcguguaccacaagaacaacaagagcuggauggaguccgaguuccgggucuacagcuccgccaacaacugcacguucgaguacgugagccagcccuuccugauggaccuggagggcaagcaggggaacuucaagaaccuccgcgaguucguguucaagaacaucgacggcuacuucaagaucuacuccaagcacaccccgaucaaccugguccgggaccugccccagggguucagcgcccucgagccccugguggaccugcccaucggcaucaacaucacccgcuuccagacccuccuggcccugcaccgguccuaccucacgccgggggacagcagcuccggcuggaccgcgggcgccgccgccuacuacgugggguaccugcagccccgcaccuuccugcucaaguacaacgagaacggcaccaucacggacgcggucgacugcgcccuggacccccugagcgagaccaagugcacccucaaguccuucaccguggagaaggggaucuaccagacgagcaacuuccgggugcagcccaccgaguccaucguccgcuucccgaacaucaccaaccugugccccuucggcgagguguucaacgccacccgguucgccagcgucuacgccuggaaccgcaagcggaucuccaacugcguggcggacuacagcgugcuguacaacuccgccagcuucuccacguucaagugcuacggcgucagccccaccaagcucaacgaccugugcuucaccaacguguacgccgacuccuucgugauccgcggggacgagguccggcagaucgcccccggccagaccgggaagaucgccgacuacaacuacaagcugccggacgacuucacgggcugcgugaucgcguggaacagcaacaaccucgacuccaaggucgggggcaacuacaacuaccuguaccgccuguuccgcaagagcaaccucaagcccuucgagcgggacaucuccaccgagaucuaccaggccggcagcacccccugcaacgggguggagggcuucaacugcuacuucccccugcaguccuacggguuccagccgaccuacggcgugggguaccagcccuaccggguggucgugcugagcuucgagcuccugcacgcccccgccacggugugcggccccaagaaguccaccaaccuggucaagaacaagugcgugaacuucaacuucaacggccucaccgggaccggcgugcugaccgagagcaacaagaaguuccugccguuccagcaguucgggcgcgacaucgacgacacgaccgacgcgguccgcgacccccagacccuggagauccucgacaucacccccugcagcuucggcgggguguccgugaucacgccgggcaccaacaccagcaaccaggucgccgugcuguaccagggcgugaacugcaccgagguccccguggccauccacgccgaccagcugacgcccaccuggcggguguacuccaccggcagcaacgucuuccagacccgcgccgggugccucaucggcgcggagcacgugaacaacuccuacgagugcgacauccccaucggggccggcaucugcgccagcuaccagacgcagaccaacucccaccggcgcgcccggagcguggcgucccagagcaucaucgccuacaccaugucccugggcgccgagaacagcgucgccuacuccaacaacagcaucgccauccccaucaacuucacgaucuccgugaccaccgagauccugcccgugagcaugaccaagacgagcgucgacugcaccauguacaucugcggggacuccaccgagugcagcaaccuccugcugcaguacggcuccuucugcacccagcucaaccgcgcgcugacggggaucgccguggagcaggacaagaacacccaggagguguucgcccaggucaagcagaucuacaagacgcccccgaucaaggacuucggcggguucaacuucagccagauccugcccgaccccuccaagcccagcaagcgguccuucaucgaggaccuccuguucaacaaggugacccuggccgacgccggcuucaucaagcaguacggcgacugccucggggacaucgcggcccgcgaccugaucugcgcccagaaguucaacggccugaccgugcucccgccccugcugaccgacgagaugaucgcccaguacaccagcgcccuccuggcggggaccaucacguccggcuggaccuucggggccggcgccgcccugcagauccccuucgcgaugcagauggccuaccgguucaacggcaucggggucacccagaacgugcucuacgagaaccagaagcugaucgccaaccaguucaacagcgccaucggcaagauccaggacucccugagcuccaccgccagcgcgcucgggaagcugcaggacguggucaaccagaacgcccaggcccugaacacgcucgugaagcagcuguccagcaacuucggcgccaucuccagcgugcugaacgacauccucgcccgccuggacaaggucgaggccgaggugcagaucgaccggcugaucaccgggcgccuccagagccugcagaccuacgugacccagcagcugauccgggcggccgagauccgcgccagcgccaaccucgccgcgaccaagauguccgagugcguccugggccagagcaagcggguggacuucugcggcaagggguaccaccugauguccuucccccagagcgccccgcacggcguggucuuccuccacgugacguacguccccgcccaggagaagaacuucaccaccgcccccgcgaucugccacgacgggaaggcccacuucccccgcgagggcguguucguguccaacgggacccacugguucgucacgcagcggaacuucuacgagccgcagaucaucaccacccacaacaccuucgugagcggcaacugcgacguggucaucggcaucgugaacaacacgguguacgacccccugcagcccgagcuggacuccuucaaggaggagcucgacaaguacuucaagaaccacaccagccccgacgucgaccugggggacaucuccggcaucaacgccagcguggugaacauccagaaggagaucgaccgccugaacgaggucgccaagaaccucaacgagucccugaucgaccugcaggagcucgggaaguacgagcaguacaucaaguggccgugguacaucuggcugggcuucaucgccggccugaucgcgaucgugauggugaccaucaugcucugcugcaugaccagcugcugcuccugccugaaggggugcugcagcugcggcuccugcugcaaguucgacgaggacgacagcgagcccguccugaagggggugaagcuccacuacacgugaggacuagucccuguucccagagcccacuuuuuuuucuuuuuuugaaauaaaauagccugucuuucagaucucaaaggcucuuuucagagccaccaaaaaaaaaaaaaaaaaaaaaaaaaaaaaaaaaaaaaaaaaaaaaaaaaaaaaaaaaaaaaaaaaaaaaaaaaaaaaaaaaaaaaaaaaaaaaaaaaaaaa

SEQ ID NO: 23422 - RNA, 4094 nt, Artificial Sequence
  SARS-CoV-2/Wuhan/WIV05/2019__EPI_ISL_402128 spike protein mRNA gc (1-1273)(K417N_E484K_N501Y_D614G) R10359
aggagagucccgcagucggcguccagcggcucugcuuguucgugugugugucguugcaggccuuauucaagcuuaccauguucguguuccugguccuccugccccuggugagcucccagugcgugaaccucaccacccgcacgcagcugccgcccgccuacaccaacagcuucacccggggcgucuacuaccccgacaagguguuccgcuccagcgugcugcacuccacccaggaccucuuccugcccuucuucagcaacgucacgugguuccacgccauccacguguccgggaccaacggcaccaagcgguucgacaacccggugcugcccuucaacgacggggucuacuucgcgagcaccgagaaguccaacaucauccgcggcuggaucuucgggacgacccucgacagcaagacccagucccugcugaucgugaacaacgccaccaacguggucaucaaggugugcgaguuccaguucugcaacgaccccuuccucggcguguacuaccacaagaacaacaagagcuggauggaguccgaguuccgggucuacagcuccgccaacaacugcacguucgaguacgugagccagcccuuccugauggaccuggagggcaagcaggggaacuucaagaaccuccgcgaguucguguucaagaacaucgacggcuacuucaagaucuacuccaagcacaccccgaucaaccugguccgggaccugccccagggguucagcgcccucgagccccugguggaccugcccaucggcaucaacaucacccgcuuccagacccuccuggcccugcaccgguccuaccucacgccgggggacagcagcuccggcuggaccgcgggcgccgccgccuacuacgugggguaccugcagccccgcaccuuccugcucaaguacaacgagaacggcaccaucacggacgcggucgacugcgcccuggacccccugagcgagaccaagugcacccucaaguccuucaccguggagaaggggaucuaccagacgagcaacuuccgggugcagcccaccgaguccaucguccgcuucccgaacaucaccaaccugugccccuucggcgagguguucaacgccacccgguucgccagcgucuacgccuggaaccgcaagcggaucuccaacugcguggcggacuacagcgugcuguacaacuccgccagcuucuccacguucaagugcuacggcgucagccccaccaagcucaacgaccugugcuucaccaacguguacgccgacuccuucgugauccgcggggacgagguccggcagaucgcccccggccagaccgggaacaucgccgacuacaacuacaagcugccggacgacuucacgggcugcgugaucgcguggaacagcaacaaccucgacuccaaggucgggggcaacuacaacuaccuguaccgccuguuccgcaagagcaaccucaagcccuucgagcgggacaucuccaccgagaucuaccaggccggcagcacccccugcaacggggugaagggcuucaacugcuacuucccccugcaguccuacggguuccagccgaccuacggcgugggguaccagcccuaccggguggucgugcugagcuucgagcuccugcacgcccccgccacggugugcggccccaagaaguccaccaaccuggucaagaacaagugcgugaacuucaacuucaacggccucaccgggaccggcgugcugaccgagagcaacaagaaguuccugccguuccagcaguucgggcgcgacaucgccgacacgaccgacgcgguccgcgacccccagacccuggagauccucgacaucacccccugcagcuucggcgggguguccgugaucacgccgggcaccaacaccagcaaccaggucgccgugcuguaccagggcgugaacugcaccgagguccccguggccauccacgccgaccagcugacgcccaccuggcggguguacuccaccggcagcaacgucuuccagacccgcgccgggugccucaucggcgcggagcacgugaacaacuccuacgagugcgacauccccaucggggccggcaucugcgccagcuaccagacgcagaccaacuccccgcggcgcgcccggagcguggcgucccagagcaucaucgccuacaccaugucccugggcgccgagaacagcgucgccuacuccaacaacagcaucgccauccccaccaacuucacgaucuccgugaccaccgagauccugcccgugagcaugaccaagacgagcgucgacugcaccauguacaucugcggggacuccaccgagugcagcaaccuccugcugcaguacggcuccuucugcacccagcucaaccgcgcgcugacggggaucgccguggagcaggacaagaacacccaggagguguucgcccaggucaagcagaucuacaagacgcccccgaucaaggacuucggcggguucaacuucagccagauccugcccgaccccuccaagcccagcaagcgguccuucaucgaggaccuccuguucaacaaggugacccuggccgacgccggcuucaucaagcaguacggcgacugccucggggacaucgcggcccgcgaccugaucugcgcccagaaguucaacggccugaccgugcucccgccccugcugaccgacgagaugaucgcccaguacaccagcgcccuccuggcggggaccaucacguccggcuggaccuucggggccggcgccgcccugcagauccccuucgcgaugcagauggccuaccgguucaacggcaucggggucacccagaacgugcucuacgagaaccagaagcugaucgccaaccaguucaacagcgccaucggcaagauccaggacucccugagcuccaccgccagcgcgcucgggaagcugcaggacguggucaaccagaacgcccaggcccugaacacgcucgugaagcagcuguccagcaacuucggcgccaucuccagcgugcugaacgacauccucucccgccuggacaaggucgaggccgaggugcagaucgaccggcugaucaccgggcgccuccagagccugcagaccuacgugacccagcagcugauccgggcggccgagauccgcgccagcgccaaccucgccgcgaccaagauguccgagugcguccugggccagagcaagcggguggacuucugcggcaagggguaccaccugauguccuucccccagagcgccccgcacggcguggucuuccuccacgugacguacguccccgcccaggagaagaacuucaccaccgcccccgcgaucugccacgacgggaaggcccacuucccccgcgagggcguguucguguccaacgggacccacugguucgucacgcagcggaacuucuacgagccgcagaucaucaccaccgacaacaccuucgugagcggcaacugcgacguggucaucggcaucgugaacaacacgguguacgacccccugcagcccgagcuggacuccuucaaggaggagcucgacaaguacuucaagaaccacaccagccccgacgucgaccugggggacaucuccggcaucaacgccagcguggugaacauccagaaggagaucgaccgccugaacgaggucgccaagaaccucaacgagucccugaucgaccugcaggagcucgggaaguacgagcaguacaucaaguggccgugguacaucuggcugggcuucaucgccggccugaucgcgaucgugauggugaccaucaugcucugcugcaugaccagcugcugcuccugccugaaggggugcugcagcugcggcuccugcugcaaguucgacgaggacgacagcgagcccguccugaagggggugaagcuccacuacacgugaggacuagucccuguucccagagcccacuuuuuuuucuuuuuuugaaauaaaauagccugucuuucagaucucaaaggcucuuuucagagccaccaaaaaaaaaaaaaaaaaaaaaaaaaaaaaaaaaaaaaaaaaaaaaaaaaaaaaaaaaaaaaaaaaaaaaaaaaaaaaaaaaaaaaaaaaaaaaaaaaaaaa

SEQ ID NO: 23423 - RNA, 4085 nt, Artificial Sequence
  SARS-CoV-2/Wuhan/WIV05/2019__EPI_ISL_402128 spike protein mRNA gc (1-1273)(L18F_D80A_D215G_L242del_A243del_L244del_R246I_K417N_E484 K_N501Y_D614G_A701V)
aggagagucccgcagucggcguccagcggcucugcuuguucgugugugugucguugcaggccuuauucaagcuuaccauguucguguuccugguccuccugccccuggugagcucccagugcgugaacuucaccacccgcacgcagcugccgcccgccuacaccaacagcuucacccggggcgucuacuaccccgacaagguguuccgcuccagcgugcugcacuccacccaggaccucuuccugcccuucuucagcaacgucacgugguuccacgccauccacguguccgggaccaacggcaccaagcgguucgccaacccggugcugcccuucaacgacggggucuacuucgcgagcaccgagaaguccaacaucauccgcggcuggaucuucgggacgacccucgacagcaagacccagucccugcugaucgugaacaacgccaccaacguggucaucaaggugugcgaguuccaguucugcaacgaccccuuccucggcguguacuaccacaagaacaacaagagcuggauggaguccgaguuccgggucuacagcuccgccaacaacugcacguucgaguacgugagccagcccuuccugauggaccuggagggcaagcaggggaacuucaagaaccuccgcgaguucguguucaagaacaucgacggcuacuucaagaucuacuccaagcacaccccgaucaaccugguccggggccugccccagggguucagcgcccucgagccccugguggaccugcccaucggcaucaacaucacccgcuuccagacccuccacaucuccuaccucacgccgggggacagcagcuccggcuggaccgcgggcgccgccgccuacuacgugggguaccugcagccccgcaccuuccugcucaaguacaacgagaacggcaccaucacggacgcggucgacugcgcccuggacccccugagcgagaccaagugcacccucaaguccuucaccguggagaaggggaucuaccagacgagcaacuuccgggugcagcccaccgaguccaucguccgcuucccgaacaucaccaaccugugccccuucggcgagguguucaacgccacccgguucgccagcgucuacgccuggaaccgcaagcggaucuccaacugcguggcggacuacagcgugcuguacaacuccgccagcuucuccacguucaagugcuacggcgucagccccaccaagcucaacgaccugugcuucaccaacguguacgccgacuccuucgugauccgcggggacgagguccggcagaucgcccccggccagaccgggaacaucgccgacuacaacuacaagcugccggacgacuucacgggcugcgugaucgcguggaacagcaacaaccucgacuccaaggucgggggcaacuacaacuaccuguaccgccuguuccgcaagagcaaccucaagcccuucgagcgggacaucuccaccgagaucuaccaggccggcagcacccccugcaacggggugaagggcuucaacugcuacuucccccugcaguccuacggguuccagccgaccuacggcgugggguaccagcccuaccggguggucgugcugagcuucgagcuccugcacgcccccgccacggugugcggccccaagaaguccaccaaccuggucaagaacaagugcgugaacuucaacuucaacggccucaccgggaccggcgugcugaccgagagcaacaagaaguuccugccguuccagcaguucgggcgcgacaucgccgacacgaccgacgcgguccgcgacccccagacccuggagauccucgacaucacccccugcagcuucggcgggguguccgugaucacgccgggcaccaacaccagcaaccaggucgccgugcuguaccagggcgugaacugcaccgagguccccguggccauccacgccgaccagcugacgcccaccuggcggguguacuccaccggcagcaacgucuuccagacccgcgccgggugccucaucggcgcggagcacgugaacaacuccuacgagugcgacauccccaucggggccggcaucugcgccagcuaccagacgcagaccaacuccccgcggcgcgcccggagcguggcgucccagagcaucaucgccuacaccaugucccugggcguggagaacagcgucgccuacuccaacaacagcaucgccauccccaccaacuucacgaucuccgugaccaccgagauccugcccgugagcaugaccaagacgagcgucgacugcaccauguacaucugcggggacuccaccgagugcagcaaccuccugcugcaguacggcuccuucugcacccagcucaaccgcgcgcugacggggaucgccguggagcaggacaagaacacccaggagguguucgcccaggucaagcagaucuacaagacgcccccgaucaaggacuucggcggguucaacuucagccagauccugcccgaccccuccaagcccagcaagcgguccuucaucgaggaccuccuguucaacaaggugacccuggccgacgccggcuucaucaagcaguacggcgacugccucggggacaucgcggcccgcgaccugaucugcgcccagaaguucaacggccugaccgugcucccgccccugcugaccgacgagaugaucgcccaguacaccagcgcccuccuggcggggaccaucacguccggcuggaccuucggggccggcgccgcccugcagauccccuucgcgaugcagauggccuaccgguucaacggcaucggggucacccagaacgugcucuacgagaaccagaagcugaucgccaaccaguucaacagcgccaucggcaagauccaggacucccugagcuccaccgccagcgcgcucgggaagcugcaggacguggucaaccagaacgcccaggcccugaacacgcucgugaagcagcuguccagcaacuucggcgccaucuccagcgugcugaacgacauccucucccgccuggacaaggucgaggccgaggugcagaucgaccggcugaucaccgggcgccuccagagccugcagaccuacgugacccagcagcugauccgggcggccgagauccgcgccagcgccaaccucgccgcgaccaagauguccgagugcguccugggccagagcaagcggguggacuucugcggcaagggguaccaccugauguccuucccccagagcgccccgcacggcguggucuuccuccacgugacguacguccccgcccaggagaagaacuucaccaccgcccccgcgaucugccacgacgggaaggcccacuucccccgcgagggcguguucguguccaacgggacccacugguucgucacgcagcggaacuucuacgagccgcagaucaucaccaccgacaacaccuucgugagcggcaacugcgacguggucaucggcaucgugaacaacacgguguacgacccccugcagcccgagcuggacuccuucaaggaggagcucgacaaguacuucaagaaccacaccagccccgacgucgaccugggggacaucuccggcaucaacgccagcguggugaacauccagaaggagaucgaccgccugaacgaggucgccaagaaccucaacgagucccugaucgaccugcaggagcucgggaaguacgagcaguacaucaaguggccgugguacaucuggcugggcuucaucgccggccugaucgcgaucgugauggugaccaucaugcucugcugcaugaccagcugcugcuccugccugaaggggugcugcagcugcggcuccugcugcaaguucgacgaggacgacagcgagcccguccugaagggggugaagcuccacuacacgugaggacuagucccuguucccagagcccacuuuuuuuucuuuuuuugaaauaaaauagccugucuuucagaucucaaaggcucuuuucagagccaccaaaaaaaaaaaaaaaaaaaaaaaaaaaaaaaaaaaaaaaaaaaaaaaaaaaaaaaaaaaaaaaaaaaaaaaaaaaaaaaaaaaaaaaaaaaaaaaaaaaaa

SEQ ID NO: 23424 - RNA, 4094 nt, Artificial Sequence
  SARS-CoV-2/Wuhan/WIV05/2019__EPI_ISL_402128 spike protein mRNA gc (1-1273)(E484K_D614G)
aggagagucccgcagucggcguccagcggcucugcuuguucgugugugugucguugcaggccuuauucaagcuuaccauguucguguuccugguccuccugccccuggugagcucccagugcgugaaccucaccacccgcacgcagcugccgcccgccuacaccaacagcuucacccggggcgucuacuaccccgacaagguguuccgcuccagcgugcugcacuccacccaggaccucuuccugcccuucuucagcaacgucacgugguuccacgccauccacguguccgggaccaacggcaccaagcgguucgacaacccggugcugcccuucaacgacggggucuacuucgcgagcaccgagaaguccaacaucauccgcggcuggaucuucgggacgacccucgacagcaagacccagucccugcugaucgugaacaacgccaccaacguggucaucaaggugugcgaguuccaguucugcaacgaccccuuccucggcguguacuaccacaagaacaacaagagcuggauggaguccgaguuccgggucuacagcuccgccaacaacugcacguucgaguacgugagccagcccuuccugauggaccuggagggcaagcaggggaacuucaagaaccuccgcgaguucguguucaagaacaucgacggcuacuucaagaucuacuccaagcacaccccgaucaaccugguccgggaccugccccagggguucagcgcccucgagccccugguggaccugcccaucggcaucaacaucacccgcuuccagacccuccuggcccugcaccgguccuaccucacgccgggggacagcagcuccggcuggaccgcgggcgccgccgccuacuacgugggguaccugcagccccgcaccuuccugcucaaguacaacgagaacggcaccaucacggacgcggucgacugcgcccuggacccccugagcgagaccaagugcacccucaaguccuucaccguggagaaggggaucuaccagacgagcaacuuccgggugcagcccaccgaguccaucguccgcuucccgaacaucaccaaccugugccccuucggcgagguguucaacgccacccgguucgccagcgucuacgccuggaaccgcaagcggaucuccaacugcguggcggacuacagcgugcuguacaacuccgccagcuucuccacguucaagugcuacggcgucagccccaccaagcucaacgaccugugcuucaccaacguguacgccgacuccuucgugauccgcggggacgagguccggcagaucgcccccggccagaccgggaagaucgccgacuacaacuacaagcugccggacgacuucacgggcugcgugaucgcguggaacagcaacaaccucgacuccaaggucgggggcaacuacaacuaccuguaccgccuguuccgcaagagcaaccucaagcccuucgagcgggacaucuccaccgagaucuaccaggccggcagcacccccugcaacggggugaagggcuucaacugcuacuucccccugcaguccuacggguuccagccgaccaacggcgugggguaccagcccuaccggguggucgugcugagcuucgagcuccugcacgcccccgccacggugugcggccccaagaaguccaccaaccuggucaagaacaagugcgugaacuucaacuucaacggccucaccgggaccggcgugcugaccgagagcaacaagaaguuccugccguuccagcaguucgggcgcgacaucgccgacacgaccgacgcgguccgcgacccccagacccuggagauccucgacaucacccccugcagcuucggcgggguguccgugaucacgccgggcaccaacaccagcaaccaggucgccgugcuguaccagggcgugaacugcaccgagguccccguggccauccacgccgaccagcugacgcccaccuggcggguguacuccaccggcagcaacgucuuccagacccgcgccgggugccucaucggcgcggagcacgugaacaacuccuacgagugcgacauccccaucggggccggcaucugcgccagcuaccagacgcagaccaacuccccgcggcgcgcccggagcguggcgucccagagcaucaucgccuacaccaugucccugggcgccgagaacagcgucgccuacuccaacaacagcaucgccauccccaccaacuucacgaucuccgugaccaccgagauccugcccgugagcaugaccaagacgagcgucgacugcaccauguacaucugcggggacuccaccgagugcagcaaccuccugcugcaguacggcuccuucugcacccagcucaaccgcgcgcugacggggaucgccguggagcaggacaagaacacccaggagguguucgcccaggucaagcagaucuacaagacgcccccgaucaaggacuucggcggguucaacuucagccagauccugcccgaccccuccaagcccagcaagcgguccuucaucgaggaccuccuguucaacaaggugacccuggccgacgccggcuucaucaagcaguacggcgacugccucggggacaucgcggcccgcgaccugaucugcgcccagaaguucaacggccugaccgugcucccgccccugcugaccgacgagaugaucgcccaguacaccagcgcccuccuggcggggaccaucacguccggcuggaccuucggggccggcgccgcccugcagauccccuucgcgaugcagauggccuaccgguucaacggcaucggggucacccagaacgugcucuacgagaaccagaagcugaucgccaaccaguucaacagcgccaucggcaagauccaggacucccugagcuccaccgccagcgcgcucgggaagcugcaggacguggucaaccagaacgcccaggcccugaacacgcucgugaagcagcuguccagcaacuucggcgccaucuccagcgugcugaacgacauccucucccgccuggacaaggucgaggccgaggugcagaucgaccggcugaucaccgggcgccuccagagccugcagaccuacgugacccagcagcugauccgggcggccgagauccgcgccagcgccaaccucgccgcgaccaagauguccgagugcguccugggccagagcaagcggguggacuucugcggcaagggguaccaccugauguccuucccccagagcgccccgcacggcguggucuuccuccacgugacguacguccccgcccaggagaagaacuucaccaccgcccccgcgaucugccacgacgggaaggcccacuucccccgcgagggcguguucguguccaacgggacccacugguucgucacgcagcggaacuucuacgagccgcagaucaucaccaccgacaacaccuucgugagcggcaacugcgacguggucaucggcaucgugaacaacacgguguacgacccccugcagcccgagcuggacuccuucaaggaggagcucgacaaguacuucaagaaccacaccagccccgacgucgaccugggggacaucuccggcaucaacgccagcguggugaacauccagaaggagaucgaccgccugaacgaggucgccaagaaccucaacgagucccugaucgaccugcaggagcucgggaaguacgagcaguacaucaaguggccgugguacaucuggcugggcuucaucgccggccugaucgcgaucgugauggugaccaucaugcucugcugcaugaccagcugcugcuccugccugaaggggugcugcagcugcggcuccugcugcaaguucgacgaggacgacagcgagcccguccugaagggggugaagcuccacuacacgugaggacuagucccuguucccagagcccacuuuuuuuucuuuuuuugaaauaaaauagccugucuuucagaucucaaaggcucuuuucagagccaccaaaaaaaaaaaaaaaaaaaaaaaaaaaaaaaaaaaaaaaaaaaaaaaaaaaaaaaaaaaaaaaaaaaaaaaaaaaaaaaaaaaaaaaaaaaaaaaaaaaaa

SEQ ID NO: 23425 - RNA, 4094 nt, Artificial Sequence
  SARS-CoV-2/Wuhan/WIV05/2019__EPI_ISL_402128 spike protein mRNA gc (1-1273)(L18F_T20N_P26S_D138Y_R190S_K417T_E484K_N501Y_D614G_H655Y _T1027I)
aggagagucccgcagucggcguccagcggcucugcuuguucgugugugugucguugcaggccuuauucaagcuuaccauguucguguuccugguccuccugccccuggugagcucccagugcgugaacuucaccaaccgcacgcagcugccgagcgccuacaccaacagcuucacccggggcgucuacuaccccgacaagguguuccgcuccagcgugcugcacuccacccaggaccucuuccugcccuucuucagcaacgucacgugguuccacgccauccacguguccgggaccaacggcaccaagcgguucgacaacccggugcugcccuucaacgacggggucuacuucgcgagcaccgagaaguccaacaucauccgcggcuggaucuucgggacgacccucgacagcaagacccagucccugcugaucgugaacaacgccaccaacguggucaucaaggugugcgaguuccaguucugcaacuaccccuuccucggcguguacuaccacaagaacaacaagagcuggauggaguccgaguuccgggucuacagcuccgccaacaacugcacguucgaguacgugagccagcccuuccugauggaccuggagggcaagcaggggaacuucaagaaccucagcgaguucguguucaagaacaucgacggcuacuucaagaucuacuccaagcacaccccgaucaaccugguccgggaccugccccagggguucagcgcccucgagccccugguggaccugcccaucggcaucaacaucacccgcuuccagacccuccuggcccugcaccgguccuaccucacgccgggggacagcagcuccggcuggaccgcgggcgccgccgccuacuacgugggguaccugcagccccgcaccuuccugcucaaguacaacgagaacggcaccaucacggacgcggucgacugcgcccuggacccccugagcgagaccaagugcacccucaaguccuucaccguggagaaggggaucuaccagacgagcaacuuccgggugcagcccaccgaguccaucguccgcuucccgaacaucaccaaccugugccccuucggcgagguguucaacgccacccgguucgccagcgucuacgccuggaaccgcaagcggaucuccaacugcguggcggacuacagcgugcuguacaacuccgccagcuucuccacguucaagugcuacggcgucagccccaccaagcucaacgaccugugcuucaccaacguguacgccgacuccuucgugauccgcggggacgagguccggcagaucgcccccggccagaccgggaccaucgccgacuacaacuacaagcugccggacgacuucacgggcugcgugaucgcguggaacagcaacaaccucgacuccaaggucgggggcaacuacaacuaccuguaccgccuguuccgcaagagcaaccucaagcccuucgagcgggacaucuccaccgagaucuaccaggccggcagcacccccugcaacggggugaagggcuucaacugcuacuucccccugcaguccuacggguuccagccgaccuacggcgugggguaccagcccuaccggguggucgugcugagcuucgagcuccugcacgcccccgccacggugugcggccccaagaaguccaccaaccuggucaagaacaagugcgugaacuucaacuucaacggccucaccgggaccggcgugcugaccgagagcaacaagaaguuccugccguuccagcaguucgggcgcgacaucgccgacacgaccgacgcgguccgcgacccccagacccuggagauccucgacaucacccccugcagcuucggcgggguguccgugaucacgccgggcaccaacaccagcaaccaggucgccgugcuguaccagggcgugaacugcaccgagguccccguggccauccacgccgaccagcugacgcccaccuggcggguguacuccaccggcagcaacgucuuccagacccgcgccgggugccucaucggcgcggaguacgugaacaacuccuacgagugcgacauccccaucggggccggcaucugcgccagcuaccagacgcagaccaacuccccgcggcgcgcccggagcguggcgucccagagcaucaucgccuacaccaugucccugggcgccgagaacagcgucgccuacuccaacaacagcaucgccauccccaccaacuucacgaucuccgugaccaccgagauccugcccgugagcaugaccaagacgagcgucgacugcaccauguacaucugcggggacuccaccgagugcagcaaccuccugcugcaguacggcuccuucugcacccagcucaaccgcgcgcugacggggaucgccguggagcaggacaagaacacccaggagguguucgcccaggucaagcagaucuacaagacgcccccgaucaaggacuucggcggguucaacuucagccagauccugcccgaccccuccaagcccagcaagcgguccuucaucgaggaccuccuguucaacaaggugacccuggccgacgccggcuucaucaagcaguacggcgacugccucggggacaucgcggcccgcgaccugaucugcgcccagaaguucaacggccugaccgugcucccgccccugcugaccgacgagaugaucgcccaguacaccagcgcccuccuggcggggaccaucacguccggcuggaccuucggggccggcgccgcccugcagauccccuucgcgaugcagauggccuaccgguucaacggcaucggggucacccagaacgugcucuacgagaaccagaagcugaucgccaaccaguucaacagcgccaucggcaagauccaggacucccugagcuccaccgccagcgcgcucgggaagcugcaggacguggucaaccagaacgcccaggcccugaacacgcucgugaagcagcuguccagcaacuucggcgccaucuccagcgugcugaacgacauccucucccgccuggacaaggucgaggccgaggugcagaucgaccggcugaucaccgggcgccuccagagccugcagaccuacgugacccagcagcugauccgggcggccgagauccgcgccagcgccaaccucgccgcgaucaagauguccgagugcguccugggccagagcaagcggguggacuucugcggcaagggguaccaccugauguccuucccccagagcgccccgcacggcguggucuuccuccacgugacguacguccccgcccaggagaagaacuucaccaccgcccccgcgaucugccacgacgggaaggcccacuucccccgcgagggcguguucguguccaacgggacccacugguucgucacgcagcggaacuucuacgagccgcagaucaucaccaccgacaacaccuucgugagcggcaacugcgacguggucaucggcaucgugaacaacacgguguacgacccccugcagcccgagcuggacuccuucaaggaggagcucgacaaguacuucaagaaccacaccagccccgacgucgaccugggggacaucuccggcaucaacgccagcguggugaacauccagaaggagaucgaccgccugaacgaggucgccaagaaccucaacgagucccugaucgaccugcaggagcucgggaaguacgagcaguacaucaaguggccgugguacaucuggcugggcuucaucgccggccugaucgcgaucgugauggugaccaucaugcucugcugcaugaccagcugcugcuccugccugaaggggugcugcagcugcggcuccugcugcaaguucgacgaggacgacagcgagcccguccugaagggggugaagcuccacuacacgugaggacuagucccuguucccagagcccacuuuuuuuucuuuuuuugaaauaaaauagccugucuuucagaucucaaaggcucuuuucagagccaccaaaaaaaaaaaaaaaaaaaaaaaaaaaaaaaaaaaaaaaaaaaaaaaaaaaaaaaaaaaaaaaaaaaaaaaaaaaaaaaaaaaaaaaaaaaaaaaaaaaaa

SEQ ID NO: 23426 - RNA, 4094 nt, Artificial Sequence
  SARS-CoV-2/Wuhan/WIV05/2019__EPI_ISL_402128 spike protein mRNA gc (1-1273)(S13I_W152C_L452R_D614G)
aggagagucccgcagucggcguccagcggcucugcuuguucgugugugugucguugcaggccuuauucaagcuuaccauguucguguuccugguccuccugccccuggugagcauccagugcgugaaccucaccacccgcacgcagcugccgcccgccuacaccaacagcuucacccggggcgucuacuaccccgacaagguguuccgcuccagcgugcugcacuccacccaggaccucuuccugcccuucuucagcaacgucacgugguuccacgccauccacguguccgggaccaacggcaccaagcgguucgacaacccggugcugcccuucaacgacggggucuacuucgcgagcaccgagaaguccaacaucauccgcggcuggaucuucgggacgacccucgacagcaagacccagucccugcugaucgugaacaacgccaccaacguggucaucaaggugugcgaguuccaguucugcaacgaccccuuccucggcguguacuaccacaagaacaacaagagcugcauggaguccgaguuccgggucuacagcuccgccaacaacugcacguucgaguacgugagccagcccuuccugauggaccuggagggcaagcaggggaacuucaagaaccuccgcgaguucguguucaagaacaucgacggcuacuucaagaucuacuccaagcacaccccgaucaaccugguccgggaccugccccagggguucagcgcccucgagccccugguggaccugcccaucggcaucaacaucacccgcuuccagacccuccuggcccugcaccgguccuaccucacgccgggggacagcagcuccggcuggaccgcgggcgccgccgccuacuacgugggguaccugcagccccgcaccuuccugcucaaguacaacgagaacggcaccaucacggacgcggucgacugcgcccuggacccccugagcgagaccaagugcacccucaaguccuucaccguggagaaggggaucuaccagacgagcaacuuccgggugcagcccaccgaguccaucguccgcuucccgaacaucaccaaccugugccccuucggcgagguguucaacgccacccgguucgccagcgucuacgccuggaaccgcaagcggaucuccaacugcguggcggacuacagcgugcuguacaacuccgccagcuucuccacguucaagugcuacggcgucagccccaccaagcucaacgaccugugcuucaccaacguguacgccgacuccuucgugauccgcggggacgagguccggcagaucgcccccggccagaccgggaagaucgccgacuacaacuacaagcugccggacgacuucacgggcugcgugaucgcguggaacagcaacaaccucgacuccaaggucgggggcaacuacaacuaccgcuaccgccuguuccgcaagagcaaccucaagcccuucgagcgggacaucuccaccgagaucuaccaggccggcagcacccccugcaacgggguggagggcuucaacugcuacuucccccugcaguccuacggguuccagccgaccaacggcgugggguaccagcccuaccggguggucgugcugagcuucgagcuccugcacgcccccgccacggugugcggccccaagaaguccaccaaccuggucaagaacaagugcgugaacuucaacuucaacggccucaccgggaccggcgugcugaccgagagcaacaagaaguuccugccguuccagcaguucgggcgcgacaucgccgacacgaccgacgcgguccgcgacccccagacccuggagauccucgacaucacccccugcagcuucggcgggguguccgugaucacgccgggcaccaacaccagcaaccaggucgccgugcuguaccagggcgugaacugcaccgagguccccguggccauccacgccgaccagcugacgcccaccuggcggguguacuccaccggcagcaacgucuuccagacccgcgccgggugccucaucggcgcggagcacgugaacaacuccuacgagugcgacauccccaucggggccggcaucugcgccagcuaccagacgcagaccaacuccccgcggcgcgcccggagcguggcgucccagagcaucaucgccuacaccaugucccugggcgccgagaacagcgucgccuacuccaacaacagcaucgccauccccaccaacuucacgaucuccgugaccaccgagauccugcccgugagcaugaccaagacgagcgucgacugcaccauguacaucugcggggacuccaccgagugcagcaaccuccugcugcaguacggcuccuucugcacccagcucaaccgcgcgcugacggggaucgccguggagcaggacaagaacacccaggagguguucgcccaggucaagcagaucuacaagacgcccccgaucaaggacuucggcggguucaacuucagccagauccugcccgaccccuccaagcccagcaagcgguccuucaucgaggaccuccuguucaacaaggugacccuggccgacgccggcuucaucaagcaguacggcgacugccucggggacaucgcggcccgcgaccugaucugcgcccagaaguucaacggccugaccgugcucccgccccugcugaccgacgagaugaucgcccaguacaccagcgcccuccuggcggggaccaucacguccggcuggaccuucggggccggcgccgcccugcagauccccuucgcgaugcagauggccuaccgguucaacggcaucggggucacccagaacgugcucuacgagaaccagaagcugaucgccaaccaguucaacagcgccaucggcaagauccaggacucccugagcuccaccgccagcgcgcucgggaagcugcaggacguggucaaccagaacgcccaggcccugaacacgcucgugaagcagcuguccagcaacuucggcgccaucuccagcgugcugaacgacauccucucccgccuggacaaggucgaggccgaggugcagaucgaccggcugaucaccgggcgccuccagagccugcagaccuacgugacccagcagcugauccgggcggccgagauccgcgccagcgccaaccucgccgcgaccaagauguccgagugcguccugggccagagcaagcggguggacuucugcggcaagggguaccaccugauguccuucccccagagcgccccgcacggcguggucuuccuccacgugacguacguccccgcccaggagaagaacuucaccaccgcccccgcgaucugccacgacgggaaggcccacuucccccgcgagggcguguucguguccaacgggacccacugguucgucacgcagcggaacuucuacgagccgcagaucaucaccaccgacaacaccuucgugagcggcaacugcgacguggucaucggcaucgugaacaacacgguguacgacccccugcagcccgagcuggacuccuucaaggaggagcucgacaaguacuucaagaaccacaccagccccgacgucgaccugggggacaucuccggcaucaacgccagcguggugaacauccagaaggagaucgaccgccugaacgaggucgccaagaaccucaacgagucccugaucgaccugcaggagcucgggaaguacgagcaguacaucaaguggccgugguacaucuggcugggcuucaucgccggccugaucgcgaucgugauggugaccaucaugcucugcugcaugaccagcugcugcuccugccugaaggggugcugcagcugcggcuccugcugcaaguucgacgaggacgacagcgagcccguccugaagggggugaagcuccacuacacgugaggacuagucccuguucccagagcccacuuuuuuuucuuuuuuugaaauaaaauagccugucuuucagaucucaaaggcucuuuucagagccaccaaaaaaaaaaaaaaaaaaaaaaaaaaaaaaaaaaaaaaaaaaaaaaaaaaaaaaaaaaaaaaaaaaaaaaaaaaaaaaaaaaaaaaaaaaaaaaaaaaaaa

SEQ ID NO: 23427 - RNA, 4094 nt, Artificial Sequence; identical to SEQ ID NO: 148
  SARS-CoV-2/Wuhan/WIV05/2019__EPI_ISL_402128 spike protein mRNA gc (1-1273) R9488, R9492, R10161

SEQ ID NO: 23428 - RNA, 4094 nt, Artificial Sequence; identical to SEQ ID NO: 12279
  SARS-CoV-2/Wuhan/WIV05/2019__EPI_ISL_402128 spike protein mRNA gc (1-1273)(D614G)

SEQ ID NO: 23429 - RNA, 4094 nt, Artificial Sequence
  SARS-CoV-2/Wuhan/WIV05/2019__EPI_ISL_402128 spike protein mRNA gc (1-1273)(A222V_D614G)
aggagagucccgcagucggcguccagcggcucugcuuguucgugugugugucguugcaggccuuauucaagcuuaccauguucguguuccugguccuccugccccuggugagcucccagugcgugaaccucaccacccgcacgcagcugccgcccgccuacaccaacagcuucacccggggcgucuacuaccccgacaagguguuccgcuccagcgugcugcacuccacccaggaccucuuccugcccuucuucagcaacgucacgugguuccacgccauccacguguccgggaccaacggcaccaagcgguucgacaacccggugcugcccuucaacgacggggucuacuucgcgagcaccgagaaguccaacaucauccgcggcuggaucuucgggacgacccucgacagcaagacccagucccugcugaucgugaacaacgccaccaacguggucaucaaggugugcgaguuccaguucugcaacgaccccuuccucggcguguacuaccacaagaacaacaagagcuggauggaguccgaguuccgggucuacagcuccgccaacaacugcacguucgaguacgugagccagcccuuccugauggaccuggagggcaagcaggggaacuucaagaaccuccgcgaguucguguucaagaacaucgacggcuacuucaagaucuacuccaagcacaccccgaucaaccugguccgggaccugccccagggguucagcgugcucgagccccugguggaccugcccaucggcaucaacaucacccgcuuccagacccuccuggcccugcaccgguccuaccucacgccgggggacagcagcuccggcuggaccgccggcgcggccgccuacuacgucggguaccugcagccccgcaccuuccugcucaaguacaacgagaacggcaccaucacggacgccguggacugcgcgcuggacccccugagcgagaccaagugcacccucaaguccuucaccguggagaaggggaucuaccagacgagcaacuuccggguccagcccaccgaguccaucgugcgcuucccgaacaucaccaaccugugccccuucggcgaggucuucaacgccacccgguucgccagcguguacgccuggaaccgcaagcggaucuccaacugcguggccgacuacagcguccuguacaacuccgcgagcuucuccacguucaagugcuacggcgugagccccaccaagcucaacgaccugugcuucaccaacguguacgccgacuccuucgucauccgcggggacgaggugcggcagaucgcccccggccagaccgggaagaucgccgacuacaacuacaagcugccggacgacuucacgggcugcgugaucgccuggaacagcaacaaccucgacuccaaggucgggggcaacuacaacuaccuguaccgccuguuccgcaagagcaaccucaagcccuucgagcgggacaucuccaccgagaucuaccaggcgggcagcacccccugcaacgggguggagggcuucaacugcuacuucccccugcaguccuacggguuccagccgaccaacggcgugggguaccagcccuaccgggucguggugcugagcuucgagcuccugcacgcccccgccacggucugcggccccaagaaguccaccaaccuggugaagaacaagugcgugaacuucaacuucaacggccucaccgggaccggcguccugaccgagagcaacaagaaguuccugccguuccagcaguucgggcgcgacaucgccgacacgaccgacgccgugcgcgacccccagacccuggagauccucgacaucacccccugcagcuucggcgggguguccgucaucacgccgggcaccaacaccagcaaccagguggcggugcuguaccagggcgucaacugcaccgaggugcccguggccauccacgccgaccagcugacgcccaccuggcgggucuacuccaccgggagcaacguguuccagacccgcgccggcugccucaucggggccgagcacgugaacaacuccuacgagugcgacauccccaucggcgcgggcaucugcgccagcuaccagacgcagaccaacuccccgcggcgcgcccggagcgucgccucccagagcaucaucgcguacaccaugucccugggggccgagaacagcguggccuacuccaacaacagcaucgccauccccaccaacuucacgaucuccgugaccaccgagauccugcccgucagcaugaccaagacgagcguggacugcaccauguacaucugcggcgacuccaccgagugcagcaaccuccugcugcaguacggguccuucugcacccagcucaaccgcgcccugacgggcaucgcgguggagcaggacaagaacacccaggaggucuucgcccaggugaagcagaucuacaagacgcccccgaucaaggacuucgggggcuucaacuucagccagauccugcccgaccccuccaagcccagcaagcgguccuucaucgaggaccuccuguucaacaaggugacccuggccgacgccggcuucaucaagcaguacggggacugccucggcgacaucgccgcgcgcgaccugaucugcgcccagaaguucaacgggcugaccguccucccgccccugcugaccgacgagaugaucgcccaguacaccagcgcccuccuggccggcaccaucacguccggguggaccuucggcgcgggcgccgcccugcagauccccuucgccaugcagauggcguaccgguucaacgggaucggcgugacccagaacgugcucuacgagaaccagaagcugaucgccaaccaguucaacagcgccaucgggaagauccaggacucccugagcuccaccgccagcgcccucggcaagcugcaggacgucgugaaccagaacgcgcaggcccugaacacgcucgugaagcagcuguccagcaacuucggggccaucuccagcguccugaacgacauccucucccgccuggacaagguggaggccgaggugcagaucgaccggcugaucaccggccgccuccagagccugcagaccuacgucacccagcagcugauccgggccgcggagauccgcgccagcgccaaccucgccgccaccaagauguccgagugcgugcugggccagagcaagcggguggacuucugcgggaagggcuaccaccugauguccuucccccagagcgcgccgcacggggucguguuccuccacgucacguacgugcccgcccaggagaagaacuucaccaccgcccccgccaucugccacgacggcaaggcgcacuucccccgcgaggggguguucgucuccaacggcacccacugguucgugacgcagcggaacuucuacgagccgcagaucaucaccaccgacaacaccuucgugagcggcaacugcgacgucgugaucgggaucgugaacaacacggucuacgacccccugcagcccgagcuggacuccuucaaggaggagcucgacaaguacuucaagaaccacaccagccccgacguggaccugggcgacaucuccgggaucaacgccagcguggucaacauccagaaggagaucgaccgccugaacgagguggccaagaaccucaacgagucccugaucgaccugcaggagcucggcaaguacgagcaguacaucaaguggccgugguacaucuggcugggcuucaucgccgggcugaucgccaucgugauggucaccaucaugcucugcugcaugaccagcugcugcuccugccugaagggcugcugcagcugcggguccugcugcaaguucgacgaggacgacagcgagcccgugcugaagggcgugaagcuccacuacacgugaggacuagucccuguucccagagcccacuuuuuuuucuuuuuuugaaauaaaauagccugucuuucagaucucaaaggcucuuuucagagccaccaaaaaaaaaaaaaaaaaaaaaaaaaaaaaaaaaaaaaaaaaaaaaaaaaaaaaaaaaaaaaaaaaaaaaaaaaaaaaaaaaaaaaaaaaaaaaaaaaaaaa

SEQ ID NO: 23430 - RNA, 4094 nt, Artificial Sequence
  SARS-CoV-2/Wuhan/WIV05/2019__EPI_ISL_402128 spike protein mRNA gc (1-1273)(N439K_D614G)
aggagagucccgcagucggcguccagcggcucugcuuguucgugugugugucguugcaggccuuauucaagcuuaccauguucguguuccugguccuccugccccuggugagcucccagugcgugaaccucaccacccgcacgcagcugccgcccgccuacaccaacagcuucacccggggcgucuacuaccccgacaagguguuccgcuccagcgugcugcacuccacccaggaccucuuccugcccuucuucagcaacgucacgugguuccacgccauccacguguccgggaccaacggcaccaagcgguucgacaacccggugcugcccuucaacgacggggucuacuucgcgagcaccgagaaguccaacaucauccgcggcuggaucuucgggacgacccucgacagcaagacccagucccugcugaucgugaacaacgccaccaacguggucaucaaggugugcgaguuccaguucugcaacgaccccuuccucggcguguacuaccacaagaacaacaagagcuggauggaguccgaguuccgggucuacagcuccgccaacaacugcacguucgaguacgugagccagcccuuccugauggaccuggagggcaagcaggggaacuucaagaaccuccgcgaguucguguucaagaacaucgacggcuacuucaagaucuacuccaagcacaccccgaucaaccugguccgggaccugccccagggguucagcgcccucgagccccugguggaccugcccaucggcaucaacaucacccgcuuccagacccuccuggcccugcaccgguccuaccucacgccgggggacagcagcuccggcuggaccgcgggcgccgccgccuacuacgugggguaccugcagccccgcaccuuccugcucaaguacaacgagaacggcaccaucacggacgcggucgacugcgcccuggacccccugagcgagaccaagugcacccucaaguccuucaccguggagaaggggaucuaccagacgagcaacuuccgggugcagcccaccgaguccaucguccgcuucccgaacaucaccaaccugugccccuucggcgagguguucaacgccacccgguucgccagcgucuacgccuggaaccgcaagcggaucuccaacugcguggcggacuacagcgugcuguacaacuccgccagcuucuccacguucaagugcuacggcgucagccccaccaagcucaacgaccugugcuucaccaacguguacgccgacuccuucgugauccgcggggacgagguccggcagaucgcccccggccagaccgggaagaucgccgacuacaacuacaagcugccggacgacuucacgggcugcgugaucgcguggaacagcaagaaccucgacuccaaggucgggggcaacuacaacuaccuguaccgccuguuccgcaagagcaaccucaagcccuucgagcgggacaucuccaccgagaucuaccaggccggcagcacccccugcaacgggguggagggcuucaacugcuacuucccccugcaguccuacggguuccagccgaccaacggcgugggguaccagcccuaccggguggucgugcugagcuucgagcuccugcacgcccccgccacggugugcggccccaagaaguccaccaaccuggucaagaacaagugcgugaacuucaacuucaacggccucaccgggaccggcgugcugaccgagagcaacaagaaguuccugccguuccagcaguucgggcgcgacaucgccgacacgaccgacgcgguccgcgacccccagacccuggagauccucgacaucacccccugcagcuucggcgggguguccgugaucacgccgggcaccaacaccagcaaccaggucgccgugcuguaccagggcgugaacugcaccgagguccccguggccauccacgccgaccagcugacgcccaccuggcggguguacuccaccgggagcaacgucuuccagacccgcgccggcugccucaucggggcggagcacgugaacaacuccuacgagugcgacauccccaucggcgccggcaucugcgccagcuaccagacgcagaccaacuccccgcggcgcgcccggagcguggcgucccagagcaucaucgccuacaccaugucccugggggccgagaacagcgucgccuacuccaacaacagcaucgccauccccaccaacuucacgaucuccgugaccaccgagauccugcccgugagcaugaccaagacgagcgucgacugcaccauguacaucugcggcgacuccaccgagugcagcaaccuccugcugcaguacggguccuucugcacccagcucaaccgcgcgcugacgggcaucgccguggagcaggacaagaacacccaggagguguucgcccaggucaagcagaucuacaagacgcccccgaucaaggacuucgggggcuucaacuucagccagauccugcccgaccccuccaagcccagcaagcgguccuucaucgaggaccuccuguucaacaaggugacccuggccgacgccggcuucaucaagcaguacggggacugccucggcgacaucgcggcccgcgaccugaucugcgcccagaaguucaacgggcugaccgugcucccgccccugcugaccgacgagaugaucgcccaguacaccagcgcccuccuggcgggcaccaucacguccggguggaccuucggcgccggcgccgcccugcagauccccuucgcgaugcagauggccuaccgguucaacgggaucggcgucacccagaacgugcucuacgagaaccagaagcugaucgccaaccaguucaacagcgccaucgggaagauccaggacucccugagcuccaccgccagcgcgcucggcaagcugcaggacguggucaaccagaacgcccaggcccugaacacgcucgugaagcagcuguccagcaacuucggggccaucuccagcgugcugaacgacauccucucccgccuggacaaggucgaggccgaggugcagaucgaccggcugaucaccggccgccuccagagccugcagaccuacgugacccagcagcugauccgggcggccgagauccgcgccagcgccaaccucgccgcgaccaagauguccgagugcguccugggccagagcaagcggguggacuucugcgggaagggcuaccaccugauguccuucccccagagcgccccgcacgggguggucuuccuccacgugacguacguccccgcccaggagaagaacuucaccaccgcccccgcgaucugccacgacggcaaggcccacuucccccgcgaggggguguucguguccaacggcacccacugguucgucacgcagcggaacuucuacgagccgcagaucaucaccaccgacaacaccuucgugagcggcaacugcgacguggucaucgggaucgugaacaacacgguguacgacccccugcagcccgagcuggacuccuucaaggaggagcucgacaaguacuucaagaaccacaccagccccgacgucgaccugggcgacaucuccgggaucaacgccagcguggugaacauccagaaggagaucgaccgccugaacgaggucgccaagaaccucaacgagucccugaucgaccugcaggagcucggcaaguacgagcaguacaucaaguggccgugguacaucuggcugggcuucaucgccgggcugaucgcgaucgugauggugaccaucaugcucugcugcaugaccagcugcugcuccugccugaagggcugcugcagcugcggguccugcugcaaguucgacgaggacgacagcgagcccguccugaagggcgugaagcuccacuacacgugaggacuagucccuguucccagagcccacuuuuuuuucuuuuuuugaaauaaaauagccugucuuucagaucucaaaggcucuuuucagagccaccaaaaaaaaaaaaaaaaaaaaaaaaaaaaaaaaaaaaaaaaaaaaaaaaaaaaaaaaaaaaaaaaaaaaaaaaaaaaaaaaaaaaaaaaaaaaaaaaaaaaa

SEQ ID NO: 23431 - RNA, 4094 nt, Artificial Sequence
  SARS-CoV-2/Wuhan/WIV05/2019__EPI_ISL_402128 spike protein mRNA gc (1-1273)(S477N_D614G)
aggagagucccgcagucggcguccagcggcucugcuuguucgugugugugucguugcaggccuuauucaagcuuaccauguucguguuccugguccuccugccccuggugagcucccagugcgugaaccucaccacccgcacgcagcugccgcccgccuacaccaacagcuucacccggggcgucuacuaccccgacaagguguuccgcuccagcgugcugcacuccacccaggaccucuuccugcccuucuucagcaacgucacgugguuccacgccauccacguguccgggaccaacggcaccaagcgguucgacaacccggugcugcccuucaacgacggggucuacuucgcgagcaccgagaaguccaacaucauccgcggcuggaucuucgggacgacccucgacagcaagacccagucccugcugaucgugaacaacgccaccaacguggucaucaaggugugcgaguuccaguucugcaacgaccccuuccucggcguguacuaccacaagaacaacaagagcuggauggaguccgaguuccgggucuacagcuccgccaacaacugcacguucgaguacgugagccagcccuuccugauggaccuggagggcaagcaggggaacuucaagaaccuccgcgaguucguguucaagaacaucgacggcuacuucaagaucuacuccaagcacaccccgaucaaccugguccgggaccugccccagggguucagcgcccucgagccccugguggaccugcccaucggcaucaacaucacccgcuuccagacccuccuggcccugcaccgguccuaccucacgccgggggacagcagcuccggcuggaccgcgggcgccgccgccuacuacgugggguaccugcagccccgcaccuuccugcucaaguacaacgagaacggcaccaucacggacgcggucgacugcgcccuggacccccugagcgagaccaagugcacccucaaguccuucaccguggagaaggggaucuaccagacgagcaacuuccgggugcagcccaccgaguccaucguccgcuucccgaacaucaccaaccugugccccuucggcgagguguucaacgccacccgguucgccagcgucuacgccuggaaccgcaagcggaucuccaacugcguggcggacuacagcgugcuguacaacuccgccagcuucuccacguucaagugcuacggcgucagccccaccaagcucaacgaccugugcuucaccaacguguacgccgacuccuucgugauccgcggggacgagguccggcagaucgcccccggccagaccgggaagaucgccgacuacaacuacaagcugccggacgacuucacgggcugcgugaucgcguggaacagcaacaaccucgacuccaaggucgggggcaacuacaacuaccuguaccgccuguuccgcaagagcaaccucaagcccuucgagcgggacaucuccaccgagaucuaccaggccggcaacacccccugcaacgggguggagggcuucaacugcuacuucccccugcagagcuacggguuccagccgaccaacggcgugggguaccagcccuaccggguggucgugcuguccuucgagcuccugcacgcccccgccacggugugcggccccaagaaguccaccaaccuggucaagaacaagugcgugaacuucaacuucaacggccucaccgggaccggcgugcugaccgagagcaacaagaaguuccugccguuccagcaguucgggcgcgacaucgccgacacgaccgacgcgguccgcgacccccagacccuggagauccucgacaucacccccugcagcuucggcggggugagcgugaucacgccgggcaccaacaccuccaaccaggucgccgugcuguaccagggcgugaacugcaccgagguccccguggccauccacgccgaccagcugacgcccaccuggcggguguacagcaccggguccaacgucuuccagacccgcgccggcugccucaucggggcggagcacgugaacaacagcuacgagugcgacauccccaucggcgccggcaucugcgccuccuaccagacgcagaccaacagcccgcggcgcgcccgguccguggcgagccaguccaucaucgccuacaccaugagccugggggccgagaacuccgucgccuacagcaacaacuccaucgccauccccaccaacuucacgaucagcgugaccaccgagauccugcccguguccaugaccaagacgagcgucgacugcaccauguacaucugcggcgacagcaccgagugcuccaaccuccugcugcaguacgggagcuucugcacccagcucaaccgcgcgcugacgggcaucgccguggagcaggacaagaacacccaggagguguucgcccaggucaagcagaucuacaagacgcccccgaucaaggacuucgggggcuucaacuucucccagauccugcccgaccccagcaagcccuccaagcggagcuucaucgaggaccuccuguucaacaaggugacccuggccgacgccggcuucaucaagcaguacggggacugccucggcgacaucgcggcccgcgaccugaucugcgcccagaaguucaacgggcugaccgugcucccgccccugcugaccgacgagaugaucgcccaguacaccuccgcccuccuggcgggcaccaucacgagcggguggaccuucggcgccggcgccgcccugcagauccccuucgcgaugcagauggccuaccgguucaacgggaucggcgucacccagaacgugcucuacgagaaccagaagcugaucgccaaccaguucaacuccgccaucgggaagauccaggacagccuguccagcaccgccuccgcgcucggcaagcugcaggacguggucaaccagaacgcccaggcccugaacacgcucgugaagcagcugagcuccaacuucggggccaucagcuccgugcugaacgacauccucagccgccuggacaaggucgaggccgaggugcagaucgaccggcugaucaccggccgccuccagucccugcagaccuacgugacccagcagcugauccgggcggccgagauccgcgccagcgccaaccucgccgcgaccaagaugagcgagugcguccugggccaguccaagcggguggacuucugcgggaagggcuaccaccugaugagcuucccccaguccgccccgcacgggguggucuuccuccacgugacguacguccccgcccaggagaagaacuucaccaccgcccccgcgaucugccacgacggcaaggcccacuucccccgcgaggggguguucgugagcaacggcacccacugguucgucacgcagcggaacuucuacgagccgcagaucaucaccaccgacaacaccuucguguccggcaacugcgacguggucaucgggaucgugaacaacacgguguacgacccccugcagcccgagcuggacagcuucaaggaggagcucgacaaguacuucaagaaccacaccucccccgacgucgaccugggcgacaucagcgggaucaacgccuccguggugaacauccagaaggagaucgaccgccugaacgaggucgccaagaaccucaacgagagccugaucgaccugcaggagcucggcaaguacgagcaguacaucaaguggccgugguacaucuggcugggcuucaucgccgggcugaucgcgaucgugauggugaccaucaugcucugcugcaugaccuccugcugcagcugccugaagggcugcugcuccugcgggagcugcugcaaguucgacgaggacgacuccgagcccguccugaagggcgugaagcuccacuacacgugaggacuagucccuguucccagagcccacuuuuuuuucuuuuuuugaaauaaaauagccugucuuucagaucucaaaggcucuuuucagagccaccaaaaaaaaaaaaaaaaaaaaaaaaaaaaaaaaaaaaaaaaaaaaaaaaaaaaaaaaaaaaaaaaaaaaaaaaaaaaaaaaaaaaaaaaaaaaaaaaaaaaa

SEQ ID NO: 23432 - RNA, 4094 nt, Artificial Sequence
  SARS-CoV-2/Wuhan/WIV05/2019__EPI_ISL_402128 spike protein mRNA gc (1-1273)(N501Y_D614G)
aggagagucccgcagucggcguccagcggcucugcuuguucgugugugugucguugcaggccuuauucaagcuuaccauguucguguuccugguccuccugccccuggugagcucccagugcgugaaccucaccacccgcacgcagcugccgcccgccuacaccaacagcuucacccggggcgucuacuaccccgacaagguguuccgcuccagcgugcugcacuccacccaggaccucuuccugcccuucuucagcaacgucacgugguuccacgccauccacguguccgggaccaacggcaccaagcgguucgacaacccggugcugcccuucaacgacggggucuacuucgcgagcaccgagaaguccaacaucauccgcggcuggaucuucgggacgacccucgacagcaagacccagucccugcugaucgugaacaacgccaccaacguggucaucaaggugugcgaguuccaguucugcaacgaccccuuccucggcguguacuaccacaagaacaacaagagcuggauggaguccgaguuccgggucuacagcuccgccaacaacugcacguucgaguacgugagccagcccuuccugauggaccuggagggcaagcaggggaacuucaagaaccuccgcgaguucguguucaagaacaucgacggcuacuucaagaucuacuccaagcacaccccgaucaaccugguccgggaccugccccagggguucagcgcccucgagccccugguggaccugcccaucggcaucaacaucacccgcuuccagacccuccuggcccugcaccgguccuaccucacgccgggggacagcagcuccggcuggaccgcgggcgccgccgccuacuacgugggguaccugcagccccgcaccuuccugcucaaguacaacgagaacggcaccaucacggacgcggucgacugcgcccuggacccccugagcgagaccaagugcacccucaaguccuucaccguggagaaggggaucuaccagacgagcaacuuccgggugcagcccaccgaguccaucguccgcuucccgaacaucaccaaccugugccccuucggcgagguguucaacgccacccgguucgccagcgucuacgccuggaaccgcaagcggaucuccaacugcguggcggacuacagcgugcuguacaacuccgccagcuucuccacguucaagugcuacggcgucagccccaccaagcucaacgaccugugcuucaccaacguguacgccgacuccuucgugauccgcggggacgagguccggcagaucgcccccggccagaccgggaagaucgccgacuacaacuacaagcugccggacgacuucacgggcugcgugaucgcguggaacagcaacaaccucgacuccaaggucgggggcaacuacaacuaccuguaccgccuguuccgcaagagcaaccucaagcccuucgagcgggacaucuccaccgagaucuaccaggccggcagcacccccugcaacgggguggagggcuucaacugcuacuucccccugcaguccuacggguuccagccgaccuacggcgugggguaccagcccuaccggguggucgugcugagcuucgagcuccugcacgcccccgccacggugugcggccccaagaaguccaccaaccuggucaagaacaagugcgugaacuucaacuucaacggccucaccgggaccggcgugcugaccgagagcaacaagaaguuccugccguuccagcaguucgggcgcgacaucgccgacacgaccgacgcgguccgcgacccccagacccuggagauccucgacaucacccccugcagcuucggcgggguguccgugaucacgccgggcaccaacaccagcaaccaggucgccgugcuguaccagggcgugaacugcaccgagguccccguggccauccacgccgaccagcugacgcccaccuggcggguguacuccaccgggagcaacgucuuccagacccgcgccggcugccucaucggggcggagcacgugaacaacuccuacgagugcgacauccccaucggcgccggcaucugcgccagcuaccagacgcagaccaacuccccgcggcgcgcccggagcguggcgucccagagcaucaucgccuacaccaugucccugggggccgagaacagcgucgccuacuccaacaacagcaucgccauccccaccaacuucacgaucuccgugaccaccgagauccugcccgugagcaugaccaagacgagcgucgacugcaccauguacaucugcggcgacuccaccgagugcagcaaccuccugcugcaguacggguccuucugcacccagcucaaccgcgcgcugacgggcaucgccguggagcaggacaagaacacccaggagguguucgcccaggucaagcagaucuacaagacgcccccgaucaaggacuucgggggcuucaacuucagccagauccugcccgaccccuccaagcccagcaagcgguccuucaucgaggaccuccuguucaacaaggugacccuggccgacgccggcuucaucaagcaguacggggacugccucggcgacaucgcggcccgcgaccugaucugcgcccagaaguucaacgggcugaccgugcucccgccccugcugaccgacgagaugaucgcccaguacaccagcgcccuccuggcgggcaccaucacguccggguggaccuucggcgccggcgccgcccugcagauccccuucgcgaugcagauggccuaccgguucaacgggaucggcgucacccagaacgugcucuacgagaaccagaagcugaucgccaaccaguucaacagcgccaucgggaagauccaggacucccugagcuccaccgccagcgcgcucggcaagcugcaggacguggucaaccagaacgcccaggcccugaacacgcucgugaagcagcuguccagcaacuucggggccaucuccagcgugcugaacgacauccucucccgccuggacaaggucgaggccgaggugcagaucgaccggcugaucaccggccgccuccagagccugcagaccuacgugacccagcagcugauccgggcggccgagauccgcgccagcgccaaccucgccgcgaccaagauguccgagugcguccugggccagagcaagcggguggacuucugcgggaagggcuaccaccugauguccuucccccagagcgccccgcacgggguggucuuccuccacgugacguacguccccgcccaggagaagaacuucaccaccgcccccgcgaucugccacgacggcaaggcccacuucccccgcgaggggguguucguguccaacggcacccacugguucgucacgcagcggaacuucuacgagccgcagaucaucaccaccgacaacaccuucgugagcggcaacugcgacguggucaucgggaucgugaacaacacgguguacgacccccugcagcccgagcuggacuccuucaaggaggagcucgacaaguacuucaagaaccacaccagccccgacgucgaccugggcgacaucuccgggaucaacgccagcguggugaacauccagaaggagaucgaccgccugaacgaggucgccaagaaccucaacgagucccugaucgaccugcaggagcucggcaaguacgagcaguacaucaaguggccgugguacaucuggcugggcuucaucgccgggcugaucgcgaucgugauggugaccaucaugcucugcugcaugaccagcugcugcuccugccugaagggcugcugcagcugcggguccugcugcaaguucgacgaggacgacagcgagcccguccugaagggcgugaagcuccacuacacgugaggacuagucccuguucccagagcccacuuuuuuuucuuuuuuugaaauaaaauagccugucuuucagaucucaaaggcucuuuucagagccaccaaaaaaaaaaaaaaaaaaaaaaaaaaaaaaaaaaaaaaaaaaaaaaaaaaaaaaaaaaaaaaaaaaaaaaaaaaaaaaaaaaaaaaaaaaaaaaaaaaaaa

SEQ ID NO: 23433 - RNA, 4088 nt, Artificial Sequence
  SARS-CoV-2/Wuhan/WIV05/2019__EPI_ISL_402128 spike protein mRNA gc (1-1273)(H69del_V70del_D614G)
aggagagucccgcagucggcguccagcggcucugcuuguucgugugugugucguugcaggccuuauucaagcuuaccauguucguguuccugguccuccugccccuggugagcucccagugcgugaaccucaccacccgcacgcagcugccgcccgccuacaccaacagcuucacccggggcgucuacuaccccgacaagguguuccgcuccagcgugcugcacuccacccaggaccucuuccugcccuucuucagcaacgucacgugguuccacgccaucuccgggaccaacggcaccaagcgguucgacaacccggugcugcccuucaacgacgggguguacuucgcgagcaccgagaaguccaacaucauccgcggcuggaucuucgggacgacccucgacagcaagacccagucccugcugaucgucaacaacgccaccaacguggugaucaaggucugcgaguuccaguucugcaacgaccccuuccucggcguguacuaccacaagaacaacaagagcuggauggaguccgaguuccggguguacagcuccgccaacaacugcacguucgaguacgucagccagcccuuccugauggaccuggagggcaagcaggggaacuucaagaaccuccgcgaguucguguucaagaacaucgacggcuacuucaagaucuacuccaagcacaccccgaucaaccuggugcgggaccugccccagggguucagcgcccucgagccccuggucgaccugcccaucggcaucaacaucacccgcuuccagacccuccuggcccugcaccgguccuaccucacgccgggggacagcagcuccggcuggaccgcgggcgccgccgccuacuacgugggguaccugcagccccgcaccuuccugcucaaguacaacgagaacggcaccaucacggacgcgguggacugcgcccuggacccccugagcgagaccaagugcacccucaaguccuucaccgucgagaaggggaucuaccagacgagcaacuuccgggugcagcccaccgaguccaucgugcgcuucccgaacaucaccaaccugugccccuucggcgaggucuucaacgccacccgguucgccagcguguacgccuggaaccgcaagcggaucuccaacugcgucgcggacuacagcgugcuguacaacuccgccagcuucuccacguucaagugcuacggcgugagccccaccaagcucaacgaccugugcuucaccaacgucuacgccgacuccuucgugauccgcggggacgaggugcggcagaucgcccccggccagaccgggaagaucgccgacuacaacuacaagcugccggacgacuucacgggcugcgucaucgcguggaacagcaacaaccucgacuccaaggucgggggcaacuacaacuaccuguaccgccuguuccgcaagagcaaccucaagcccuucgagcgggacaucuccaccgagaucuaccaggccggcagcacccccugcaacgggguggagggcuucaacugcuacuucccccugcaguccuacggguuccagccgaccaacggcgugggguaccagcccuaccggguggugguccugagcuucgagcuccugcacgcccccgccacggugugcggccccaagaaguccaccaaccuggugaagaacaagugcgucaacuucaacuucaacggccucaccgggaccggcgugcugaccgagagcaacaagaaguuccugccguuccagcaguucgggcgcgacaucgccgacacgaccgacgcggugcgcgacccccagacccuggagauccucgacaucacccccugcagcuucggcggggucuccgugaucacgccgggcaccaacaccagcaaccagguggccguccuguaccagggcgugaacugcaccgaggugcccgucgccauccacgccgaccagcugacgcccaccuggcggguguacuccaccgggagcaacguguuccagacccgcgccggcugccucaucggggcggagcacgucaacaacuccuacgagugcgacauccccaucggcgccggcaucugcgccagcuaccagacgcagaccaacuccccgcggcgcgcccggagcguggcgucccagagcaucaucgccuacaccaugucccugggggccgagaacagcguggccuacuccaacaacagcaucgccauccccaccaacuucacgaucuccgucaccaccgagauccugcccgugagcaugaccaagacgagcguggacugcaccauguacaucugcggcgacuccaccgagugcagcaaccuccugcugcaguacggguccuucugcacccagcucaaccgcgcgcugacgggcaucgccgucgagcaggacaagaacacccaggagguguucgcccaggugaagcagaucuacaagacgcccccgaucaaggacuucgggggcuucaacuucagccagauccugcccgaccccuccaagcccagcaagcgguccuucaucgaggaccuccuguucaacaaggucacccuggccgacgccggcuucaucaagcaguacggggacugccucggcgacaucgcggcccgcgaccugaucugcgcccagaaguucaacgggcugaccgugcucccgccccugcugaccgacgagaugaucgcccaguacaccagcgcccuccuggcgggcaccaucacguccggguggaccuucggcgccggcgccgcccugcagauccccuucgcgaugcagauggccuaccgguucaacgggaucggcgugacccagaacguccucuacgagaaccagaagcugaucgccaaccaguucaacagcgccaucgggaagauccaggacucccugagcuccaccgccagcgcgcucggcaagcugcaggacguggugaaccagaacgcccaggcccugaacacgcucgucaagcagcuguccagcaacuucggggccaucuccagcgugcugaacgacauccucucccgccuggacaagguggaggccgagguccagaucgaccggcugaucaccggccgccuccagagccugcagaccuacgugacccagcagcugauccgggcggccgagauccgcgccagcgccaaccucgccgcgaccaagauguccgagugcgugcugggccagagcaagcgggucgacuucugcgggaagggcuaccaccugauguccuucccccagagcgccccgcacggggugguguuccuccacgucacguacgugcccgcccaggagaagaacuucaccaccgcccccgcgaucugccacgacggcaaggcccacuucccccgcgagggggucuucguguccaacggcacccacugguucgugacgcagcggaacuucuacgagccgcagaucaucaccaccgacaacaccuucgucagcggcaacugcgacguggugaucgggaucgucaacaacacgguguacgacccccugcagcccgagcuggacuccuucaaggaggagcucgacaaguacuucaagaaccacaccagccccgacguggaccugggcgacaucuccgggaucaacgccagcgucgugaacauccagaaggagaucgaccgccugaacgagguggccaagaaccucaacgagucccugaucgaccugcaggagcucggcaaguacgagcaguacaucaaguggccgugguacaucuggcugggcuucaucgccgggcugaucgcgaucgucauggugaccaucaugcucugcugcaugaccagcugcugcuccugccugaagggcugcugcagcugcggguccugcugcaaguucgacgaggacgacagcgagcccgugcugaagggcgucaagcuccacuacacgugaggacuagucccuguucccagagcccacuuuuuuuucuuuuuuugaaauaaaauagccugucuuucagaucucaaaggcucuuuucagagccaccaaaaaaaaaaaaaaaaaaaaaaaaaaaaaaaaaaaaaaaaaaaaaaaaaaaaaaaaaaaaaaaaaaaaaaaaaaaaaaaaaaaaaaaaaaaaaaaaaaaaa

SEQ ID NO: 23434 - RNA, 4094 nt, Artificial Sequence
  SARS-CoV-2/Wuhan/WIV05/2019__EPI_ISL_402128 spike protein mRNA gc (1-1273)(Y453F_D614G)
aggagagucccgcagucggcguccagcggcucugcuuguucgugugugugucguugcaggccuuauucaagcuuaccauguucguguuccugguccuccugccccuggugagcucccagugcgugaaccucaccacccgcacgcagcugccgcccgccuacaccaacagcuucacccggggcgucuacuaccccgacaagguguuccgcuccagcgugcugcacuccacccaggaccucuuccugcccuucuucagcaacgucacgugguuccacgccauccacguguccgggaccaacggcaccaagcgguucgacaacccggugcugcccuucaacgacggggucuacuucgcgagcaccgagaaguccaacaucauccgcggcuggaucuucgggacgacccucgacagcaagacccagucccugcugaucgugaacaacgccaccaacguggucaucaaggugugcgaguuccaguucugcaacgaccccuuccucggcguguacuaccacaagaacaacaagagcuggauggaguccgaguuccgggucuacagcuccgccaacaacugcacguucgaguacgugagccagcccuuccugauggaccuggagggcaagcaggggaacuucaagaaccuccgcgaguucguguucaagaacaucgacggcuacuucaagaucuacuccaagcacaccccgaucaaccugguccgggaccugccccagggguucagcgcccucgagccccugguggaccugcccaucggcaucaacaucacccgcuuccagacccuccuggcccugcaccgguccuaccucacgccgggggacagcagcuccggcuggaccgcgggcgccgccgccuacuacgugggguaccugcagccccgcaccuuccugcucaaguacaacgagaacggcaccaucacggacgcggucgacugcgcccuggacccccugagcgagaccaagugcacccucaaguccuucaccguggagaaggggaucuaccagacgagcaacuuccgggugcagcccaccgaguccaucguccgcuucccgaacaucaccaaccugugccccuucggcgagguguucaacgccacccgguucgccagcgucuacgccuggaaccgcaagcggaucuccaacugcguggcggacuacagcgugcuguacaacuccgccagcuucuccacguucaagugcuacggcgucagccccaccaagcucaacgaccugugcuucaccaacguguacgccgacuccuucgugauccgcggggacgagguccggcagaucgcccccggccagaccgggaagaucgccgacuacaacuacaagcugccggacgacuucacgggcugcgugaucgcguggaacagcaacaaccucgacuccaaggucgggggcaacuacaacuaccuguuccgccuguuccgcaagagcaaccucaagcccuucgagcgggacaucuccaccgagaucuaccaggccggcagcacccccugcaacgggguggagggcuucaacugcuacuucccccugcaguccuacggguuccagccgaccaacggcgugggguaccagcccuaccggguggucgugcugagcuucgagcuccugcacgcccccgccacggugugcggccccaagaaguccaccaaccuggucaagaacaagugcgugaacuucaacuucaacggccucaccgggaccggcgugcugaccgagagcaacaagaaguuccugccguuccagcaguucgggcgcgacaucgccgacacgaccgacgcgguccgcgacccccagacccuggagauccucgacaucacccccugcagcuucggcgggguguccgugaucacgccgggcaccaacaccagcaaccaggucgccgugcuguaccagggcgugaacugcaccgagguccccguggccauccacgccgaccagcugacgcccaccuggcggguguacuccaccgggagcaacgucuuccagacccgcgccggcugccucaucggggcggagcacgugaacaacuccuacgagugcgacauccccaucggcgccggcaucugcgccagcuaccagacgcagaccaacuccccgcggcgcgcccggagcguggcgucccagagcaucaucgccuacaccaugucccugggggccgagaacagcgucgccuacuccaacaacagcaucgccauccccaccaacuucacgaucuccgugaccaccgagauccugcccgugagcaugaccaagacgagcgucgacugcaccauguacaucugcggcgacuccaccgagugcagcaaccuccugcugcaguacggguccuucugcacccagcucaaccgcgcgcugacgggcaucgccguggagcaggacaagaacacccaggagguguucgcccaggucaagcagaucuacaagacgcccccgaucaaggacuucgggggcuucaacuucagccagauccugcccgaccccuccaagcccagcaagcgguccuucaucgaggaccuccuguucaacaaggugacccuggccgacgccggcuucaucaagcaguacggggacugccucggcgacaucgcggcccgcgaccugaucugcgcccagaaguucaacgggcugaccgugcucccgccccugcugaccgacgagaugaucgcccaguacaccagcgcccuccuggcgggcaccaucacguccggguggaccuucggcgccggcgccgcccugcagauccccuucgcgaugcagauggccuaccgguucaacgggaucggcgucacccagaacgugcucuacgagaaccagaagcugaucgccaaccaguucaacagcgccaucgggaagauccaggacucccugagcuccaccgccagcgcgcucggcaagcugcaggacguggucaaccagaacgcccaggcccugaacacgcucgugaagcagcuguccagcaacuucggggccaucuccagcgugcugaacgacauccucucccgccuggacaaggucgaggccgaggugcagaucgaccggcugaucaccggccgccuccagagccugcagaccuacgugacccagcagcugauccgggcggccgagauccgcgccagcgccaaccucgccgcgaccaagauguccgagugcguccugggccagagcaagcggguggacuucugcgggaagggcuaccaccugauguccuucccccagagcgccccgcacgggguggucuuccuccacgugacguacguccccgcccaggagaagaacuucaccaccgcccccgcgaucugccacgacggcaaggcccacuucccccgcgaggggguguucguguccaacggcacccacugguucgucacgcagcggaacuucuacgagccgcagaucaucaccaccgacaacaccuucgugagcggcaacugcgacguggucaucgggaucgugaacaacacgguguacgacccccugcagcccgagcuggacuccuucaaggaggagcucgacaaguacuucaagaaccacaccagccccgacgucgaccugggcgacaucuccgggaucaacgccagcguggugaacauccagaaggagaucgaccgccugaacgaggucgccaagaaccucaacgagucccugaucgaccugcaggagcucggcaaguacgagcaguacaucaaguggccgugguacaucuggcugggcuucaucgccgggcugaucgcgaucgugauggugaccaucaugcucugcugcaugaccagcugcugcuccugccugaagggcugcugcagcugcggguccugcugcaaguucgacgaggacgacagcgagcccguccugaagggcgugaagcuccacuacacgugaggacuagucccuguucccagagcccacuuuuuuuucuuuuuuugaaauaaaauagccugucuuucagaucucaaaggcucuuuucagagccaccaaaaaaaaaaaaaaaaaaaaaaaaaaaaaaaaaaaaaaaaaaaaaaaaaaaaaaaaaaaaaaaaaaaaaaaaaaaaaaaaaaaaaaaaaaaaaaaaaaaaa

SEQ ID NO: 23435 - RNA, 4094 nt, Artificial Sequence
  SARS-CoV-2/Wuhan/WIV05/2019__EPI_ISL_402128 spike protein mRNA gc (1-1273)(D614G_I692V)
aggagagucccgcagucggcguccagcggcucugcuuguucgugugugugucguugcaggccuuauucaagcuuaccauguucguguuccugguccuccugccccuggugagcucccagugcgugaaccucaccacccgcacgcagcugccgcccgccuacaccaacagcuucacccggggcgucuacuaccccgacaagguguuccgcuccagcgugcugcacuccacccaggaccucuuccugcccuucuucagcaacgucacgugguuccacgccauccacguguccgggaccaacggcaccaagcgguucgacaacccggugcugcccuucaacgacggggucuacuucgcgagcaccgagaaguccaacaucauccgcggcuggaucuucgggacgacccucgacagcaagacccagucccugcugaucgugaacaacgccaccaacguggucaucaaggugugcgaguuccaguucugcaacgaccccuuccucggcguguacuaccacaagaacaacaagagcuggauggaguccgaguuccgggucuacagcuccgccaacaacugcacguucgaguacgugagccagcccuuccugauggaccuggagggcaagcaggggaacuucaagaaccuccgcgaguucguguucaagaacaucgacggcuacuucaagaucuacuccaagcacaccccgaucaaccugguccgggaccugccccagggguucagcgcccucgagccccugguggaccugcccaucggcaucaacaucacccgcuuccagacccuccuggcccugcaccgguccuaccucacgccgggggacagcagcuccggcuggaccgcgggcgccgccgccuacuacgugggguaccugcagccccgcaccuuccugcucaaguacaacgagaacggcaccaucacggacgcggucgacugcgcccuggacccccugagcgagaccaagugcacccucaaguccuucaccguggagaaggggaucuaccagacgagcaacuuccgggugcagcccaccgaguccaucguccgcuucccgaacaucaccaaccugugccccuucggcgagguguucaacgccacccgguucgccagcgucuacgccuggaaccgcaagcggaucuccaacugcguggcggacuacagcgugcuguacaacuccgccagcuucuccacguucaagugcuacggcgucagccccaccaagcucaacgaccugugcuucaccaacguguacgccgacuccuucgugauccgcggggacgagguccggcagaucgcccccggccagaccgggaagaucgccgacuacaacuacaagcugccggacgacuucacgggcugcgugaucgcguggaacagcaacaaccucgacuccaaggucgggggcaacuacaacuaccuguaccgccuguuccgcaagagcaaccucaagcccuucgagcgggacaucuccaccgagaucuaccaggccggcagcacccccugcaacgggguggagggcuucaacugcuacuucccccugcaguccuacggguuccagccgaccaacggcgugggguaccagcccuaccggguggucgugcugagcuucgagcuccugcacgcccccgccacggugugcggccccaagaaguccaccaaccuggucaagaacaagugcgugaacuucaacuucaacggccucaccgggaccggcgugcugaccgagagcaacaagaaguuccugccguuccagcaguucgggcgcgacaucgccgacacgaccgacgcgguccgcgacccccagacccuggagauccucgacaucacccccugcagcuucggcgggguguccgugaucacgccgggcaccaacaccagcaaccaggucgccgugcuguaccagggcgugaacugcaccgagguccccguggccauccacgccgaccagcugacgcccaccuggcggguguacuccaccgggagcaacgucuuccagacccgcgccggcugccucaucggggcggagcacgugaacaacuccuacgagugcgacauccccaucggcgccggcaucugcgccagcuaccagacgcagaccaacuccccgcggcgcgcccggagcguggcgucccagagcgucaucgccuacaccaugucccugggggccgagaacagcguggccuacuccaacaacagcaucgccauccccaccaacuucacgaucuccgugaccaccgagauccugcccgucagcaugaccaagacgagcguggacugcaccauguacaucugcggcgacuccaccgagugcagcaaccuccugcugcaguacggguccuucugcacccagcucaaccgcgcgcugacgggcaucgccguggagcaggacaagaacacccaggaggucuucgcccaggugaagcagaucuacaagacgcccccgaucaaggacuucgggggcuucaacuucagccagauccugcccgaccccuccaagcccagcaagcgguccuucaucgaggaccuccuguucaacaaggugacccuggccgacgccggcuucaucaagcaguacggggacugccucggcgacaucgcggcccgcgaccugaucugcgcccagaaguucaacgggcugaccguccucccgccccugcugaccgacgagaugaucgcccaguacaccagcgcccuccuggcgggcaccaucacguccggguggaccuucggcgccggcgccgcccugcagauccccuucgcgaugcagauggccuaccgguucaacgggaucggcgugacccagaacgugcucuacgagaaccagaagcugaucgccaaccaguucaacagcgccaucgggaagauccaggacucccugagcuccaccgccagcgcgcucggcaagcugcaggacgucgugaaccagaacgcccaggcccugaacacgcucgugaagcagcuguccagcaacuucggggccaucuccagcguccugaacgacauccucucccgccuggacaagguggaggccgaggugcagaucgaccggcugaucaccggccgccuccagagccugcagaccuacgucacccagcagcugauccgggcggccgagauccgcgccagcgccaaccucgccgcgaccaagauguccgagugcgugcugggccagagcaagcggguggacuucugcgggaagggcuaccaccugauguccuucccccagagcgccccgcacggggucguguuccuccacgucacguacgugcccgcccaggagaagaacuucaccaccgcccccgcgaucugccacgacggcaaggcccacuucccccgcgaggggguguucgucuccaacggcacccacugguucgugacgcagcggaacuucuacgagccgcagaucaucaccaccgacaacaccuucgugagcggcaacugcgacgucgugaucgggaucgugaacaacacggucuacgacccccugcagcccgagcuggacuccuucaaggaggagcucgacaaguacuucaagaaccacaccagccccgacguggaccugggcgacaucuccgggaucaacgccagcguggucaacauccagaaggagaucgaccgccugaacgagguggccaagaaccucaacgagucccugaucgaccugcaggagcucggcaaguacgagcaguacaucaaguggccgugguacaucuggcugggcuucaucgccgggcugaucgcgaucgugauggucaccaucaugcucugcugcaugaccagcugcugcuccugccugaagggcugcugcagcugcggguccugcugcaaguucgacgaggacgacagcgagcccgugcugaagggcgugaagcuccacuacacgugaggacuagucccuguucccagagcccacuuuuuuuucuuuuuuugaaauaaaauagccugucuuucagaucucaaaggcucuuuucagagccaccaaaaaaaaaaaaaaaaaaaaaaaaaaaaaaaaaaaaaaaaaaaaaaaaaaaaaaaaaaaaaaaaaaaaaaaaaaaaaaaaaaaaaaaaaaaaaaaaaaaaa

SEQ ID NO: 23436 - RNA, 4094 nt, Artificial Sequence; identical to SEQ ID NO: 12324
  SARS-CoV-2/Wuhan/WIV05/2019__EPI_ISL_402128 spike protein mRNA gc (1-1273)(D614G_M1229I)

SEQ ID NO: 23437 - RNA, 4088 nt, Artificial Sequence
  SARS-CoV-2/Wuhan/WIV05/2019__EPI_ISL_402128 spike protein mRNA gc (1-1273)(H69del_V70del_A222V_Y453F_S477N_D614G_I692V)
aggagagucccgcagucggcguccagcggcucugcuuguucgugugugugucguugcaggccuuauucaagcuuaccauguucguguuccugguccuccugccccuggugagcucccagugcgugaaccucaccacccgcacgcagcugccgcccgccuacaccaacagcuucacccggggcgucuacuaccccgacaagguguuccgcuccagcgugcugcacuccacccaggaccucuuccugcccuucuucagcaacgucacgugguuccacgccaucuccgggaccaacggcaccaagcgguucgacaacccggugcugcccuucaacgacgggguguacuucgcgagcaccgagaaguccaacaucauccgcggcuggaucuucgggacgacccucgacagcaagacccagucccugcugaucgucaacaacgccaccaacguggugaucaaggucugcgaguuccaguucugcaacgaccccuuccucggcguguacuaccacaagaacaacaagagcuggauggaguccgaguuccggguguacagcuccgccaacaacugcacguucgaguacgucagccagcccuuccugauggaccuggagggcaagcaggggaacuucaagaaccuccgcgaguucguguucaagaacaucgacggcuacuucaagaucuacuccaagcacaccccgaucaaccuggugcgggaccugccccagggguucagcguccucgagccccugguggaccugcccaucggcaucaacaucacccgcuuccagacccuccuggcccugcaccgguccuaccucacgccgggggacagcagcuccggcuggaccgccggcgcggccgccuacuacgugggguaccugcagccccgcaccuuccugcucaaguacaacgagaacggcaccaucacggacgccgucgacugcgcgcuggacccccugagcgagaccaagugcacccucaaguccuucaccguggagaaggggaucuaccagacgagcaacuuccgggugcagcccaccgaguccaucguccgcuucccgaacaucaccaaccugugccccuucggcgagguguucaacgccacccgguucgccagcgucuacgccuggaaccgcaagcggaucuccaacugcguggccgacuacagcgugcuguacaacuccgcgagcuucuccacguucaagugcuacggcgucagccccaccaagcucaacgaccugugcuucaccaacguguacgccgacuccuucgugauccgcggggacgagguccggcagaucgcccccggccagaccgggaagaucgccgacuacaacuacaagcugccggacgacuucacgggcugcgugaucgccuggaacagcaacaaccucgacuccaaggucgggggcaacuacaacuaccuguuccgccuguuccgcaagagcaaccucaagcccuucgagcgggacaucuccaccgagaucuaccaggcgggcaacacccccugcaacgggguggagggcuucaacugcuacuucccccugcagagcuacggguuccagccgaccaacggcgugggguaccagcccuaccggguggucgugcuguccuucgagcuccugcacgcccccgccacggugugcggccccaagaaguccaccaaccuggucaagaacaagugcgugaacuucaacuucaacggccucaccgggaccggcgugcugaccgagagcaacaagaaguuccugccguuccagcaguucgggcgcgacaucgccgacacgaccgacgccguccgcgacccccagacccuggagauccucgacaucacccccugcagcuucggcggggugagcgugaucacgccgggcaccaacaccuccaaccaggucgcggugcuguaccagggcgugaacugcaccgagguccccguggccauccacgccgaccagcugacgcccaccuggcggguguacagcaccggguccaacgucuuccagacccgcgccggcugccucaucggggccgagcacgugaacaacagcuacgagugcgacauccccaucggcgcgggcaucugcgccuccuaccagacgcagaccaacagcccgcggcgcgcccgguccguggccagccaguccgucaucgcguacaccaugagccugggggccgagaacuccguggccuacagcaacaacuccaucgccauccccaccaacuucacgaucagcgugaccaccgagauccugcccgucuccaugaccaagacgagcguggacugcaccauguacaucugcggcgacagcaccgagugcuccaaccuccugcugcaguacgggagcuucugcacccagcucaaccgcgcccugacgggcaucgcgguggagcaggacaagaacacccaggaggucuucgcccaggugaagcagaucuacaagacgcccccgaucaaggacuucgggggcuucaacuucucccagauccugcccgaccccagcaagcccuccaagcggagcuucaucgaggaccuccuguucaacaaggugacccuggccgacgccggcuucaucaagcaguacggggacugccucggcgacaucgccgcgcgcgaccugaucugcgcccagaaguucaacgggcugaccguccucccgccccugcugaccgacgagaugaucgcccaguacaccuccgcccuccuggccggcaccaucacgagcggguggaccuucggcgcgggcgccgcccugcagauccccuucgccaugcagauggcguaccgguucaacgggaucggcgugacccagaacgugcucuacgagaaccagaagcugaucgccaaccaguucaacuccgccaucgggaagauccaggacagccuguccagcaccgccuccgcccucggcaagcugcaggacgucgugaaccagaacgcgcaggcccugaacacgcucgugaagcagcugagcuccaacuucggggccaucagcuccguccugaacgacauccucagccgccuggacaagguggaggccgaggugcagaucgaccggcugaucaccggccgccuccagucccugcagaccuacgucacccagcagcugauccgggccgcggagauccgcgccagcgccaaccucgccgccaccaagaugagcgagugcgugcugggccaguccaagcggguggacuucugcgggaagggcuaccaccugaugagcuucccccaguccgcgccgcacggggucguguuccuccacgucacguacgugcccgcccaggagaagaacuucaccaccgcccccgccaucugccacgacggcaaggcgcacuucccccgcgaggggguguucgucagcaacggcacccacugguucgugacgcagcggaacuucuacgagccgcagaucaucaccaccgacaacaccuucguguccggcaacugcgacgucgugaucgggaucgugaacaacacggucuacgacccccugcagcccgagcuggacagcuucaaggaggagcucgacaaguacuucaagaaccacaccucccccgacguggaccugggcgacaucagcgggaucaacgccuccguggucaacauccagaaggagaucgaccgccugaacgagguggccaagaaccucaacgagagccugaucgaccugcaggagcucggcaaguacgagcaguacaucaaguggccgugguacaucuggcugggcuucaucgccgggcugaucgccaucgugauggucaccaucaugcucugcugcaugaccuccugcugcagcugccugaagggcugcugcuccugcgggagcugcugcaaguucgacgaggacgacuccgagcccgugcugaagggcgugaagcuccacuacacgugaggacuagucccuguucccagagcccacuuuuuuuucuuuuuuugaaauaaaauagccugucuuucagaucucaaaggcucuuuucagagccaccaaaaaaaaaaaaaaaaaaaaaaaaaaaaaaaaaaaaaaaaaaaaaaaaaaaaaaaaaaaaaaaaaaaaaaaaaaaaaaaaaaaaaaaaaaaaaaaaaaaaa

SEQ ID NO: 23438 - RNA, 4088 nt, Artificial Sequence
  SARS-CoV-2/Wuhan/WIV05/2019__EPI_ISL_402128 spike protein mRNA gc (1-1273)(H69del_V70del_Y453F_D614G_I692V_M1229I)
aggagagucccgcagucggcguccagcggcucugcuuguucgugugugugucguugcaggccuuauucaagcuuaccauguucguguuccugguccuccugccccuggugagcucccagugcgugaaccucaccacccgcacgcagcugccgcccgccuacaccaacagcuucacccggggcgucuacuaccccgacaagguguuccgcuccagcgugcugcacuccacccaggaccucuuccugcccuucuucagcaacgucacgugguuccacgccaucuccgggaccaacggcaccaagcgguucgacaacccggugcugcccuucaacgacgggguguacuucgcgagcaccgagaaguccaacaucauccgcggcuggaucuucgggacgacccucgacagcaagacccagucccugcugaucgucaacaacgccaccaacguggugaucaaggucugcgaguuccaguucugcaacgaccccuuccucggcguguacuaccacaagaacaacaagagcuggauggaguccgaguuccggguguacagcuccgccaacaacugcacguucgaguacgucagccagcccuuccugauggaccuggagggcaagcaggggaacuucaagaaccuccgcgaguucguguucaagaacaucgacggcuacuucaagaucuacuccaagcacaccccgaucaaccuggugcgggaccugccccagggguucagcgcccucgagccccuggucgaccugcccaucggcaucaacaucacccgcuuccagacccuccuggcccugcaccgguccuaccucacgccgggggacagcagcuccggcuggaccgcgggcgccgccgccuacuacgugggguaccugcagccccgcaccuuccugcucaaguacaacgagaacggcaccaucacggacgcgguggacugcgcccuggacccccugagcgagaccaagugcacccucaaguccuucaccgucgagaaggggaucuaccagacgagcaacuuccgggugcagcccaccgaguccaucgugcgcuucccgaacaucaccaaccugugccccuucggcgaggucuucaacgccacccgguucgccagcguguacgccuggaaccgcaagcggaucuccaacugcgucgcggacuacagcgugcuguacaacuccgccagcuucuccacguucaagugcuacggcgugagccccaccaagcucaacgaccugugcuucaccaacgucuacgccgacuccuucgugauccgcggggacgaggugcggcagaucgcccccggccagaccgggaagaucgccgacuacaacuacaagcugccggacgacuucacgggcugcgucaucgcguggaacagcaacaaccucgacuccaaggucgggggcaacuacaacuaccuguuccgccuguuccgcaagagcaaccucaagcccuucgagcgggacaucuccaccgagaucuaccaggccggcagcacccccugcaacgggguggagggcuucaacugcuacuucccccugcaguccuacggguuccagccgaccaacggcgugggguaccagcccuaccggguggugguccugagcuucgagcuccugcacgcccccgccacggugugcggccccaagaaguccaccaaccuggugaagaacaagugcgucaacuucaacuucaacggccucaccgggaccggcgugcugaccgagagcaacaagaaguuccugccguuccagcaguucgggcgcgacaucgccgacacgaccgacgcggugcgcgacccccagacccuggagauccucgacaucacccccugcagcuucggcggggucuccgugaucacgccgggcaccaacaccagcaaccagguggccguccuguaccagggcgugaacugcaccgaggugcccgucgccauccacgccgaccagcugacgcccaccuggcggguguacuccaccgggagcaacguguuccagacccgcgccggcugccucaucggggcggagcacgucaacaacuccuacgagugcgacauccccaucggcgccggcaucugcgccagcuaccagacgcagaccaacuccccgcggcgcgcccggagcguggcgucccagagcgugaucgccuacaccaugucccugggggccgagaacagcgucgccuacuccaacaacagcaucgccauccccaccaacuucacgaucuccgugaccaccgagauccugcccgugagcaugaccaagacgagcgucgacugcaccauguacaucugcggcgacuccaccgagugcagcaaccuccugcugcaguacggguccuucugcacccagcucaaccgcgcgcugacgggcaucgccguggagcaggacaagaacacccaggagguguucgcccaggucaagcagaucuacaagacgcccccgaucaaggacuucgggggcuucaacuucagccagauccugcccgaccccuccaagcccagcaagcgguccuucaucgaggaccuccuguucaacaaggugacccuggccgacgccggcuucaucaagcaguacggggacugccucggcgacaucgcggcccgcgaccugaucugcgcccagaaguucaacgggcugaccgugcucccgccccugcugaccgacgagaugaucgcccaguacaccagcgcccuccuggcgggcaccaucacguccggguggaccuucggcgccggcgccgcccugcagauccccuucgcgaugcagauggccuaccgguucaacgggaucggcgucacccagaacgugcucuacgagaaccagaagcugaucgccaaccaguucaacagcgccaucgggaagauccaggacucccugagcuccaccgccagcgcgcucggcaagcugcaggacguggucaaccagaacgcccaggcccugaacacgcucgugaagcagcuguccagcaacuucggggccaucuccagcgugcugaacgacauccucucccgccuggacaaggucgaggccgaggugcagaucgaccggcugaucaccggccgccuccagagccugcagaccuacgugacccagcagcugauccgggcggccgagauccgcgccagcgccaaccucgccgcgaccaagauguccgagugcguccugggccagagcaagcggguggacuucugcgggaagggcuaccaccugauguccuucccccagagcgccccgcacgggguggucuuccuccacgugacguacguccccgcccaggagaagaacuucaccaccgcccccgcgaucugccacgacggcaaggcccacuucccccgcgaggggguguucguguccaacggcacccacugguucgucacgcagcggaacuucuacgagccgcagaucaucaccaccgacaacaccuucgugagcggcaacugcgacguggucaucgggaucgugaacaacacgguguacgacccccugcagcccgagcuggacuccuucaaggaggagcucgacaaguacuucaagaaccacaccagccccgacgucgaccugggcgacaucuccgggaucaacgccagcguggugaacauccagaaggagaucgaccgccugaacgaggucgccaagaaccucaacgagucccugaucgaccugcaggagcucggcaaguacgagcaguacaucaaguggccgugguacaucuggcugggcuucaucgccgggcugaucgcgaucgugaucgugaccaucaugcucugcugcaugaccagcugcugcuccugccugaagggcugcugcagcugcggguccugcugcaaguucgacgaggacgacagcgagcccguccugaagggcgugaagcuccacuacacgugaggacuagucccuguucccagagcccacuuuuuuuucuuuuuuugaaauaaaauagccugucuuucagaucucaaaggcucuuuucagagccaccaaaaaaaaaaaaaaaaaaaaaaaaaaaaaaaaaaaaaaaaaaaaaaaaaaaaaaaaaaaaaaaaaaaaaaaaaaaaaaaaaaaaaaaaaaaaaaaaaaaaa

SEQ ID NO: 23439 - RNA, 4085 nt, Artificial Sequence
  SARS-CoV-2/Wuhan/WIV05/2019__EPI_ISL_402128 spike protein mRNA gc (1-1273)(H69del_V70del_Y144del_N501Y_A570D_D614G_P681H_T716I_S982 A_D1118H)
aggagagucccgcagucggcguccagcggcucugcuuguucgugugugugucguugcaggccuuauucaagcuuaccauguucguguuccugguccuccugccccuggugagcucccagugcgugaaccucaccacccgcacgcagcugccgcccgccuacaccaacagcuucacccggggcgucuacuaccccgacaagguguuccgcuccagcgugcugcacuccacccaggaccucuuccugcccuucuucagcaacgucacgugguuccacgccaucuccgggaccaacggcaccaagcgguucgacaacccggugcugcccuucaacgacgggguguacuucgcgagcaccgagaaguccaacaucauccgcggcuggaucuucgggacgacccucgacagcaagacccagucccugcugaucgucaacaacgccaccaacguggugaucaaggucugcgaguuccaguucugcaacgaccccuuccucggcguguaccacaagaacaacaagagcuggauggaguccgaguuccggguguacagcuccgccaacaacugcacguucgaguacgucagccagcccuuccugauggaccuggagggcaagcaggggaacuucaagaaccuccgcgaguucguguucaagaacaucgacggcuacuucaagaucuacuccaagcacaccccgaucaaccuggugcgggaccugccccagggguucagcgcccucgagccccuggucgaccugcccaucggcaucaacaucacccgcuuccagacccuccuggcccugcaccgguccuaccucacgccgggggacagcagcuccggcuggaccgcgggcgccgccgccuacuacgugggguaccugcagccccgcaccuuccugcucaaguacaacgagaacggcaccaucacggacgcgguggacugcgcccuggacccccugagcgagaccaagugcacccucaaguccuucaccgucgagaaggggaucuaccagacgagcaacuuccgggugcagcccaccgaguccaucgugcgcuucccgaacaucaccaaccugugccccuucggcgaggucuucaacgccacccgguucgccagcguguacgccuggaaccgcaagcggaucuccaacugcgucgcggacuacagcgugcuguacaacuccgccagcuucuccacguucaagugcuacggcgugagccccaccaagcucaacgaccugugcuucaccaacgucuacgccgacuccuucgugauccgcggggacgaggugcggcagaucgcccccggccagaccgggaagaucgccgacuacaacuacaagcugccggacgacuucacgggcugcgucaucgcguggaacagcaacaaccucgacuccaaggucgggggcaacuacaacuaccuguaccgccuguuccgcaagagcaaccucaagcccuucgagcgggacaucuccaccgagaucuaccaggccggcagcacccccugcaacgggguggagggcuucaacugcuacuucccccugcaguccuacggguuccagccgaccuacggcgugggguaccagcccuaccggguggugguccugagcuucgagcuccugcacgcccccgccacggugugcggccccaagaaguccaccaaccuggugaagaacaagugcgucaacuucaacuucaacggccucaccgggaccggcgugcugaccgagagcaacaagaaguuccugccguuccagcaguucgggcgcgacaucgacgacacgaccgacgccgugcgcgacccccagacccuggagauccucgacaucacccccugcagcuucggcggggucuccgugaucacgccgggcaccaacaccagcaaccagguggcgguccuguaccagggcgugaacugcaccgaggugcccgucgccauccacgccgaccagcugacgcccaccuggcggguguacuccaccgggagcaacguguuccagacccgcgccggcugccucaucggggccgagcacgucaacaacuccuacgagugcgacauccccaucggcgcgggcaucugcgccagcuaccagacgcagaccaacucccaccggcgcgcccggagcguggccucccagagcaucaucgcguacaccaugucccugggggccgagaacagcguggccuacuccaacaacagcaucgccaucccgaucaacuucaccaucuccgucacgaccgagauccugcccgugagcaugaccaagaccagcguggacugcacgauguacaucugcggcgacuccaccgagugcagcaaccuccugcugcaguacggguccuucugcacccagcucaaccgcgcccugaccggcaucgcggucgagcaggacaagaacacgcaggagguguucgcccaggugaagcagaucuacaagaccccgcccaucaaggacuucgggggcuucaacuucagccagauccugcccgaccccuccaagcccagcaagcgguccuucaucgaggaccuccuguucaacaaggucacccuggccgacgccggcuucaucaagcaguacggggacugccucggcgacaucgccgcgcgcgaccugaucugcgcccagaaguucaacgggcugaccgugcugcccccgcuccugacggacgagaugaucgcccaguacaccagcgcccuccuggccggcaccaucaccuccggguggacguucggcgcgggcgccgcccugcagauccccuucgccaugcagauggcguaccgguucaacgggaucggcgugacccagaacguccucuacgagaaccagaagcugaucgccaaccaguucaacagcgccaucgggaagauccaggacucccugagcuccaccgccagcgcccucggcaagcugcaggacguggugaaccagaacgcgcaggcccugaacacccucgucaagcagcuguccagcaacuucggggccaucuccagcgugcugaacgacauccucgcccgccuggacaagguggaggccgagguccagaucgaccggcugaucacgggccgccuccagucccugcagaccuacgugacccagcagcugauccgggcggccgagauccgcgccagcgccaaccucgccgcgaccaagaugagcgagugcgugcugggccaguccaagcgggucgacuucugcgggaagggcuaccaccugaugagcuucccccaguccgcgccccacggggugguguuccuccacgucaccuacgugccggcccaggagaagaacuucacgaccgcccccgccaucugccacgacggcaaggcccacuucccccgcgagggggucuucgugagcaacggcacccacugguucgugacccagcggaacuucuacgagccccagaucaucacgacccacaacaccuucgucuccggcaacugcgacguggugaucgggaucgucaacaacaccguguacgacccgcugcagcccgagcuggacagcuucaaggaggagcucgacaaguacuucaagaaccacacgucccccgacguggaccugggcgacaucagcgggaucaacgccuccgucgugaacauccagaaggagaucgaccgccugaacgagguggccaagaaccucaacgagagccugaucgaccugcaggagcucggcaaguacgagcaguacaucaaguggcccugguacaucuggcugggcuucaucgccgggcugaucgcgaucgucauggugaccaucaugcucugcugcaugaccuccugcugcagcugccugaagggcugcugcuccugcgggagcugcugcaaguucgacgaggacgacuccgagccggugcugaagggcgucaagcuccacuacaccugaggacuagucccuguucccagagcccacuuuuuuuucuuuuuuugaaauaaaauagccugucuuucagaucucaaaggcucuuuucagagccaccaaaaaaaaaaaaaaaaaaaaaaaaaaaaaaaaaaaaaaaaaaaaaaaaaaaaaaaaaaaaaaaaaaaaaaaaaaaaaaaaaaaaaaaaaaaaaaaaaaaaa

SEQ ID NO: 23440 - RNA, 4094 nt, Artificial Sequence
  SARS-CoV-2/Wuhan/WIV05/2019__EPI_ISL_402128 spike protein mRNA gc (1-1273)(K417N_E484K_N501Y_D614G)
aggagagucccgcagucggcguccagcggcucugcuuguucgugugugugucguugcaggccuuauucaagcuuaccauguucguguuccugguccuccugccccuggugagcucccagugcgugaaccucaccacccgcacgcagcugccgcccgccuacaccaacagcuucacccggggcgucuacuaccccgacaagguguuccgcuccagcgugcugcacuccacccaggaccucuuccugcccuucuucagcaacgucacgugguuccacgccauccacguguccgggaccaacggcaccaagcgguucgacaacccggugcugcccuucaacgacggggucuacuucgcgagcaccgagaaguccaacaucauccgcggcuggaucuucgggacgacccucgacagcaagacccagucccugcugaucgugaacaacgccaccaacguggucaucaaggugugcgaguuccaguucugcaacgaccccuuccucggcguguacuaccacaagaacaacaagagcuggauggaguccgaguuccgggucuacagcuccgccaacaacugcacguucgaguacgugagccagcccuuccugauggaccuggagggcaagcaggggaacuucaagaaccuccgcgaguucguguucaagaacaucgacggcuacuucaagaucuacuccaagcacaccccgaucaaccugguccgggaccugccccagggguucagcgcccucgagccccugguggaccugcccaucggcaucaacaucacccgcuuccagacccuccuggcccugcaccgguccuaccucacgccgggggacagcagcuccggcuggaccgcgggcgccgccgccuacuacgugggguaccugcagccccgcaccuuccugcucaaguacaacgagaacggcaccaucacggacgcggucgacugcgcccuggacccccugagcgagaccaagugcacccucaaguccuucaccguggagaaggggaucuaccagacgagcaacuuccgggugcagcccaccgaguccaucguccgcuucccgaacaucaccaaccugugccccuucggcgagguguucaacgccacccgguucgccagcgucuacgccuggaaccgcaagcggaucuccaacugcguggcggacuacagcgugcuguacaacuccgccagcuucuccacguucaagugcuacggcgucagccccaccaagcucaacgaccugugcuucaccaacguguacgccgacuccuucgugauccgcggggacgagguccggcagaucgcccccggccagaccgggaacaucgccgacuacaacuacaagcugccggacgacuucacgggcugcgugaucgcguggaacagcaacaaccucgacuccaaggucgggggcaacuacaacuaccuguaccgccuguuccgcaagagcaaccucaagcccuucgagcgggacaucuccaccgagaucuaccaggccggcagcacccccugcaacggggugaagggcuucaacugcuacuucccccugcaguccuacggguuccagccgaccuacggcgugggguaccagcccuaccggguggucgugcugagcuucgagcuccugcacgcccccgccacggugugcggccccaagaaguccaccaaccuggucaagaacaagugcgugaacuucaacuucaacggccucaccgggaccggcgugcugaccgagagcaacaagaaguuccugccguuccagcaguucgggcgcgacaucgccgacacgaccgacgcgguccgcgacccccagacccuggagauccucgacaucacccccugcagcuucggcgggguguccgugaucacgccgggcaccaacaccagcaaccaggucgccgugcuguaccagggcgugaacugcaccgagguccccguggccauccacgccgaccagcugacgcccaccuggcggguguacuccaccgggagcaacgucuuccagacccgcgccggcugccucaucggggcggagcacgugaacaacuccuacgagugcgacauccccaucggcgccggcaucugcgccagcuaccagacgcagaccaacuccccgcggcgcgcccggagcguggcgucccagagcaucaucgccuacaccaugucccugggggccgagaacagcgucgccuacuccaacaacagcaucgccauccccaccaacuucacgaucuccgugaccaccgagauccugcccgugagcaugaccaagacgagcgucgacugcaccauguacaucugcggcgacuccaccgagugcagcaaccuccugcugcaguacggguccuucugcacccagcucaaccgcgcgcugacgggcaucgccguggagcaggacaagaacacccaggagguguucgcccaggucaagcagaucuacaagacgcccccgaucaaggacuucgggggcuucaacuucagccagauccugcccgaccccuccaagcccagcaagcgguccuucaucgaggaccuccuguucaacaaggugacccuggccgacgccggcuucaucaagcaguacggggacugccucggcgacaucgcggcccgcgaccugaucugcgcccagaaguucaacgggcugaccgugcucccgccccugcugaccgacgagaugaucgcccaguacaccagcgcccuccuggcgggcaccaucacguccggguggaccuucggcgccggcgccgcccugcagauccccuucgcgaugcagauggccuaccgguucaacgggaucggcgucacccagaacgugcucuacgagaaccagaagcugaucgccaaccaguucaacagcgccaucgggaagauccaggacucccugagcuccaccgccagcgcgcucggcaagcugcaggacguggucaaccagaacgcccaggcccugaacacgcucgugaagcagcuguccagcaacuucggggccaucuccagcgugcugaacgacauccucucccgccuggacaaggucgaggccgaggugcagaucgaccggcugaucaccggccgccuccagagccugcagaccuacgugacccagcagcugauccgggcggccgagauccgcgccagcgccaaccucgccgcgaccaagauguccgagugcguccugggccagagcaagcggguggacuucugcgggaagggcuaccaccugauguccuucccccagagcgccccgcacgggguggucuuccuccacgugacguacguccccgcccaggagaagaacuucaccaccgcccccgcgaucugccacgacggcaaggcccacuucccccgcgaggggguguucguguccaacggcacccacugguucgucacgcagcggaacuucuacgagccgcagaucaucaccaccgacaacaccuucgugagcggcaacugcgacguggucaucgggaucgugaacaacacgguguacgacccccugcagcccgagcuggacuccuucaaggaggagcucgacaaguacuucaagaaccacaccagccccgacgucgaccugggcgacaucuccgggaucaacgccagcguggugaacauccagaaggagaucgaccgccugaacgaggucgccaagaaccucaacgagucccugaucgaccugcaggagcucggcaaguacgagcaguacaucaaguggccgugguacaucuggcugggcuucaucgccgggcugaucgcgaucgugauggugaccaucaugcucugcugcaugaccagcugcugcuccugccugaagggcugcugcagcugcggguccugcugcaaguucgacgaggacgacagcgagcccguccugaagggcgugaagcuccacuacacgugaggacuagucccuguucccagagcccacuuuuuuuucuuuuuuugaaauaaaauagccugucuuucagaucucaaaggcucuuuucagagccaccaaaaaaaaaaaaaaaaaaaaaaaaaaaaaaaaaaaaaaaaaaaaaaaaaaaaaaaaaaaaaaaaaaaaaaaaaaaaaaaaaaaaaaaaaaaaaaaaaaaaa

SEQ ID NO: 23441 - RNA, 4085 nt, Artificial Sequence
  SARS-CoV-2/Wuhan/WIV05/2019__EPI_ISL_402128 spike protein mRNA gc (1-1273)(L18F_D80A_D215G_L242del_A243del_L244del_R246I_K417N_E484 K_N501Y_D614G_A701V)
aggagagucccgcagucggcguccagcggcucugcuuguucgugugugugucguugcaggccuuauucaagcuuaccauguucguguuccugguccuccugccccuggugagcucccagugcgugaacuucaccacccgcacgcagcucccgcccgccuacaccaacagcuucacccggggcgucuacuaccccgacaagguguuccgcuccagcgugcugcacuccacccaggaccuguuccuccccuucuucagcaacgucacgugguuccacgccauccacguguccgggaccaacggcaccaagcgguucgcgaacccggugcugcccuucaacgacggggucuacuucgccagcaccgagaaguccaacaucauccgcggcuggaucuucgggacgacccuggacagcaagacccagucccuccugaucgugaacaacgccaccaacguggucaucaaggugugcgaguuccaguucugcaacgaccccuuccugggcguguacuaccacaagaacaacaagagcuggauggaguccgaguuccgggucuacagcuccgccaacaacugcacguucgaguacgugagccagcccuuccucauggaccuggagggcaagcaggggaacuucaagaaccugcgcgaguucguguucaagaacaucgacggcuacuucaagaucuacuccaagcacaccccgaucaaccucguccgggggcugccccagggcuucagcgcccuggagccccucguggaccugcccaucgggaucaacaucacccgcuuccagacccugcacaucuccuaccucacgccgggcgacagcagcuccggcuggaccgcgggggccgccgccuacuacgugggcuaccugcagccccggaccuuccugcucaaguacaacgagaacgggaccaucacggacgcggucgacugcgcccuggacccccugagcgagaccaagugcacccucaaguccuucaccguggagaagggcaucuaccagacgagcaacuuccgcgugcagcccaccgaguccaucguccgguucccgaacaucaccaaccugugccccuucggcgagguguucaacgccacccgcuucgccagcgucuacgccuggaaccggaagcgcaucuccaacugcguggcggacuacagcgugcuguacaacuccgccagcuucuccacguucaagugcuacggggucagccccaccaagcucaacgaccugugcuucaccaacguguacgccgacuccuucgugauccggggcgacgagguccgccagaucgcccccgggcagaccggcaacaucgccgacuacaacuacaagcugccggacgacuucacggggugcgugaucgcguggaacagcaacaaccucgacuccaaggugggcggcaacuacaacuaccuguaccggcuguuccgcaagagcaaccucaagcccuucgagcgggacaucuccaccgagaucuaccaggccgggagcacccccugcaacggcgucaagggguucaacugcuacuucccccugcaguccuacggcuuccagccgaccuacggggugggcuaccagcccuaccgcguggucgugcugagcuucgagcuccugcacgcccccgccacggugugcggccccaagaaguccaccaaccuggucaagaacaagugcgugaacuucaacuucaacgggcucaccggcaccggggugcugaccgagagcaacaagaaguuccugccguuccagcaguucggccgggacaucgccgacacgaccgacgcgguccgcgacccccagacccucgagauccuggacaucacccccugcagcuucgggggcguguccgugaucacgccgggcaccaacaccagcaaccaggucgccgugcuguaccagggggugaacugcaccgagguccccguggccauccacgccgaccagcugacgcccaccuggcgcguguacuccaccggcagcaacgucuuccagacccgggccgggugccucaucggcgcggagcacgugaacaacuccuacgagugcgacauccccaucggcgccgggaucugcgccagcuaccagacgcagaccaacuccccgcgccgggcccgcagcguggcgucccagagcaucaucgccuacaccaugucccugggcgucgagaacagcguggccuacuccaacaacagcaucgccauccccaccaacuucacgaucuccgugaccaccgagauccugcccgucagcaugaccaagacgagcguggacugcaccauguacaucugcggggacuccaccgagugcagcaaccuccugcugcaguacggcuccuucugcacccagcucaaccgggcccugacggggaucgcgguggagcaggacaagaacacccaggaggucuucgcccaggugaagcagaucuacaagacgcccccgaucaaggacuucggcggcuucaacuucagccagauccugcccgaccccuccaagcccagcaagcgcuccuucaucgaggaccuccuguucaacaaggugacccuggccgacgccggguucaucaagcaguacggcgacugccucggggacaucgccgcgcgggaccugaucugcgcccagaaguucaacggccugaccguccucccgccccugcugaccgacgagaugaucgcccaguacaccagcgcccuccuggccgggaccaucacguccggcuggaccuucggcgcgggggccgcccugcagauccccuucgccaugcagauggcguaccgcuucaacggcaucggggugacccagaacgugcucuacgagaaccagaagcugaucgccaaccaguucaacagcgccaucggcaagauccaggacucccugagcuccaccgccagcgcccucgggaagcugcaggacgucgugaaccagaacgcgcaggcccugaacacgcucgugaagcagcuguccagcaacuucggcgccaucuccagcguccugaacgacauccucucccggcuggacaagguggaggccgaggugcagaucgaccgccugaucaccggccggcuccagagccugcagaccuacgucacccagcagcugauccgcgccgcggagauccgggccagcgccaaccucgccgccaccaagauguccgagugcgugcuggggcagagcaagcgcguggacuucugcggcaagggguaccaccugauguccuucccccagagcgcgccgcacggcgucguguuccuccacgucacguacgugcccgcccaggagaagaacuucaccaccgcccccgccaucugccacgacgggaaggcgcacuucccccgggagggcguguucgucuccaacggcacccacugguucgugacgcagcgcaacuucuacgagccgcagaucaucaccaccgacaacaccuucgugagcgggaacugcgacgucgugaucggcaucgugaacaacacggucuacgacccccugcagcccgagcuggacuccuucaaggaggagcucgacaaguacuucaagaaccacaccagccccgacguggaccugggggacaucuccggcaucaacgccagcguggucaacauccagaaggagaucgaccggcugaacgagguggccaagaaccucaacgagucccugaucgaccugcaggagcucggcaaguacgagcaguacaucaaguggccgugguacaucuggcugggguucaucgccggccugaucgccaucgugauggucaccaucaugcucugcugcaugaccagcugcugcuccugccugaaggggugcugcagcugcggcuccugcugcaaguucgacgaggacgacagcgagcccgugcugaagggggugaagcuccacuacacgugaggacuagucccuguucccagagcccacuuuuuuuucuuuuuuugaaauaaaauagccugucuuucagaucucaaaggcucuuuucagagccaccaaaaaaaaaaaaaaaaaaaaaaaaaaaaaaaaaaaaaaaaaaaaaaaaaaaaaaaaaaaaaaaaaaaaaaaaaaaaaaaaaaaaaaaaaaaaaaaaaaaaa

SEQ ID NO: 23442 - RNA, 4094 nt, Artificial Sequence
  SARS-CoV-2/Wuhan/WIV05/2019__EPI_ISL_402128 spike protein mRNA gc (1-1273)(E484K_D614G)
aggagagucccgcagucggcguccagcggcucugcuuguucgugugugugucguugcaggccuuauucaagcuuaccauguucguguuccugguccuccugccccuggugagcucccagugcgugaaccucaccacccgcacgcagcugccgcccgccuacaccaacagcuucacccggggcgucuacuaccccgacaagguguuccgcuccagcgugcugcacuccacccaggaccucuuccugcccuucuucagcaacgucacgugguuccacgccauccacguguccgggaccaacggcaccaagcgguucgacaacccggugcugcccuucaacgacggggucuacuucgcgagcaccgagaaguccaacaucauccgcggcuggaucuucgggacgacccucgacagcaagacccagucccugcugaucgugaacaacgccaccaacguggucaucaaggugugcgaguuccaguucugcaacgaccccuuccucggcguguacuaccacaagaacaacaagagcuggauggaguccgaguuccgggucuacagcuccgccaacaacugcacguucgaguacgugagccagcccuuccugauggaccuggagggcaagcaggggaacuucaagaaccuccgcgaguucguguucaagaacaucgacggcuacuucaagaucuacuccaagcacaccccgaucaaccugguccgggaccugccccagggguucagcgcccucgagccccugguggaccugcccaucggcaucaacaucacccgcuuccagacccuccuggcccugcaccgguccuaccucacgccgggggacagcagcuccggcuggaccgcgggcgccgccgccuacuacgugggguaccugcagccccgcaccuuccugcucaaguacaacgagaacggcaccaucacggacgcggucgacugcgcccuggacccccugagcgagaccaagugcacccucaaguccuucaccguggagaaggggaucuaccagacgagcaacuuccgggugcagcccaccgaguccaucguccgcuucccgaacaucaccaaccugugccccuucggcgagguguucaacgccacccgguucgccagcgucuacgccuggaaccgcaagcggaucuccaacugcguggcggacuacagcgugcuguacaacuccgccagcuucuccacguucaagugcuacggcgucagccccaccaagcucaacgaccugugcuucaccaacguguacgccgacuccuucgugauccgcggggacgagguccggcagaucgcccccggccagaccgggaagaucgccgacuacaacuacaagcugccggacgacuucacgggcugcgugaucgcguggaacagcaacaaccucgacuccaaggucgggggcaacuacaacuaccuguaccgccuguuccgcaagagcaaccucaagcccuucgagcgggacaucuccaccgagaucuaccaggccggcagcacccccugcaacggggugaagggcuucaacugcuacuucccccugcaguccuacggguuccagccgaccaacggcgugggguaccagcccuaccggguggucgugcugagcuucgagcuccugcacgcccccgccacggugugcggccccaagaaguccaccaaccuggucaagaacaagugcgugaacuucaacuucaacggccucaccgggaccggcgugcugaccgagagcaacaagaaguuccugccguuccagcaguucgggcgcgacaucgccgacacgaccgacgcgguccgcgacccccagacccuggagauccucgacaucacccccugcagcuucggcgggguguccgugaucacgccgggcaccaacaccagcaaccaggucgccgugcuguaccagggcgugaacugcaccgagguccccguggccauccacgccgaccagcugacgcccaccuggcggguguacuccaccgggagcaacgucuuccagacccgcgccggcugccucaucggggcggagcacgugaacaacuccuacgagugcgacauccccaucggcgccggcaucugcgccagcuaccagacgcagaccaacuccccgcggcgcgcccggagcguggcgucccagagcaucaucgccuacaccaugucccugggggccgagaacagcgucgccuacuccaacaacagcaucgccauccccaccaacuucacgaucuccgugaccaccgagauccugcccgugagcaugaccaagacgagcgucgacugcaccauguacaucugcggcgacuccaccgagugcagcaaccuccugcugcaguacggguccuucugcacccagcucaaccgcgcgcugacgggcaucgccguggagcaggacaagaacacccaggagguguucgcccaggucaagcagaucuacaagacgcccccgaucaaggacuucgggggcuucaacuucagccagauccugcccgaccccuccaagcccagcaagcgguccuucaucgaggaccuccuguucaacaaggugacccuggccgacgccggcuucaucaagcaguacggggacugccucggcgacaucgcggcccgcgaccugaucugcgcccagaaguucaacgggcugaccgugcucccgccccugcugaccgacgagaugaucgcccaguacaccagcgcccuccuggcgggcaccaucacguccggguggaccuucggcgccggcgccgcccugcagauccccuucgcgaugcagauggccuaccgguucaacgggaucggcgucacccagaacgugcucuacgagaaccagaagcugaucgccaaccaguucaacagcgccaucgggaagauccaggacucccugagcuccaccgccagcgcgcucggcaagcugcaggacguggucaaccagaacgcccaggcccugaacacgcucgugaagcagcuguccagcaacuucggggccaucuccagcgugcugaacgacauccucucccgccuggacaaggucgaggccgaggugcagaucgaccggcugaucaccggccgccuccagagccugcagaccuacgugacccagcagcugauccgggcggccgagauccgcgccagcgccaaccucgccgcgaccaagauguccgagugcguccugggccagagcaagcggguggacuucugcgggaagggcuaccaccugauguccuucccccagagcgccccgcacgggguggucuuccuccacgugacguacguccccgcccaggagaagaacuucaccaccgcccccgcgaucugccacgacggcaaggcccacuucccccgcgaggggguguucguguccaacggcacccacugguucgucacgcagcggaacuucuacgagccgcagaucaucaccaccgacaacaccuucgugagcggcaacugcgacguggucaucgggaucgugaacaacacgguguacgacccccugcagcccgagcuggacuccuucaaggaggagcucgacaaguacuucaagaaccacaccagccccgacgucgaccugggcgacaucuccgggaucaacgccagcguggugaacauccagaaggagaucgaccgccugaacgaggucgccaagaaccucaacgagucccugaucgaccugcaggagcucggcaaguacgagcaguacaucaaguggccgugguacaucuggcugggcuucaucgccgggcugaucgcgaucgugauggugaccaucaugcucugcugcaugaccagcugcugcuccugccugaagggcugcugcagcugcggguccugcugcaaguucgacgaggacgacagcgagcccguccugaagggcgugaagcuccacuacacgugaggacuagucccuguucccagagcccacuuuuuuuucuuuuuuugaaauaaaauagccugucuuucagaucucaaaggcucuuuucagagccaccaaaaaaaaaaaaaaaaaaaaaaaaaaaaaaaaaaaaaaaaaaaaaaaaaaaaaaaaaaaaaaaaaaaaaaaaaaaaaaaaaaaaaaaaaaaaaaaaaaaaa

SEQ ID NO: 23443 - RNA, 4094 nt, Artificial Sequence
  SARS-CoV-2/Wuhan/WIV05/2019__EPI_ISL_402128 spike protein mRNA gc (1-1273)(L18F_T20N_P26S_D138Y_R190S_K417T_E484K_N501Y_D614G_H655Y _T1027I)
aggagagucccgcagucggcguccagcggcucugcuuguucgugugugugucguugcaggccuuauucaagcuuaccauguucguguuccugguccuccugccccuggugagcucccagugcgugaacuucaccaaccgcacccagcucccgagcgccuacacgaacuccuucacccggggcgucuacuaccccgacaagguguuccgcagcuccgugcugcacagcacccaggaccuguuccuccccuucuucuccaacgucaccugguuccacgccauccacgugagcgggacgaacggcaccaagcgguucgacaaccccgugcugccguucaacgacggggucuacuucgcguccaccgagaaguccaacaucauccgcggcuggaucuucgggaccacgcuggacuccaagacccagagccuccugaucgugaacaacgccaccaacguggucaucaaggugugcgaguuccaguucugcaacuaccccuuccugggcguguacuaccacaagaacaacaaguccuggauggagagcgaguuccgggucuacuccagcgccaacaacugcaccuucgaguacgugucccagcccuuccucauggaccuggagggcaagcaggggaacuucaagaaccugagcgaguucguguucaagaacaucgacggcuacuucaagaucuacuccaagcacacgcccaucaaccucguccgcgaccugccgcagggguucagcgcccuggagccccucguggaccugcccaucggcaucaacaucacccgguuccagacccugcucgcccugcaccgcagcuaccugacccccggggacuccagcuccggcuggacggcgggcgccgccgccuacuacgugggguaccuccagccgcggaccuuccugcugaaguacaacgagaacggcaccaucaccgacgcggucgacugcgcccucgacccccugagcgagacgaagugcacccugaaguccuucaccguggagaaggggaucuaccagaccagcaacuuccgcgugcagcccacggaguccaucguccgguuccccaacaucaccaaccucugcccguucggcgagguguucaacgccacccgcuucgccagcgucuacgccuggaaccggaagcgcaucuccaacugcguggcggacuacagcgugcuguacaacuccgccagcuucuccaccuucaagugcuacggcgucagccccacgaagcugaacgaccucugcuucaccaacguguacgccgacuccuucgugauccgcggggacgagguccggcagaucgcccccggccagaccgggaccaucgccgacuacaacuacaagcugcccgacgacuucacgggcugcgugaucgcguggaacagcaacaaccuggacuccaaggucgggggcaacuacaacuaccucuaccggcuguuccgcaagagcaaccugaagccguucgagcgggacaucuccaccgagaucuaccaggccggcagcacccccugcaacggggugaagggcuucaacugcuacuucccccuccagagcuacggguuccagcccaccuacggcgugggguaccagccguaccgcguggucgugcuguccuucgagcugcuccacgcccccgccacggugugcggccccaagaaguccaccaaccuggucaagaacaagugcgugaacuucaacuucaacggccugaccgggaccggcgugcucaccgagagcaacaagaaguuccugcccuuccagcaguucgggcgggacaucgccgacacgaccgacgcgguccgcgacccgcagacccuggagauccuggacaucacccccugcagcuucggcgggguguccgugaucacgcccggcaccaacaccagcaaccaggucgccgugcucuaccagggcgugaacugcaccgaggucccgguggccauccacgccgaccagcugacgcccaccuggcgcguguacuccaccgggagcaacgucuuccagacccgggccggcugccugaucggggcggaguacgugaacaacuccuacgagugcgacauccccaucggcgccggcaucugcgccagcuaccagacgcagaccaacagcccccgccgggcccgcagcguggcgucccagagcaucaucgccuacaccaugucccucggggccgagaacagcgucgccuacuccaacaacagcaucgccaucccgaccaacuucacgaucagcgugaccaccgagauccugcccguguccaugaccaagacgagcgucgacugcaccauguacaucugcggcgacuccaccgagugcagcaaccugcuccugcaguacggguccuucugcacccagcugaaccgggcgcucacgggcaucgccguggagcaggacaagaacacccaggagguguucgcccaggucaagcagaucuacaagaccccgcccaucaaggacuucgggggcuucaacuucagccagauccugcccgaccccuccaagcccagcaagcgcuccuucaucgaggaccuccuguucaacaaggugacccuggccgacgccggcuucaucaagcaguacggggacugccugggcgacaucgcggcccgggaccucaucugcgcccagaaguucaacgggcugacggugcugcccccgcuccugaccgacgagaugaucgcccaguacaccagcgcccugcucgcgggcaccaucacguccggguggaccuucggcgccggcgccgcccugcagauccccuucgcgaugcagauggccuaccgcuucaacgggaucggcgucacccagaacgugcuguacgagaaccagaagcucaucgccaaccaguucaacagcgccaucgggaagauccaggacucccugagcuccaccgccagcgcgcugggcaagcuccaggacguggucaaccagaacgcccaggcccugaacacgcuggugaagcagcucuccagcaacuucggggccaucuccagcgugcugaacgacauccugagccggcucgacaaggucgaggccgaggugcagaucgaccgccugaucaccggccggcugcagucccuccagaccuacgugacccagcagcugauccgcgcggccgagauccgggccagcgccaaccuggccgcgaucaagauguccgagugcguccucggccagagcaagcgcguggacuucugcgggaagggcuaccaccugauguccuucccccagagcgcgccccacgggguggucuuccugcacgugaccuacgucccggcccaggagaagaacuucacgaccgcccccgccaucugccacgacggcaaggcccacuucccccgggaggggguguucguguccaacggcacccacugguucgucacccagcgcaacuucuacgagccccagaucaucacgaccgacaacaccuucgugagcggcaacugcgacguggucaucgggaucgugaacaacaccguguacgacccgcuccagcccgagcuggacuccuucaaggaggagcuggacaaguacuucaagaaccacacgagccccgacgucgaccucggcgacaucuccgggaucaacgccagcguggugaacauccagaaggagaucgaccggcugaacgaggucgccaagaaccugaacgagucccucaucgaccugcaggagcugggcaaguacgagcaguacaucaaguggcccugguacaucuggcucggcuucaucgccgggcugaucgcgaucgugauggugaccaucaugcugugcugcaugaccagcugcugcuccugccucaagggcugcugcagcugcggguccugcugcaaguucgacgaggacgacagcgagccgguccugaagggcgugaagcugcacuacaccugaggacuagucccuguucccagagcccacuuuuuuuucuuuuuuugaaauaaaauagccugucuuucagaucucaaaggcucuuuucagagccaccaaaaaaaaaaaaaaaaaaaaaaaaaaaaaaaaaaaaaaaaaaaaaaaaaaaaaaaaaaaaaaaaaaaaaaaaaaaaaaaaaaaaaaaaaaaaaaaaaaaaa

SEQ ID NO: 23444 - RNA, 4094 nt, Artificial Sequence
  SARS-CoV-2/Wuhan/WIV05/2019__EPI_ISL_402128 spike protein mRNA gc (1-1273)(S13I_W152C_L452R_D614G)
aggagagucccgcagucggcguccagcggcucugcuuguucgugugugugucguugcaggccuuauucaagcuuaccauguucguguuccugguccuccugccccuggugagcauccagugcgugaaccucaccacccgcacgcagcugccgcccgccuacaccaacuccuucacccggggcgucuacuaccccgacaagguguuccgcagcuccgugcugcacagcacccaggaccucuuccugcccuucuucuccaacgucacgugguuccacgccauccacgugagcgggaccaacggcaccaagcgguucgacaacccggugcugcccuucaacgacggggucuacuucgcguccaccgagaaguccaacaucauccgcggcuggaucuucgggacgacccucgacagcaagacccagagccugcugaucgugaacaacgccaccaacguggucaucaaggugugcgaguuccaguucugcaacgaccccuuccucggcguguacuaccacaagaacaacaaguccugcauggagagcgaguuccgggucuacuccagcgccaacaacugcacguucgaguacgugucccagcccuuccugauggaccuggagggcaagcaggggaacuucaagaaccuccgcgaguucguguucaagaacaucgacggcuacuucaagaucuacagcaagcacaccccgaucaaccugguccgggaccugccccagggguucuccgcccucgagccccugguggaccugcccaucggcaucaacaucacccgcuuccagacccuccuggcccugcaccggagcuaccucacgccgggggacuccagcagcggcuggaccgcgggcgccgccgccuacuacgugggguaccugcagccccgcaccuuccugcucaaguacaacgagaacggcaccaucacggacgcggucgacugcgcccuggacccccuguccgagaccaagugcacccucaagagcuucaccguggagaaggggaucuaccagacguccaacuuccgggugcagcccaccgagagcaucguccgcuucccgaacaucaccaaccugugccccuucggcgagguguucaacgccacccgguucgccuccgucuacgccuggaaccgcaagcggaucagcaacugcguggcggacuacuccgugcuguacaacagcgccuccuucagcacguucaagugcuacggcgucucccccaccaagcucaacgaccugugcuucaccaacguguacgccgacagcuucgugauccgcggggacgagguccggcagaucgcccccggccagaccgggaagaucgccgacuacaacuacaagcugccggacgacuucacgggcugcgugaucgcguggaacuccaacaaccucgacagcaaggucgggggcaacuacaacuaccgcuaccggcuguuccgcaaguccaaccugaagcccuucgagcgggacaucagcaccgagaucuaccaggccggcuccacccccugcaacgggguggagggcuucaacugcuacuucccccuccagagcuacggguuccagccgaccaacggcgugggguaccagcccuaccgcguggucgugcuguccuucgagcugcuccacgcccccgccacggugugcggccccaagaaguccaccaaccuggucaagaacaagugcgugaacuucaacuucaacggccugaccgggaccggcgugcucaccgagagcaacaagaaguuccugccguuccagcaguucgggcgcgacaucgccgacacgaccgacgcgguccgggacccccagacccuggagauccuggacaucacccccugcagcuucggcggggugagcgugaucacgccgggcaccaacaccuccaaccaggucgccgugcucuaccagggcgugaacugcaccgagguccccguggccauccacgccgaccagcugacgcccaccuggcgcguguacagcaccggguccaacgucuuccagacccgggccggcugccugaucggggcggagcacgugaacaacagcuacgagugcgacauccccaucggcgccggcaucugcgccuccuaccagacgcagaccaacagcccgcgccgggcccgcuccguggcgagccaguccaucaucgccuacaccaugagccucggggccgagaacuccgucgccuacagcaacaacuccaucgccauccccaccaacuucacgaucagcgugaccaccgagauccugcccguguccaugaccaagacgagcgucgacugcaccauguacaucugcggcgacagcaccgagugcuccaaccugcuccugcaguacgggagcuucugcacccagcugaaccgggcgcucacgggcaucgccguggagcaggacaagaacacccaggagguguucgcccaggucaagcagaucuacaagacgcccccgaucaaggacuucgggggcuucaacuucucccagauccugcccgaccccagcaagcccuccaagcgcagcuucaucgaggaccuccuguucaacaaggugacccuggccgacgccggcuucaucaagcaguacggggacugccugggcgacaucgcggcccgggaccucaucugcgcccagaaguucaacgggcugaccgugcugccgccccuccugaccgacgagaugaucgcccaguacaccuccgcccugcucgcgggcaccaucacgagcggguggaccuucggcgccggcgccgcccugcagauccccuucgcgaugcagauggccuaccgcuucaacgggaucggcgucacccagaacgugcuguacgagaaccagaagcucaucgccaaccaguucaacuccgccaucgggaagauccaggacagccuguccagcaccgccuccgcgcugggcaagcuccaggacguggucaaccagaacgcccaggcccugaacacgcuggugaagcagcucagcuccaacuucggggccaucagcuccgugcugaacgacauccugagccggcucgacaaggucgaggccgaggugcagaucgaccgccugaucaccggccggcugcagucccuccagaccuacgugacccagcagcugauccgcgcggccgagauccgggccagcgccaaccuggccgcgaccaagaugagcgagugcguccucggccaguccaagcgcguggacuucugcgggaagggcuaccaccugaugagcuucccccaguccgccccgcacgggguggucuuccugcacgugacguacguccccgcccaggagaagaacuucaccaccgcccccgcgaucugccacgacggcaaggcccacuucccccgggaggggguguucgugagcaacggcacccacugguucgucacgcagcgcaacuucuacgagccgcagaucaucaccaccgacaacaccuucguguccggcaacugcgacguggucaucgggaucgugaacaacacgguguacgacccccuccagcccgagcuggacagcuucaaggaggagcuggacaaguacuucaagaaccacaccucccccgacgucgaccucggcgacaucagcgggaucaacgccuccguggugaacauccagaaggagaucgaccggcugaacgaggucgccaagaaccugaacgagagccucaucgaccugcaggagcugggcaaguacgagcaguacaucaaguggccgugguacaucuggcucggcuucaucgccgggcugaucgcgaucgugauggugaccaucaugcugugcugcaugaccuccugcugcagcugccucaagggcugcugcuccugcgggagcugcugcaaguucgacgaggacgacuccgagcccguccugaagggcgugaagcugcacuacacgugaggacuagucccuguucccagagcccacuuuuuuuucuuuuuuugaaauaaaauagccugucuuucagaucucaaaggcucuuuucagagccaccaaaaaaaaaaaaaaaaaaaaaaaaaaaaaaaaaaaaaaaaaaaaaaaaaaaaaaaaaaaaaaaaaaaaaaaaaaaaaaaaaaaaaaaaaaaaaaaaaaaaa

SEQ ID NO: 23445 - RNA, 4094 nt, Artificial Sequence
  SARS-CoV-2/Wuhan/WIV05/2019__EPI_ISL_402128 spike protein mRNA gc (1-1273)
aggagagucccgcagucggcguccagcggcucugcuuguucgugugugugucguugcaggccuuauucaagcuuaccauguucguguuccuggugcugcugccccuggugagcagccagugcgugaaccugaccacccggacccagcugccaccagccuacaccaacagcuucacccggggcgucuacuaccccgacaagguguuccggagcagcguccugcacagcacccaggaccuguuccugcccuucuucagcaacgugaccugguuccacgccauccacgugagcggcaccaacggcaccaagcgguucgacaaccccgugcugcccuucaacgacggcguguacuucgccagcaccgagaagagcaacaucauccggggcuggaucuucggcaccacccuggacagcaagacccagagccugcugaucgugaauaacgccaccaacguggugaucaaggugugcgaguuccaguucugcaacgaccccuuccugggcguguacuaccacaagaacaacaagagcuggauggagagcgaguuccggguguacagcagcgccaacaacugcaccuucgaguacgugagccagcccuuccugauggaccuggagggcaagcagggcaacuucaagaaccugcgggaguucguguucaagaacaucgacggcuacuucaagaucuacagcaagcacaccccaaucaaccuggugcgggaucugccccagggcuucucagcccuggagccccugguggaccugcccaucggcaucaacaucacccgguuccagacccugcuggcccugcaccggagcuaccugaccccaggcgacagcagcagcggguggacagcaggcgcggcugcuuacuacgugggcuaccugcagccccggaccuuccugcugaaguacaacgagaacggcaccaucaccgacgccguggacugcgcccuggacccucugagcgagaccaagugcacccugaagagcuucaccguggagaagggcaucuaccagaccagcaacuuccgggugcagcccaccgagagcaucgugcgguuccccaacaucaccaaccugugccccuucggcgagguguucaacgccacccgguucgccagcguguacgccuggaaccggaagcggaucagcaacugcguggccgacuacagcgugcuguacaacagcgccagcuucagcaccuucaagugcuacggcgugagccccaccaagcugaacgaccugugcuucaccaacguguacgccgacagcuucgugauccguggcgacgaggugcggcagaucgcacccggccagacaggcaagaucgccgacuacaacuacaagcugcccgacgacuucaccggcugcgugaucgccuggaacagcaacaaccucgacagcaaggugggcggcaacuacaacuaccuguaccggcuguuccggaagagcaaccugaagcccuucgagcgggacaucagcaccgagaucuaccaagccggcuccaccccuugcaacggcguggagggcuucaacugcuacuucccucugcagagcuacggcuuccagcccaccaacggcgugggcuaccagcccuaccgggugguggugcugagcuucgagcugcugcacgccccagccaccguguguggccccaagaagagcaccaaccuggugaagaacaagugcgugaacuucaacuucaacggccuuaccggcaccggcgugcugaccgagagcaacaagaaauuccugcccuuucagcaguucggccgggacaucgccgacaccaccgacgcugugcgggauccccagacccuggagauccuggacaucaccccuugcagcuucggcggcgugagcgugaucaccccaggcaccaacaccagcaaccagguggccgugcuguaccaggacgugaacugcaccgaggugcccguggccauccacgccgaccagcugacacccaccuggcgggucuacagcaccggcagcaacguguuccagacccgggccgguugccugaucggcgccgagcacgugaacaacagcuacgagugcgacauccccaucggcgccggcaucugugccagcuaccagacccagaccaauucaccccggagggcaaggagcguggccagccagagcaucaucgccuacaccaugagccugggcgccgagaacagcguggccuacagcaacaacagcaucgccauccccaccaacuucaccaucagcgugaccaccgagauucugcccgugagcaugaccaagaccagcguggacugcaccauguacaucugcggcgacagcaccgagugcagcaaccugcugcugcaguacggcagcuucugcacccagcugaaccgggcccugaccggcaucgccguggagcaggacaagaacacccaggagguguucgcccaggugaagcagaucuacaagaccccucccaucaaggacuucggcggcuucaacuucagccagauccugcccgaccccagcaagcccagcaagcggagcuucaucgaggaccugcuguucaacaaggugacccuagccgacgccggcuucaucaagcaguacggcgacugccucggcgacauagccgcccgggaccugaucugcgcccagaaguucaacggccugaccgugcugccuccccugcugaccgacgagaugaucgcccaguacaccagcgcccuguuagccggaaccaucaccagcggcuggacuuucggcgcuggagccgcucugcagauccccuucgccaugcagauggccuaccgguucaacggcaucggcgugacccagaacgugcuguacgagaaccagaagcugaucgccaaccaguucaacagcgccaucggcaagauccaggacagccugagcagcaccgcuagcgcccugggcaagcugcaggacguggugaaccagaacgcccaggcccugaacacccuggugaagcagcugagcagcaacuucggcgccaucagcagcgugcugaacgacauccugagccggcuggacaaggucgaggccgaggugcagaucgaccggcugaucacuggccggcugcagagccugcagaccuacgugacccagcagcugauccgggccgccgagauucgggccagcgccaaccuggccgccaccaagaugagcgagugcgugcugggccagagcaagcggguggacuucugcggcaagggcuaccaccugaugagcuuuccccagagcgcaccccacggagugguguuccugcacgugaccuacgugcccgcccaggagaagaacuucaccaccgccccagccaucugccacgacggcaaggcccacuuuccccgggagggcguguucgugagcaacggcacccacugguucgugacccagcggaacuucuacgagccccagaucaucaccaccgacaacaccuucgugagcggcaacugcgacguggugaucggcaucgugaacaacaccguguacgauccccugcagcccgagcuggacagcuucaaggaggagcuggacaaguacuucaagaaucacaccagccccgacguggaccugggcgacaucagcggcaucaacgccagcguggugaacauccagaaggagaucgaucggcugaacgagguggccaagaaccugaacgagagccugaucgaccugcaggagcugggcaaguacgagcaguacaucaaguggcccugguacaucuggcugggcuucaucgccggccugaucgccaucgugauggugaccaucaugcugugcugcaugaccagcugcugcagcugccugaagggcuguugcagcugcggcagcugcugcaaguucgacgaggacgacagcgagcccgugcugaagggcgugaagcugcacuacaccugaggacuagucccuguucccagagcccacuuuuuuuucuuuuuuugaaauaaaauagccugucuuucagaucucaaaggcucuuuucagagccaccaaaaaaaaaaaaaaaaaaaaaaaaaaaaaaaaaaaaaaaaaaaaaaaaaaaaaaaaaaaaaaaaaaaaaaaaaaaaaaaaaaaaaaaaaaaaaaaaaaaaa

SEQ ID NO: 23446 - RNA, 4094 nt, Artificial Sequence
  SARS-CoV-2/Wuhan/WIV05/2019__EPI_ISL_402128 spike protein mRNA gc (1-1273)(D614G)
aggagagucccgcagucggcguccagcggcucugcuuguucgugugugugucguugcaggccuuauucaagcuuaccauguucguguuccuggugcugcugccccuggugagcagccagugcgugaaccugaccacccggacccagcugccaccagccuacaccaacagcuucacccggggcgucuacuaccccgacaagguguuccggagcagcguccugcacagcacccaggaccuguuccugcccuucuucagcaacgugaccugguuccacgccauccacgugagcggcaccaacggcaccaagcgguucgacaaccccgugcugcccuucaacgacggcguguacuucgccagcaccgagaagagcaacaucauccggggcuggaucuucggcaccacccuggacagcaagacccagagccugcugaucgugaauaacgccaccaacguggugaucaaggugugcgaguuccaguucugcaacgaccccuuccugggcguguacuaccacaagaacaacaagagcuggauggagagcgaguuccggguguacagcagcgccaacaacugcaccuucgaguacgugagccagcccuuccugauggaccuggagggcaagcagggcaacuucaagaaccugcgggaguucguguucaagaacaucgacggcuacuucaagaucuacagcaagcacaccccaaucaaccuggugcgggaucugccccagggcuucucagcccuggagccccugguggaccugcccaucggcaucaacaucacccgguuccagacccugcuggcccugcaccggagcuaccugaccccaggcgacagcagcagcggguggacagcaggcgcggcugcuuacuacgugggcuaccugcagccccggaccuuccugcugaaguacaacgagaacggcaccaucaccgacgccguggacugcgcccuggacccucugagcgagaccaagugcacccugaagagcuucaccguggagaagggcaucuaccagaccagcaacuuccgggugcagcccaccgagagcaucgugcgguuccccaacaucaccaaccugugccccuucggcgagguguucaacgccacccgguucgccagcguguacgccuggaaccggaagcggaucagcaacugcguggccgacuacagcgugcuguacaacagcgccagcuucagcaccuucaagugcuacggcgugagccccaccaagcugaacgaccugugcuucaccaacguguacgccgacagcuucgugauccguggcgacgaggugcggcagaucgcacccggccagacaggcaagaucgccgacuacaacuacaagcugcccgacgacuucaccggcugcgugaucgccuggaacagcaacaaccucgacagcaaggugggcggcaacuacaacuaccuguaccggcuguuccggaagagcaaccugaagcccuucgagcgggacaucagcaccgagaucuaccaagccggcuccaccccuugcaacggcguggagggcuucaacugcuacuucccucugcagagcuacggcuuccagcccaccaacggcgugggcuaccagcccuaccgggugguggugcugagcuucgagcugcugcacgccccagccaccguguguggccccaagaagagcaccaaccuggugaagaacaagugcgugaacuucaacuucaacggccuuaccggcaccggcgugcugaccgagagcaacaagaaauuccugcccuuucagcaguucggccgggacaucgccgacaccaccgacgcugugcgggauccccagacccuggagauccuggacaucaccccuugcagcuucggcggcgugagcgugaucaccccaggcaccaacaccagcaaccagguggccgugcuguaccagggcgugaacugcaccgaggugcccguggccauccacgccgaccagcugacacccaccuggcgggucuacagcaccggcagcaacguguuccagacccgggccgguugccugaucggcgccgagcacgugaacaacagcuacgagugcgacauccccaucggcgccggcaucugugccagcuaccagacccagaccaauucaccccggagggcaaggagcguggccagccagagcaucaucgccuacaccaugagccugggcgccgagaacagcguggccuacagcaacaacagcaucgccauccccaccaacuucaccaucagcgugaccaccgagauucugcccgugagcaugaccaagaccagcguggacugcaccauguacaucugcggcgacagcaccgagugcagcaaccugcugcugcaguacggcagcuucugcacccagcugaaccgggcccugaccggcaucgccguggagcaggacaagaacacccaggagguguucgcccaggugaagcagaucuacaagaccccucccaucaaggacuucggcggcuucaacuucagccagauccugcccgaccccagcaagcccagcaagcggagcuucaucgaggaccugcuguucaacaaggugacccuagccgacgccggcuucaucaagcaguacggcgacugccucggcgacauagccgcccgggaccugaucugcgcccagaaguucaacggccugaccgugcugccuccccugcugaccgacgagaugaucgcccaguacaccagcgcccuguuagccggaaccaucaccagcggcuggacuuucggcgcuggagccgcucugcagauccccuucgccaugcagauggccuaccgguucaacggcaucggcgugacccagaacgugcuguacgagaaccagaagcugaucgccaaccaguucaacagcgccaucggcaagauccaggacagccugagcagcaccgcuagcgcccugggcaagcugcaggacguggugaaccagaacgcccaggcccugaacacccuggugaagcagcugagcagcaacuucggcgccaucagcagcgugcugaacgacauccugagccggcuggacaaggucgaggccgaggugcagaucgaccggcugaucacuggccggcugcagagccugcagaccuacgugacccagcagcugauccgggccgccgagauucgggccagcgccaaccuggccgccaccaagaugagcgagugcgugcugggccagagcaagcggguggacuucugcggcaagggcuaccaccugaugagcuuuccccagagcgcaccccacggagugguguuccugcacgugaccuacgugcccgcccaggagaagaacuucaccaccgccccagccaucugccacgacggcaaggcccacuuuccccgggagggcguguucgugagcaacggcacccacugguucgugacccagcggaacuucuacgagccccagaucaucaccaccgacaacaccuucgugagcggcaacugcgacguggugaucggcaucgugaacaacaccguguacgauccccugcagcccgagcuggacagcuucaaggaggagcuggacaaguacuucaagaaucacaccagccccgacguggaccugggcgacaucagcggcaucaacgccagcguggugaacauccagaaggagaucgaucggcugaacgagguggccaagaaccugaacgagagccugaucgaccugcaggagcugggcaaguacgagcaguacaucaaguggcccugguacaucuggcugggcuucaucgccggccugaucgccaucgugauggugaccaucaugcugugcugcaugaccagcugcugcagcugccugaagggcuguugcagcugcggcagcugcugcaaguucgacgaggacgacagcgagcccgugcugaagggcgugaagcugcacuacaccugaggacuagucccuguucccagagcccacuuuuuuuucuuuuuuugaaauaaaauagccugucuuucagaucucaaaggcucuuuucagagccaccaaaaaaaaaaaaaaaaaaaaaaaaaaaaaaaaaaaaaaaaaaaaaaaaaaaaaaaaaaaaaaaaaaaaaaaaaaaaaaaaaaaaaaaaaaaaaaaaaaaaa

SEQ ID NO: 23447 - RNA, 4094 nt, Artificial Sequence
  SARS-CoV-2/Wuhan/WIV05/2019__EPI_ISL_402128 spike protein mRNA gc (1-1273)(A222V_D614G)
aggagagucccgcagucggcguccagcggcucugcuuguucgugugugugucguugcaggccuuauucaagcuuaccauguucguguuccuggugcugcugccccuggugagcagccagugcgugaaccugaccacccggacccagcugccaccagccuacaccaacagcuucacccggggcgucuacuaccccgacaagguguuccggagcagcguccugcacagcacccaggaccuguuccugcccuucuucagcaacgugaccugguuccacgccauccacgugagcggcaccaacggcaccaagcgguucgacaaccccgugcugcccuucaacgacggcguguacuucgccagcaccgagaagagcaacaucauccggggcuggaucuucggcaccacccuggacagcaagacccagagccugcugaucgugaauaacgccaccaacguggugaucaaggugugcgaguuccaguucugcaacgaccccuuccugggcguguacuaccacaagaacaacaagagcuggauggagagcgaguuccggguguacagcagcgccaacaacugcaccuucgaguacgugagccagcccuuccugauggaccuggagggcaagcagggcaacuucaagaaccugcgggaguucguguucaagaacaucgacggcuacuucaagaucuacagcaagcacaccccaaucaaccuggugcgggaucugccccagggcuucucagugcuggagccccugguggaccugcccaucggcaucaacaucacccgguuccagacccugcuggcccugcaccggagcuaccugaccccaggcgacagcagcagcggguggacagcaggcgcggcugcuuacuacgugggcuaccugcagccccggaccuuccugcugaaguacaacgagaacggcaccaucaccgacgccguggacugcgcccuggacccucugagcgagaccaagugcacccugaagagcuucaccguggagaagggcaucuaccagaccagcaacuuccgggugcagcccaccgagagcaucgugcgguuccccaacaucaccaaccugugccccuucggcgagguguucaacgccacccgguucgccagcguguacgccuggaaccggaagcggaucagcaacugcguggccgacuacagcgugcuguacaacagcgccagcuucagcaccuucaagugcuacggcgugagccccaccaagcugaacgaccugugcuucaccaacguguacgccgacagcuucgugauccguggcgacgaggugcggcagaucgcacccggccagacaggcaagaucgccgacuacaacuacaagcugcccgacgacuucaccggcugcgugaucgccuggaacagcaacaaccucgacagcaaggugggcggcaacuacaacuaccuguaccggcuguuccggaagagcaaccugaagcccuucgagcgggacaucagcaccgagaucuaccaagccggcuccaccccuugcaacggcguggagggcuucaacugcuacuucccucugcagagcuacggcuuccagcccaccaacggcgugggcuaccagcccuaccgggugguggugcugagcuucgagcugcugcacgccccagccaccguguguggccccaagaagagcaccaaccuggugaagaacaagugcgugaacuucaacuucaacggccuuaccggcaccggcgugcugaccgagagcaacaagaaauuccugcccuuucagcaguucggccgggacaucgccgacaccaccgacgcugugcgggauccccagacccuggagauccuggacaucaccccuugcagcuucggcggcgugagcgugaucaccccaggcaccaacaccagcaaccagguggccgugcuguaccagggcgugaacugcaccgaggugcccguggccauccacgccgaccagcugacacccaccuggcgggucuacagcaccggcagcaacguguuccagacccgggccgguugccugaucggcgccgagcacgugaacaacagcuacgagugcgacauccccaucggcgccggcaucugugccagcuaccagacccagaccaauucaccccggagggcaaggagcguggccagccagagcaucaucgccuacaccaugagccugggcgccgagaacagcguggccuacagcaacaacagcaucgccauccccaccaacuucaccaucagcgugaccaccgagauucugcccgugagcaugaccaagaccagcguggacugcaccauguacaucugcggcgacagcaccgagugcagcaaccugcugcugcaguacggcagcuucugcacccagcugaaccgggcccugaccggcaucgccguggagcaggacaagaacacccaggagguguucgcccaggugaagcagaucuacaagaccccucccaucaaggacuucggcggcuucaacuucagccagauccugcccgaccccagcaagcccagcaagcggagcuucaucgaggaccugcuguucaacaaggugacccuagccgacgccggcuucaucaagcaguacggcgacugccucggcgacauagccgcccgggaccugaucugcgcccagaaguucaacggccugaccgugcugccuccccugcugaccgacgagaugaucgcccaguacaccagcgcccuguuagccggaaccaucaccagcggcuggacuuucggcgcuggagccgcucugcagauccccuucgccaugcagauggccuaccgguucaacggcaucggcgugacccagaacgugcuguacgagaaccagaagcugaucgccaaccaguucaacagcgccaucggcaagauccaggacagccugagcagcaccgcuagcgcccugggcaagcugcaggacguggugaaccagaacgcccaggcccugaacacccuggugaagcagcugagcagcaacuucggcgccaucagcagcgugcugaacgacauccugagccggcuggacaaggucgaggccgaggugcagaucgaccggcugaucacuggccggcugcagagccugcagaccuacgugacccagcagcugauccgggccgccgagauucgggccagcgccaaccuggccgccaccaagaugagcgagugcgugcugggccagagcaagcggguggacuucugcggcaagggcuaccaccugaugagcuuuccccagagcgcaccccacggagugguguuccugcacgugaccuacgugcccgcccaggagaagaacuucaccaccgccccagccaucugccacgacggcaaggcccacuuuccccgggagggcguguucgugagcaacggcacccacugguucgugacccagcggaacuucuacgagccccagaucaucaccaccgacaacaccuucgugagcggcaacugcgacguggugaucggcaucgugaacaacaccguguacgauccccugcagcccgagcuggacagcuucaaggaggagcuggacaaguacuucaagaaucacaccagccccgacguggaccugggcgacaucagcggcaucaacgccagcguggugaacauccagaaggagaucgaucggcugaacgagguggccaagaaccugaacgagagccugaucgaccugcaggagcugggcaaguacgagcaguacaucaaguggcccugguacaucuggcugggcuucaucgccggccugaucgccaucgugauggugaccaucaugcugugcugcaugaccagcugcugcagcugccugaagggcuguugcagcugcggcagcugcugcaaguucgacgaggacgacagcgagcccgugcugaagggcgugaagcugcacuacaccugaggacuagucccuguucccagagcccacuuuuuuuucuuuuuuugaaauaaaauagccugucuuucagaucucaaaggcucuuuucagagccaccaaaaaaaaaaaaaaaaaaaaaaaaaaaaaaaaaaaaaaaaaaaaaaaaaaaaaaaaaaaaaaaaaaaaaaaaaaaaaaaaaaaaaaaaaaaaaaaaaaaaa

SEQ ID NO: 23448 - RNA, 4094 nt, Artificial Sequence
  SARS-CoV-2/Wuhan/WIV05/2019__EPI_ISL_402128 spike protein mRNA gc (1-1273)(N439K_D614G)
aggagagucccgcagucggcguccagcggcucugcuuguucgugugugugucguugcaggccuuauucaagcuuaccauguucguguuccuggugcugcugccccuggugagcagccagugcgugaaccugaccacccggacccagcugccaccagccuacaccaacagcuucacccggggcgucuacuaccccgacaagguguuccggagcagcguccugcacagcacccaggaccuguuccugcccuucuucagcaacgugaccugguuccacgccauccacgugagcggcaccaacggcaccaagcgguucgacaaccccgugcugcccuucaacgacggcguguacuucgccagcaccgagaagagcaacaucauccggggcuggaucuucggcaccacccuggacagcaagacccagagccugcugaucgugaauaacgccaccaacguggugaucaaggugugcgaguuccaguucugcaacgaccccuuccugggcguguacuaccacaagaacaacaagagcuggauggagagcgaguuccggguguacagcagcgccaacaacugcaccuucgaguacgugagccagcccuuccugauggaccuggagggcaagcagggcaacuucaagaaccugcgggaguucguguucaagaacaucgacggcuacuucaagaucuacagcaagcacaccccaaucaaccuggugcgggaucugccccagggcuucucagcccuggagccccugguggaccugcccaucggcaucaacaucacccgguuccagacccugcuggcccugcaccggagcuaccugaccccaggcgacagcagcagcggguggacagcaggcgcggcugcuuacuacgugggcuaccugcagccccggaccuuccugcugaaguacaacgagaacggcaccaucaccgacgccguggacugcgcccuggacccucugagcgagaccaagugcacccugaagagcuucaccguggagaagggcaucuaccagaccagcaacuuccgggugcagcccaccgagagcaucgugcgguuccccaacaucaccaaccugugccccuucggcgagguguucaacgccacccgguucgccagcguguacgccuggaaccggaagcggaucagcaacugcguggccgacuacagcgugcuguacaacagcgccagcuucagcaccuucaagugcuacggcgugagccccaccaagcugaacgaccugugcuucaccaacguguacgccgacagcuucgugauccguggcgacgaggugcggcagaucgcacccggccagacaggcaagaucgccgacuacaacuacaagcugcccgacgacuucaccggcugcgugaucgccuggaacagcaagaaccucgacagcaaggugggcggcaacuacaacuaccuguaccggcuguuccggaagagcaaccugaagcccuucgagcgggacaucagcaccgagaucuaccaagccggcuccaccccuugcaacggcguggagggcuucaacugcuacuucccucugcagagcuacggcuuccagcccaccaacggcgugggcuaccagcccuaccgggugguggugcugagcuucgagcugcugcacgccccagccaccguguguggccccaagaagagcaccaaccuggugaagaacaagugcgugaacuucaacuucaacggccuuaccggcaccggcgugcugaccgagagcaacaagaaauuccugcccuuucagcaguucggccgggacaucgccgacaccaccgacgcugugcgggauccccagacccuggagauccuggacaucaccccuugcagcuucggcggcgugagcgugaucaccccaggcaccaacaccagcaaccagguggccgugcuguaccagggcgugaacugcaccgaggugcccguggccauccacgccgaccagcugacacccaccuggcgggucuacagcaccggcagcaacguguuccagacccgggccgguugccugaucggcgccgagcacgugaacaacagcuacgagugcgacauccccaucggcgccggcaucugugccagcuaccagacccagaccaauucaccccggagggcaaggagcguggccagccagagcaucaucgccuacaccaugagccugggcgccgagaacagcguggccuacagcaacaacagcaucgccauccccaccaacuucaccaucagcgugaccaccgagauucugcccgugagcaugaccaagaccagcguggacugcaccauguacaucugcggcgacagcaccgagugcagcaaccugcugcugcaguacggcagcuucugcacccagcugaaccgggcccugaccggcaucgccguggagcaggacaagaacacccaggagguguucgcccaggugaagcagaucuacaagaccccucccaucaaggacuucggcggcuucaacuucagccagauccugcccgaccccagcaagcccagcaagcggagcuucaucgaggaccugcuguucaacaaggugacccuagccgacgccggcuucaucaagcaguacggcgacugccucggcgacauagccgcccgggaccugaucugcgcccagaaguucaacggccugaccgugcugccuccccugcugaccgacgagaugaucgcccaguacaccagcgcccuguuagccggaaccaucaccagcggcuggacuuucggcgcuggagccgcucugcagauccccuucgccaugcagauggccuaccgguucaacggcaucggcgugacccagaacgugcuguacgagaaccagaagcugaucgccaaccaguucaacagcgccaucggcaagauccaggacagccugagcagcaccgcuagcgcccugggcaagcugcaggacguggugaaccagaacgcccaggcccugaacacccuggugaagcagcugagcagcaacuucggcgccaucagcagcgugcugaacgacauccugagccggcuggacaaggucgaggccgaggugcagaucgaccggcugaucacuggccggcugcagagccugcagaccuacgugacccagcagcugauccgggccgccgagauucgggccagcgccaaccuggccgccaccaagaugagcgagugcgugcugggccagagcaagcggguggacuucugcggcaagggcuaccaccugaugagcuuuccccagagcgcaccccacggagugguguuccugcacgugaccuacgugcccgcccaggagaagaacuucaccaccgccccagccaucugccacgacggcaaggcccacuuuccccgggagggcguguucgugagcaacggcacccacugguucgugacccagcggaacuucuacgagccccagaucaucaccaccgacaacaccuucgugagcggcaacugcgacguggugaucggcaucgugaacaacaccguguacgauccccugcagcccgagcuggacagcuucaaggaggagcuggacaaguacuucaagaaucacaccagccccgacguggaccugggcgacaucagcggcaucaacgccagcguggugaacauccagaaggagaucgaucggcugaacgagguggccaagaaccugaacgagagccugaucgaccugcaggagcugggcaaguacgagcaguacaucaaguggcccugguacaucuggcugggcuucaucgccggccugaucgccaucgugauggugaccaucaugcugugcugcaugaccagcugcugcagcugccugaagggcuguugcagcugcggcagcugcugcaaguucgacgaggacgacagcgagcccgugcugaagggcgugaagcugcacuacaccugaggacuagucccuguucccagagcccacuuuuuuuucuuuuuuugaaauaaaauagccugucuuucagaucucaaaggcucuuuucagagccaccaaaaaaaaaaaaaaaaaaaaaaaaaaaaaaaaaaaaaaaaaaaaaaaaaaaaaaaaaaaaaaaaaaaaaaaaaaaaaaaaaaaaaaaaaaaaaaaaaaaaa

SEQ ID NO: 23449 - RNA, 4094 nt, Artificial Sequence
  SARS-CoV-2/Wuhan/WIV05/2019__EPI_ISL_402128 spike protein mRNA gc (1-1273)(S477N_D614G)
aggagagucccgcagucggcguccagcggcucugcuuguucgugugugugucguugcaggccuuauucaagcuuaccauguucguguuccuggugcugcugccccuggugagcagccagugcgugaaccugaccacccggacccagcugccaccagccuacaccaacagcuucacccggggcgucuacuaccccgacaagguguuccggagcagcguccugcacagcacccaggaccuguuccugcccuucuucagcaacgugaccugguuccacgccauccacgugagcggcaccaacggcaccaagcgguucgacaaccccgugcugcccuucaacgacggcguguacuucgccagcaccgagaagagcaacaucauccggggcuggaucuucggcaccacccuggacagcaagacccagagccugcugaucgugaauaacgccaccaacguggugaucaaggugugcgaguuccaguucugcaacgaccccuuccugggcguguacuaccacaagaacaacaagagcuggauggagagcgaguuccggguguacagcagcgccaacaacugcaccuucgaguacgugagccagcccuuccugauggaccuggagggcaagcagggcaacuucaagaaccugcgggaguucguguucaagaacaucgacggcuacuucaagaucuacagcaagcacaccccaaucaaccuggugcgggaucugccccagggcuucucagcccuggagccccugguggaccugcccaucggcaucaacaucacccgguuccagacccugcuggcccugcaccggagcuaccugaccccaggcgacagcagcagcggguggacagcaggcgcggcugcuuacuacgugggcuaccugcagccccggaccuuccugcugaaguacaacgagaacggcaccaucaccgacgccguggacugcgcccuggacccucugagcgagaccaagugcacccugaagagcuucaccguggagaagggcaucuaccagaccagcaacuuccgggugcagcccaccgagagcaucgugcgguuccccaacaucaccaaccugugccccuucggcgagguguucaacgccacccgguucgccagcguguacgccuggaaccggaagcggaucagcaacugcguggccgacuacagcgugcuguacaacagcgccagcuucagcaccuucaagugcuacggcgugagccccaccaagcugaacgaccugugcuucaccaacguguacgccgacagcuucgugauccguggcgacgaggugcggcagaucgcacccggccagacaggcaagaucgccgacuacaacuacaagcugcccgacgacuucaccggcugcgugaucgccuggaacagcaacaaccucgacagcaaggugggcggcaacuacaacuaccuguaccggcuguuccggaagagcaaccugaagcccuucgagcgggacaucagcaccgagaucuaccaagccggcaacaccccuugcaacggcguggagggcuucaacugcuacuucccucugcagagcuacggcuuccagcccaccaacggcgugggcuaccagcccuaccgggugguggugcugagcuucgagcugcugcacgccccagccaccguguguggccccaagaagagcaccaaccuggugaagaacaagugcgugaacuucaacuucaacggccuuaccggcaccggcgugcugaccgagagcaacaagaaauuccugcccuuucagcaguucggccgggacaucgccgacaccaccgacgcugugcgggauccccagacccuggagauccuggacaucaccccuugcagcuucggcggcgugagcgugaucaccccaggcaccaacaccagcaaccagguggccgugcuguaccagggcgugaacugcaccgaggugcccguggccauccacgccgaccagcugacacccaccuggcgggucuacagcaccggcagcaacguguuccagacccgggccgguugccugaucggcgccgagcacgugaacaacagcuacgagugcgacauccccaucggcgccggcaucugugccagcuaccagacccagaccaauucaccccggagggcaaggagcguggccagccagagcaucaucgccuacaccaugagccugggcgccgagaacagcguggccuacagcaacaacagcaucgccauccccaccaacuucaccaucagcgugaccaccgagauucugcccgugagcaugaccaagaccagcguggacugcaccauguacaucugcggcgacagcaccgagugcagcaaccugcugcugcaguacggcagcuucugcacccagcugaaccgggcccugaccggcaucgccguggagcaggacaagaacacccaggagguguucgcccaggugaagcagaucuacaagaccccucccaucaaggacuucggcggcuucaacuucagccagauccugcccgaccccagcaagcccagcaagcggagcuucaucgaggaccugcuguucaacaaggugacccuagccgacgccggcuucaucaagcaguacggcgacugccucggcgacauagccgcccgggaccugaucugcgcccagaaguucaacggccugaccgugcugccuccccugcugaccgacgagaugaucgcccaguacaccagcgcccuguuagccggaaccaucaccagcggcuggacuuucggcgcuggagccgcucugcagauccccuucgccaugcagauggccuaccgguucaacggcaucggcgugacccagaacgugcuguacgagaaccagaagcugaucgccaaccaguucaacagcgccaucggcaagauccaggacagccugagcagcaccgcuagcgcccugggcaagcugcaggacguggugaaccagaacgcccaggcccugaacacccuggugaagcagcugagcagcaacuucggcgccaucagcagcgugcugaacgacauccugagccggcuggacaaggucgaggccgaggugcagaucgaccggcugaucacuggccggcugcagagccugcagaccuacgugacccagcagcugauccgggccgccgagauucgggccagcgccaaccuggccgccaccaagaugagcgagugcgugcugggccagagcaagcggguggacuucugcggcaagggcuaccaccugaugagcuuuccccagagcgcaccccacggagugguguuccugcacgugaccuacgugcccgcccaggagaagaacuucaccaccgccccagccaucugccacgacggcaaggcccacuuuccccgggagggcguguucgugagcaacggcacccacugguucgugacccagcggaacuucuacgagccccagaucaucaccaccgacaacaccuucgugagcggcaacugcgacguggugaucggcaucgugaacaacaccguguacgauccccugcagcccgagcuggacagcuucaaggaggagcuggacaaguacuucaagaaucacaccagccccgacguggaccugggcgacaucagcggcaucaacgccagcguggugaacauccagaaggagaucgaucggcugaacgagguggccaagaaccugaacgagagccugaucgaccugcaggagcugggcaaguacgagcaguacaucaaguggcccugguacaucuggcugggcuucaucgccggccugaucgccaucgugauggugaccaucaugcugugcugcaugaccagcugcugcagcugccugaagggcuguugcagcugcggcagcugcugcaaguucgacgaggacgacagcgagcccgugcugaagggcgugaagcugcacuacaccugaggacuagucccuguucccagagcccacuuuuuuuucuuuuuuugaaauaaaauagccugucuuucagaucucaaaggcucuuuucagagccaccaaaaaaaaaaaaaaaaaaaaaaaaaaaaaaaaaaaaaaaaaaaaaaaaaaaaaaaaaaaaaaaaaaaaaaaaaaaaaaaaaaaaaaaaaaaaaaaaaaaaa

SEQ ID NO: 23450 - RNA, 4094 nt, Artificial Sequence
  SARS-CoV-2/Wuhan/WIV05/2019__EPI_ISL_402128 spike protein mRNA gc (1-1273)(N501Y_D614G)
aggagagucccgcagucggcguccagcggcucugcuuguucgugugugugucguugcaggccuuauucaagcuuaccauguucguguuccuggugcugcugccccuggugagcagccagugcgugaaccugaccacccggacccagcugccaccagccuacaccaacagcuucacccggggcgucuacuaccccgacaagguguuccggagcagcguccugcacagcacccaggaccuguuccugcccuucuucagcaacgugaccugguuccacgccauccacgugagcggcaccaacggcaccaagcgguucgacaaccccgugcugcccuucaacgacggcguguacuucgccagcaccgagaagagcaacaucauccggggcuggaucuucggcaccacccuggacagcaagacccagagccugcugaucgugaauaacgccaccaacguggugaucaaggugugcgaguuccaguucugcaacgaccccuuccugggcguguacuaccacaagaacaacaagagcuggauggagagcgaguuccggguguacagcagcgccaacaacugcaccuucgaguacgugagccagcccuuccugauggaccuggagggcaagcagggcaacuucaagaaccugcgggaguucguguucaagaacaucgacggcuacuucaagaucuacagcaagcacaccccaaucaaccuggugcgggaucugccccagggcuucucagcccuggagccccugguggaccugcccaucggcaucaacaucacccgguuccagacccugcuggcccugcaccggagcuaccugaccccaggcgacagcagcagcggguggacagcaggcgcggcugcuuacuacgugggcuaccugcagccccggaccuuccugcugaaguacaacgagaacggcaccaucaccgacgccguggacugcgcccuggacccucugagcgagaccaagugcacccugaagagcuucaccguggagaagggcaucuaccagaccagcaacuuccgggugcagcccaccgagagcaucgugcgguuccccaacaucaccaaccugugccccuucggcgagguguucaacgccacccgguucgccagcguguacgccuggaaccggaagcggaucagcaacugcguggccgacuacagcgugcuguacaacagcgccagcuucagcaccuucaagugcuacggcgugagccccaccaagcugaacgaccugugcuucaccaacguguacgccgacagcuucgugauccguggcgacgaggugcggcagaucgcacccggccagacaggcaagaucgccgacuacaacuacaagcugcccgacgacuucaccggcugcgugaucgccuggaacagcaacaaccucgacagcaaggugggcggcaacuacaacuaccuguaccggcuguuccggaagagcaaccugaagcccuucgagcgggacaucagcaccgagaucuaccaagccggcuccaccccuugcaacggcguggagggcuucaacugcuacuucccucugcagagcuacggcuuccagcccaccuacggcgugggcuaccagcccuaccgggugguggugcugagcuucgagcugcugcacgccccagccaccguguguggccccaagaagagcaccaaccuggugaagaacaagugcgugaacuucaacuucaacggccuuaccggcaccggcgugcugaccgagagcaacaagaaauuccugcccuuucagcaguucggccgggacaucgccgacaccaccgacgcugugcgggauccccagacccuggagauccuggacaucaccccuugcagcuucggcggcgugagcgugaucaccccaggcaccaacaccagcaaccagguggccgugcuguaccagggcgugaacugcaccgaggugcccguggccauccacgccgaccagcugacacccaccuggcgggucuacagcaccggcagcaacguguuccagacccgggccgguugccugaucggcgccgagcacgugaacaacagcuacgagugcgacauccccaucggcgccggcaucugugccagcuaccagacccagaccaauucaccccggagggcaaggagcguggccagccagagcaucaucgccuacaccaugagccugggcgccgagaacagcguggccuacagcaacaacagcaucgccauccccaccaacuucaccaucagcgugaccaccgagauucugcccgugagcaugaccaagaccagcguggacugcaccauguacaucugcggcgacagcaccgagugcagcaaccugcugcugcaguacggcagcuucugcacccagcugaaccgggcccugaccggcaucgccguggagcaggacaagaacacccaggagguguucgcccaggugaagcagaucuacaagaccccucccaucaaggacuucggcggcuucaacuucagccagauccugcccgaccccagcaagcccagcaagcggagcuucaucgaggaccugcuguucaacaaggugacccuagccgacgccggcuucaucaagcaguacggcgacugccucggcgacauagccgcccgggaccugaucugcgcccagaaguucaacggccugaccgugcugccuccccugcugaccgacgagaugaucgcccaguacaccagcgcccuguuagccggaaccaucaccagcggcuggacuuucggcgcuggagccgcucugcagauccccuucgccaugcagauggccuaccgguucaacggcaucggcgugacccagaacgugcuguacgagaaccagaagcugaucgccaaccaguucaacagcgccaucggcaagauccaggacagccugagcagcaccgcuagcgcccugggcaagcugcaggacguggugaaccagaacgcccaggcccugaacacccuggugaagcagcugagcagcaacuucggcgccaucagcagcgugcugaacgacauccugagccggcuggacaaggucgaggccgaggugcagaucgaccggcugaucacuggccggcugcagagccugcagaccuacgugacccagcagcugauccgggccgccgagauucgggccagcgccaaccuggccgccaccaagaugagcgagugcgugcugggccagagcaagcggguggacuucugcggcaagggcuaccaccugaugagcuuuccccagagcgcaccccacggagugguguuccugcacgugaccuacgugcccgcccaggagaagaacuucaccaccgccccagccaucugccacgacggcaaggcccacuuuccccgggagggcguguucgugagcaacggcacccacugguucgugacccagcggaacuucuacgagccccagaucaucaccaccgacaacaccuucgugagcggcaacugcgacguggugaucggcaucgugaacaacaccguguacgauccccugcagcccgagcuggacagcuucaaggaggagcuggacaaguacuucaagaaucacaccagccccgacguggaccugggcgacaucagcggcaucaacgccagcguggugaacauccagaaggagaucgaucggcugaacgagguggccaagaaccugaacgagagccugaucgaccugcaggagcugggcaaguacgagcaguacaucaaguggcccugguacaucuggcugggcuucaucgccggccugaucgccaucgugauggugaccaucaugcugugcugcaugaccagcugcugcagcugccugaagggcuguugcagcugcggcagcugcugcaaguucgacgaggacgacagcgagcccgugcugaagggcgugaagcugcacuacaccugaggacuagucccuguucccagagcccacuuuuuuuucuuuuuuugaaauaaaauagccugucuuucagaucucaaaggcucuuuucagagccaccaaaaaaaaaaaaaaaaaaaaaaaaaaaaaaaaaaaaaaaaaaaaaaaaaaaaaaaaaaaaaaaaaaaaaaaaaaaaaaaaaaaaaaaaaaaaaaaaaaaaa

SEQ ID NO: 23451 - RNA, 4088 nt, Artificial Sequence
  SARS-CoV-2/Wuhan/WIV05/2019__EPI_ISL_402128 spike protein mRNA gc (1-1273)(H69del_V70del_D614G)
aggagagucccgcagucggcguccagcggcucugcuuguucgugugugugucguugcaggccuuauucaagcuuaccauguucguguuccuggugcugcugccccuggugagcagccagugcgugaaccugaccacccggacccagcugccaccagccuacaccaacagcuucacccggggcgucuacuaccccgacaagguguuccggagcagcguccugcacagcacccaggaccuguuccugcccuucuucagcaacgugaccugguuccacgccaucagcggcaccaacggcaccaagcgguucgacaaccccgugcugcccuucaacgacggcguguacuucgccagcaccgagaagagcaacaucauccggggcuggaucuucggcaccacccuggacagcaagacccagagccugcugaucgugaauaacgccaccaacguggugaucaaggugugcgaguuccaguucugcaacgaccccuuccugggcguguacuaccacaagaacaacaagagcuggauggagagcgaguuccggguguacagcagcgccaacaacugcaccuucgaguacgugagccagcccuuccugauggaccuggagggcaagcagggcaacuucaagaaccugcgggaguucguguucaagaacaucgacggcuacuucaagaucuacagcaagcacaccccaaucaaccuggugcgggaucugccccagggcuucucagcccuggagccccugguggaccugcccaucggcaucaacaucacccgguuccagacccugcuggcccugcaccggagcuaccugaccccaggcgacagcagcagcggguggacagcaggcgcggcugcuuacuacgugggcuaccugcagccccggaccuuccugcugaaguacaacgagaacggcaccaucaccgacgccguggacugcgcccuggacccucugagcgagaccaagugcacccugaagagcuucaccguggagaagggcaucuaccagaccagcaacuuccgggugcagcccaccgagagcaucgugcgguuccccaacaucaccaaccugugccccuucggcgagguguucaacgccacccgguucgccagcguguacgccuggaaccggaagcggaucagcaacugcguggccgacuacagcgugcuguacaacagcgccagcuucagcaccuucaagugcuacggcgugagccccaccaagcugaacgaccugugcuucaccaacguguacgccgacagcuucgugauccguggcgacgaggugcggcagaucgcacccggccagacaggcaagaucgccgacuacaacuacaagcugcccgacgacuucaccggcugcgugaucgccuggaacagcaacaaccucgacagcaaggugggcggcaacuacaacuaccuguaccggcuguuccggaagagcaaccugaagcccuucgagcgggacaucagcaccgagaucuaccaagccggcuccaccccuugcaacggcguggagggcuucaacugcuacuucccucugcagagcuacggcuuccagcccaccaacggcgugggcuaccagcccuaccgggugguggugcugagcuucgagcugcugcacgccccagccaccguguguggccccaagaagagcaccaaccuggugaagaacaagugcgugaacuucaacuucaacggccuuaccggcaccggcgugcugaccgagagcaacaagaaauuccugcccuuucagcaguucggccgggacaucgccgacaccaccgacgcugugcgggauccccagacccuggagauccuggacaucaccccuugcagcuucggcggcgugagcgugaucaccccaggcaccaacaccagcaaccagguggccgugcuguaccagggcgugaacugcaccgaggugcccguggccauccacgccgaccagcugacacccaccuggcgggucuacagcaccggcagcaacguguuccagacccgggccgguugccugaucggcgccgagcacgugaacaacagcuacgagugcgacauccccaucggcgccggcaucugugccagcuaccagacccagaccaauucaccccggagggcaaggagcguggccagccagagcaucaucgccuacaccaugagccugggcgccgagaacagcguggccuacagcaacaacagcaucgccauccccaccaacuucaccaucagcgugaccaccgagauucugcccgugagcaugaccaagaccagcguggacugcaccauguacaucugcggcgacagcaccgagugcagcaaccugcugcugcaguacggcagcuucugcacccagcugaaccgggcccugaccggcaucgccguggagcaggacaagaacacccaggagguguucgcccaggugaagcagaucuacaagaccccucccaucaaggacuucggcggcuucaacuucagccagauccugcccgaccccagcaagcccagcaagcggagcuucaucgaggaccugcuguucaacaaggugacccuagccgacgccggcuucaucaagcaguacggcgacugccucggcgacauagccgcccgggaccugaucugcgcccagaaguucaacggccugaccgugcugccuccccugcugaccgacgagaugaucgcccaguacaccagcgcccuguuagccggaaccaucaccagcggcuggacuuucggcgcuggagccgcucugcagauccccuucgccaugcagauggccuaccgguucaacggcaucggcgugacccagaacgugcuguacgagaaccagaagcugaucgccaaccaguucaacagcgccaucggcaagauccaggacagccugagcagcaccgcuagcgcccugggcaagcugcaggacguggugaaccagaacgcccaggcccugaacacccuggugaagcagcugagcagcaacuucggcgccaucagcagcgugcugaacgacauccugagccggcuggacaaggucgaggccgaggugcagaucgaccggcugaucacuggccggcugcagagccugcagaccuacgugacccagcagcugauccgggccgccgagauucgggccagcgccaaccuggccgccaccaagaugagcgagugcgugcugggccagagcaagcggguggacuucugcggcaagggcuaccaccugaugagcuuuccccagagcgcaccccacggagugguguuccugcacgugaccuacgugcccgcccaggagaagaacuucaccaccgccccagccaucugccacgacggcaaggcccacuuuccccgggagggcguguucgugagcaacggcacccacugguucgugacccagcggaacuucuacgagccccagaucaucaccaccgacaacaccuucgugagcggcaacugcgacguggugaucggcaucgugaacaacaccguguacgauccccugcagcccgagcuggacagcuucaaggaggagcuggacaaguacuucaagaaucacaccagccccgacguggaccugggcgacaucagcggcaucaacgccagcguggugaacauccagaaggagaucgaucggcugaacgagguggccaagaaccugaacgagagccugaucgaccugcaggagcugggcaaguacgagcaguacaucaaguggcccugguacaucuggcugggcuucaucgccggccugaucgccaucgugauggugaccaucaugcugugcugcaugaccagcugcugcagcugccugaagggcuguugcagcugcggcagcugcugcaaguucgacgaggacgacagcgagcccgugcugaagggcgugaagcugcacuacaccugaggacuagucccuguucccagagcccacuuuuuuuucuuuuuuugaaauaaaauagccugucuuucagaucucaaaggcucuuuucagagccaccaaaaaaaaaaaaaaaaaaaaaaaaaaaaaaaaaaaaaaaaaaaaaaaaaaaaaaaaaaaaaaaaaaaaaaaaaaaaaaaaaaaaaaaaaaaaaaaaaaaaa

SEQ ID NO: 23452 - RNA, 4094 nt, Artificial Sequence
  SARS-CoV-2/Wuhan/WIV05/2019__EPI_ISL_402128 spike protein mRNA gc (1-1273)(Y453F_D614G)
aggagagucccgcagucggcguccagcggcucugcuuguucgugugugugucguugcaggccuuauucaagcuuaccauguucguguuccuggugcugcugccccuggugagcagccagugcgugaaccugaccacccggacccagcugccaccagccuacaccaacagcuucacccggggcgucuacuaccccgacaagguguuccggagcagcguccugcacagcacccaggaccuguuccugcccuucuucagcaacgugaccugguuccacgccauccacgugagcggcaccaacggcaccaagcgguucgacaaccccgugcugcccuucaacgacggcguguacuucgccagcaccgagaagagcaacaucauccggggcuggaucuucggcaccacccuggacagcaagacccagagccugcugaucgugaauaacgccaccaacguggugaucaaggugugcgaguuccaguucugcaacgaccccuuccugggcguguacuaccacaagaacaacaagagcuggauggagagcgaguuccggguguacagcagcgccaacaacugcaccuucgaguacgugagccagcccuuccugauggaccuggagggcaagcagggcaacuucaagaaccugcgggaguucguguucaagaacaucgacggcuacuucaagaucuacagcaagcacaccccaaucaaccuggugcgggaucugccccagggcuucucagcccuggagccccugguggaccugcccaucggcaucaacaucacccgguuccagacccugcuggcccugcaccggagcuaccugaccccaggcgacagcagcagcggguggacagcaggcgcggcugcuuacuacgugggcuaccugcagccccggaccuuccugcugaaguacaacgagaacggcaccaucaccgacgccguggacugcgcccuggacccucugagcgagaccaagugcacccugaagagcuucaccguggagaagggcaucuaccagaccagcaacuuccgggugcagcccaccgagagcaucgugcgguuccccaacaucaccaaccugugccccuucggcgagguguucaacgccacccgguucgccagcguguacgccuggaaccggaagcggaucagcaacugcguggccgacuacagcgugcuguacaacagcgccagcuucagcaccuucaagugcuacggcgugagccccaccaagcugaacgaccugugcuucaccaacguguacgccgacagcuucgugauccguggcgacgaggugcggcagaucgcacccggccagacaggcaagaucgccgacuacaacuacaagcugcccgacgacuucaccggcugcgugaucgccuggaacagcaacaaccucgacagcaaggugggcggcaacuacaacuaccuguuccggcuguuccggaagagcaaccugaagcccuucgagcgggacaucagcaccgagaucuaccaagccggcuccaccccuugcaacggcguggagggcuucaacugcuacuucccucugcagagcuacggcuuccagcccaccaacggcgugggcuaccagcccuaccgggugguggugcugagcuucgagcugcugcacgccccagccaccguguguggccccaagaagagcaccaaccuggugaagaacaagugcgugaacuucaacuucaacggccuuaccggcaccggcgugcugaccgagagcaacaagaaauuccugcccuuucagcaguucggccgggacaucgccgacaccaccgacgcugugcgggauccccagacccuggagauccuggacaucaccccuugcagcuucggcggcgugagcgugaucaccccaggcaccaacaccagcaaccagguggccgugcuguaccagggcgugaacugcaccgaggugcccguggccauccacgccgaccagcugacacccaccuggcgggucuacagcaccggcagcaacguguuccagacccgggccgguugccugaucggcgccgagcacgugaacaacagcuacgagugcgacauccccaucggcgccggcaucugugccagcuaccagacccagaccaauucaccccggagggcaaggagcguggccagccagagcaucaucgccuacaccaugagccugggcgccgagaacagcguggccuacagcaacaacagcaucgccauccccaccaacuucaccaucagcgugaccaccgagauucugcccgugagcaugaccaagaccagcguggacugcaccauguacaucugcggcgacagcaccgagugcagcaaccugcugcugcaguacggcagcuucugcacccagcugaaccgggcccugaccggcaucgccguggagcaggacaagaacacccaggagguguucgcccaggugaagcagaucuacaagaccccucccaucaaggacuucggcggcuucaacuucagccagauccugcccgaccccagcaagcccagcaagcggagcuucaucgaggaccugcuguucaacaaggugacccuagccgacgccggcuucaucaagcaguacggcgacugccucggcgacauagccgcccgggaccugaucugcgcccagaaguucaacggccugaccgugcugccuccccugcugaccgacgagaugaucgcccaguacaccagcgcccuguuagccggaaccaucaccagcggcuggacuuucggcgcuggagccgcucugcagauccccuucgccaugcagauggccuaccgguucaacggcaucggcgugacccagaacgugcuguacgagaaccagaagcugaucgccaaccaguucaacagcgccaucggcaagauccaggacagccugagcagcaccgcuagcgcccugggcaagcugcaggacguggugaaccagaacgcccaggcccugaacacccuggugaagcagcugagcagcaacuucggcgccaucagcagcgugcugaacgacauccugagccggcuggacaaggucgaggccgaggugcagaucgaccggcugaucacuggccggcugcagagccugcagaccuacgugacccagcagcugauccgggccgccgagauucgggccagcgccaaccuggccgccaccaagaugagcgagugcgugcugggccagagcaagcggguggacuucugcggcaagggcuaccaccugaugagcuuuccccagagcgcaccccacggagugguguuccugcacgugaccuacgugcccgcccaggagaagaacuucaccaccgccccagccaucugccacgacggcaaggcccacuuuccccgggagggcguguucgugagcaacggcacccacugguucgugacccagcggaacuucuacgagccccagaucaucaccaccgacaacaccuucgugagcggcaacugcgacguggugaucggcaucgugaacaacaccguguacgauccccugcagcccgagcuggacagcuucaaggaggagcuggacaaguacuucaagaaucacaccagccccgacguggaccugggcgacaucagcggcaucaacgccagcguggugaacauccagaaggagaucgaucggcugaacgagguggccaagaaccugaacgagagccugaucgaccugcaggagcugggcaaguacgagcaguacaucaaguggcccugguacaucuggcugggcuucaucgccggccugaucgccaucgugauggugaccaucaugcugugcugcaugaccagcugcugcagcugccugaagggcuguugcagcugcggcagcugcugcaaguucgacgaggacgacagcgagcccgugcugaagggcgugaagcugcacuacaccugaggacuagucccuguucccagagcccacuuuuuuuucuuuuuuugaaauaaaauagccugucuuucagaucucaaaggcucuuuucagagccaccaaaaaaaaaaaaaaaaaaaaaaaaaaaaaaaaaaaaaaaaaaaaaaaaaaaaaaaaaaaaaaaaaaaaaaaaaaaaaaaaaaaaaaaaaaaaaaaaaaaaa

SEQ ID NO: 23453 - RNA, 4094 nt, Artificial Sequence
  SARS-CoV-2/Wuhan/WIV05/2019__EPI_ISL_402128 spike protein mRNA gc (1-1273)(D614G_I692V)
aggagagucccgcagucggcguccagcggcucugcuuguucgugugugugucguugcaggccuuauucaagcuuaccauguucguguuccuggugcugcugccccuggugagcagccagugcgugaaccugaccacccggacccagcugccaccagccuacaccaacagcuucacccggggcgucuacuaccccgacaagguguuccggagcagcguccugcacagcacccaggaccuguuccugcccuucuucagcaacgugaccugguuccacgccauccacgugagcggcaccaacggcaccaagcgguucgacaaccccgugcugcccuucaacgacggcguguacuucgccagcaccgagaagagcaacaucauccggggcuggaucuucggcaccacccuggacagcaagacccagagccugcugaucgugaauaacgccaccaacguggugaucaaggugugcgaguuccaguucugcaacgaccccuuccugggcguguacuaccacaagaacaacaagagcuggauggagagcgaguuccggguguacagcagcgccaacaacugcaccuucgaguacgugagccagcccuuccugauggaccuggagggcaagcagggcaacuucaagaaccugcgggaguucguguucaagaacaucgacggcuacuucaagaucuacagcaagcacaccccaaucaaccuggugcgggaucugccccagggcuucucagcccuggagccccugguggaccugcccaucggcaucaacaucacccgguuccagacccugcuggcccugcaccggagcuaccugaccccaggcgacagcagcagcggguggacagcaggcgcggcugcuuacuacgugggcuaccugcagccccggaccuuccugcugaaguacaacgagaacggcaccaucaccgacgccguggacugcgcccuggacccucugagcgagaccaagugcacccugaagagcuucaccguggagaagggcaucuaccagaccagcaacuuccgggugcagcccaccgagagcaucgugcgguuccccaacaucaccaaccugugccccuucggcgagguguucaacgccacccgguucgccagcguguacgccuggaaccggaagcggaucagcaacugcguggccgacuacagcgugcuguacaacagcgccagcuucagcaccuucaagugcuacggcgugagccccaccaagcugaacgaccugugcuucaccaacguguacgccgacagcuucgugauccguggcgacgaggugcggcagaucgcacccggccagacaggcaagaucgccgacuacaacuacaagcugcccgacgacuucaccggcugcgugaucgccuggaacagcaacaaccucgacagcaaggugggcggcaacuacaacuaccuguaccggcuguuccggaagagcaaccugaagcccuucgagcgggacaucagcaccgagaucuaccaagccggcuccaccccuugcaacggcguggagggcuucaacugcuacuucccucugcagagcuacggcuuccagcccaccaacggcgugggcuaccagcccuaccgggugguggugcugagcuucgagcugcugcacgccccagccaccguguguggccccaagaagagcaccaaccuggugaagaacaagugcgugaacuucaacuucaacggccuuaccggcaccggcgugcugaccgagagcaacaagaaauuccugcccuuucagcaguucggccgggacaucgccgacaccaccgacgcugugcgggauccccagacccuggagauccuggacaucaccccuugcagcuucggcggcgugagcgugaucaccccaggcaccaacaccagcaaccagguggccgugcuguaccagggcgugaacugcaccgaggugcccguggccauccacgccgaccagcugacacccaccuggcgggucuacagcaccggcagcaacguguuccagacccgggccgguugccugaucggcgccgagcacgugaacaacagcuacgagugcgacauccccaucggcgccggcaucugugccagcuaccagacccagaccaauucaccccggagggcaaggagcguggccagccagagcgugaucgccuacaccaugagccugggcgccgagaacagcguggccuacagcaacaacagcaucgccauccccaccaacuucaccaucagcgugaccaccgagauucugcccgugagcaugaccaagaccagcguggacugcaccauguacaucugcggcgacagcaccgagugcagcaaccugcugcugcaguacggcagcuucugcacccagcugaaccgggcccugaccggcaucgccguggagcaggacaagaacacccaggagguguucgcccaggugaagcagaucuacaagaccccucccaucaaggacuucggcggcuucaacuucagccagauccugcccgaccccagcaagcccagcaagcggagcuucaucgaggaccugcuguucaacaaggugacccuagccgacgccggcuucaucaagcaguacggcgacugccucggcgacauagccgcccgggaccugaucugcgcccagaaguucaacggccugaccgugcugccuccccugcugaccgacgagaugaucgcccaguacaccagcgcccuguuagccggaaccaucaccagcggcuggacuuucggcgcuggagccgcucugcagauccccuucgccaugcagauggccuaccgguucaacggcaucggcgugacccagaacgugcuguacgagaaccagaagcugaucgccaaccaguucaacagcgccaucggcaagauccaggacagccugagcagcaccgcuagcgcccugggcaagcugcaggacguggugaaccagaacgcccaggcccugaacacccuggugaagcagcugagcagcaacuucggcgccaucagcagcgugcugaacgacauccugagccggcuggacaaggucgaggccgaggugcagaucgaccggcugaucacuggccggcugcagagccugcagaccuacgugacccagcagcugauccgggccgccgagauucgggccagcgccaaccuggccgccaccaagaugagcgagugcgugcugggccagagcaagcggguggacuucugcggcaagggcuaccaccugaugagcuuuccccagagcgcaccccacggagugguguuccugcacgugaccuacgugcccgcccaggagaagaacuucaccaccgccccagccaucugccacgacggcaaggcccacuuuccccgggagggcguguucgugagcaacggcacccacugguucgugacccagcggaacuucuacgagccccagaucaucaccaccgacaacaccuucgugagcggcaacugcgacguggugaucggcaucgugaacaacaccguguacgauccccugcagcccgagcuggacagcuucaaggaggagcuggacaaguacuucaagaaucacaccagccccgacguggaccugggcgacaucagcggcaucaacgccagcguggugaacauccagaaggagaucgaucggcugaacgagguggccaagaaccugaacgagagccugaucgaccugcaggagcugggcaaguacgagcaguacaucaaguggcccugguacaucuggcugggcuucaucgccggccugaucgccaucgugauggugaccaucaugcugugcugcaugaccagcugcugcagcugccugaagggcuguugcagcugcggcagcugcugcaaguucgacgaggacgacagcgagcccgugcugaagggcgugaagcugcacuacaccugaggacuagucccuguucccagagcccacuuuuuuuucuuuuuuugaaauaaaauagccugucuuucagaucucaaaggcucuuuucagagccaccaaaaaaaaaaaaaaaaaaaaaaaaaaaaaaaaaaaaaaaaaaaaaaaaaaaaaaaaaaaaaaaaaaaaaaaaaaaaaaaaaaaaaaaaaaaaaaaaaaaaa

SEQ ID NO: 23454 - RNA, 4094 nt, Artificial Sequence
  SARS-CoV-2/Wuhan/WIV05/2019__EPI_ISL_402128 spike protein mRNA gc (1-1273)(D614G_M1229I)
aggagagucccgcagucggcguccagcggcucugcuuguucgugugugugucguugcaggccuuauucaagcuuaccauguucguguuccuggugcugcugccccuggugagcagccagugcgugaaccugaccacccggacccagcugccaccagccuacaccaacagcuucacccggggcgucuacuaccccgacaagguguuccggagcagcguccugcacagcacccaggaccuguuccugcccuucuucagcaacgugaccugguuccacgccauccacgugagcggcaccaacggcaccaagcgguucgacaaccccgugcugcccuucaacgacggcguguacuucgccagcaccgagaagagcaacaucauccggggcuggaucuucggcaccacccuggacagcaagacccagagccugcugaucgugaauaacgccaccaacguggugaucaaggugugcgaguuccaguucugcaacgaccccuuccugggcguguacuaccacaagaacaacaagagcuggauggagagcgaguuccggguguacagcagcgccaacaacugcaccuucgaguacgugagccagcccuuccugauggaccuggagggcaagcagggcaacuucaagaaccugcgggaguucguguucaagaacaucgacggcuacuucaagaucuacagcaagcacaccccaaucaaccuggugcgggaucugccccagggcuucucagcccuggagccccugguggaccugcccaucggcaucaacaucacccgguuccagacccugcuggcccugcaccggagcuaccugaccccaggcgacagcagcagcggguggacagcaggcgcggcugcuuacuacgugggcuaccugcagccccggaccuuccugcugaaguacaacgagaacggcaccaucaccgacgccguggacugcgcccuggacccucugagcgagaccaagugcacccugaagagcuucaccguggagaagggcaucuaccagaccagcaacuuccgggugcagcccaccgagagcaucgugcgguuccccaacaucaccaaccugugccccuucggcgagguguucaacgccacccgguucgccagcguguacgccuggaaccggaagcggaucagcaacugcguggccgacuacagcgugcuguacaacagcgccagcuucagcaccuucaagugcuacggcgugagccccaccaagcugaacgaccugugcuucaccaacguguacgccgacagcuucgugauccguggcgacgaggugcggcagaucgcacccggccagacaggcaagaucgccgacuacaacuacaagcugcccgacgacuucaccggcugcgugaucgccuggaacagcaacaaccucgacagcaaggugggcggcaacuacaacuaccuguaccggcuguuccggaagagcaaccugaagcccuucgagcgggacaucagcaccgagaucuaccaagccggcuccaccccuugcaacggcguggagggcuucaacugcuacuucccucugcagagcuacggcuuccagcccaccaacggcgugggcuaccagcccuaccgggugguggugcugagcuucgagcugcugcacgccccagccaccguguguggccccaagaagagcaccaaccuggugaagaacaagugcgugaacuucaacuucaacggccuuaccggcaccggcgugcugaccgagagcaacaagaaauuccugcccuuucagcaguucggccgggacaucgccgacaccaccgacgcugugcgggauccccagacccuggagauccuggacaucaccccuugcagcuucggcggcgugagcgugaucaccccaggcaccaacaccagcaaccagguggccgugcuguaccagggcgugaacugcaccgaggugcccguggccauccacgccgaccagcugacacccaccuggcgggucuacagcaccggcagcaacguguuccagacccgggccgguugccugaucggcgccgagcacgugaacaacagcuacgagugcgacauccccaucggcgccggcaucugugccagcuaccagacccagaccaauucaccccggagggcaaggagcguggccagccagagcaucaucgccuacaccaugagccugggcgccgagaacagcguggccuacagcaacaacagcaucgccauccccaccaacuucaccaucagcgugaccaccgagauucugcccgugagcaugaccaagaccagcguggacugcaccauguacaucugcggcgacagcaccgagugcagcaaccugcugcugcaguacggcagcuucugcacccagcugaaccgggcccugaccggcaucgccguggagcaggacaagaacacccaggagguguucgcccaggugaagcagaucuacaagaccccucccaucaaggacuucggcggcuucaacuucagccagauccugcccgaccccagcaagcccagcaagcggagcuucaucgaggaccugcuguucaacaaggugacccuagccgacgccggcuucaucaagcaguacggcgacugccucggcgacauagccgcccgggaccugaucugcgcccagaaguucaacggccugaccgugcugccuccccugcugaccgacgagaugaucgcccaguacaccagcgcccuguuagccggaaccaucaccagcggcuggacuuucggcgcuggagccgcucugcagauccccuucgccaugcagauggccuaccgguucaacggcaucggcgugacccagaacgugcuguacgagaaccagaagcugaucgccaaccaguucaacagcgccaucggcaagauccaggacagccugagcagcaccgcuagcgcccugggcaagcugcaggacguggugaaccagaacgcccaggcccugaacacccuggugaagcagcugagcagcaacuucggcgccaucagcagcgugcugaacgacauccugagccggcuggacaaggucgaggccgaggugcagaucgaccggcugaucacuggccggcugcagagccugcagaccuacgugacccagcagcugauccgggccgccgagauucgggccagcgccaaccuggccgccaccaagaugagcgagugcgugcugggccagagcaagcggguggacuucugcggcaagggcuaccaccugaugagcuuuccccagagcgcaccccacggagugguguuccugcacgugaccuacgugcccgcccaggagaagaacuucaccaccgccccagccaucugccacgacggcaaggcccacuuuccccgggagggcguguucgugagcaacggcacccacugguucgugacccagcggaacuucuacgagccccagaucaucaccaccgacaacaccuucgugagcggcaacugcgacguggugaucggcaucgugaacaacaccguguacgauccccugcagcccgagcuggacagcuucaaggaggagcuggacaaguacuucaagaaucacaccagccccgacguggaccugggcgacaucagcggcaucaacgccagcguggugaacauccagaaggagaucgaucggcugaacgagguggccaagaaccugaacgagagccugaucgaccugcaggagcugggcaaguacgagcaguacaucaaguggcccugguacaucuggcugggcuucaucgccggccugaucgccaucgugaucgugaccaucaugcugugcugcaugaccagcugcugcagcugccugaagggcuguugcagcugcggcagcugcugcaaguucgacgaggacgacagcgagcccgugcugaagggcgugaagcugcacuacaccugaggacuagucccuguucccagagcccacuuuuuuuucuuuuuuugaaauaaaauagccugucuuucagaucucaaaggcucuuuucagagccaccaaaaaaaaaaaaaaaaaaaaaaaaaaaaaaaaaaaaaaaaaaaaaaaaaaaaaaaaaaaaaaaaaaaaaaaaaaaaaaaaaaaaaaaaaaaaaaaaaaaaa

SEQ ID NO: 23455 - RNA, 4088 nt, Artificial Sequence
  SARS-CoV-2/Wuhan/WIV05/2019__EPI_ISL_402128 spike protein mRNA gc (1-1273)(H69del_V70del_A222V_Y453F_S477N_D614G_I692V)
aggagagucccgcagucggcguccagcggcucugcuuguucgugugugugucguugcaggccuuauucaagcuuaccauguucguguuccuggugcugcugccccuggugagcagccagugcgugaaccugaccacccggacccagcugccaccagccuacaccaacagcuucacccggggcgucuacuaccccgacaagguguuccggagcagcguccugcacagcacccaggaccuguuccugcccuucuucagcaacgugaccugguuccacgccaucagcggcaccaacggcaccaagcgguucgacaaccccgugcugcccuucaacgacggcguguacuucgccagcaccgagaagagcaacaucauccggggcuggaucuucggcaccacccuggacagcaagacccagagccugcugaucgugaauaacgccaccaacguggugaucaaggugugcgaguuccaguucugcaacgaccccuuccugggcguguacuaccacaagaacaacaagagcuggauggagagcgaguuccggguguacagcagcgccaacaacugcaccuucgaguacgugagccagcccuuccugauggaccuggagggcaagcagggcaacuucaagaaccugcgggaguucguguucaagaacaucgacggcuacuucaagaucuacagcaagcacaccccaaucaaccuggugcgggaucugccccagggcuucucagugcuggagccccugguggaccugcccaucggcaucaacaucacccgguuccagacccugcuggcccugcaccggagcuaccugaccccaggcgacagcagcagcggguggacagcaggcgcggcugcuuacuacgugggcuaccugcagccccggaccuuccugcugaaguacaacgagaacggcaccaucaccgacgccguggacugcgcccuggacccucugagcgagaccaagugcacccugaagagcuucaccguggagaagggcaucuaccagaccagcaacuuccgggugcagcccaccgagagcaucgugcgguuccccaacaucaccaaccugugccccuucggcgagguguucaacgccacccgguucgccagcguguacgccuggaaccggaagcggaucagcaacugcguggccgacuacagcgugcuguacaacagcgccagcuucagcaccuucaagugcuacggcgugagccccaccaagcugaacgaccugugcuucaccaacguguacgccgacagcuucgugauccguggcgacgaggugcggcagaucgcacccggccagacaggcaagaucgccgacuacaacuacaagcugcccgacgacuucaccggcugcgugaucgccuggaacagcaacaaccucgacagcaaggugggcggcaacuacaacuaccuguuccggcuguuccggaagagcaaccugaagcccuucgagcgggacaucagcaccgagaucuaccaagccggcaacaccccuugcaacggcguggagggcuucaacugcuacuucccucugcagagcuacggcuuccagcccaccaacggcgugggcuaccagcccuaccgggugguggugcugagcuucgagcugcugcacgccccagccaccguguguggccccaagaagagcaccaaccuggugaagaacaagugcgugaacuucaacuucaacggccuuaccggcaccggcgugcugaccgagagcaacaagaaauuccugcccuuucagcaguucggccgggacaucgccgacaccaccgacgcugugcgggauccccagacccuggagauccuggacaucaccccuugcagcuucggcggcgugagcgugaucaccccaggcaccaacaccagcaaccagguggccgugcuguaccagggcgugaacugcaccgaggugcccguggccauccacgccgaccagcugacacccaccuggcgggucuacagcaccggcagcaacguguuccagacccgggccgguugccugaucggcgccgagcacgugaacaacagcuacgagugcgacauccccaucggcgccggcaucugugccagcuaccagacccagaccaauucaccccggagggcaaggagcguggccagccagagcgugaucgccuacaccaugagccugggcgccgagaacagcguggccuacagcaacaacagcaucgccauccccaccaacuucaccaucagcgugaccaccgagauucugcccgugagcaugaccaagaccagcguggacugcaccauguacaucugcggcgacagcaccgagugcagcaaccugcugcugcaguacggcagcuucugcacccagcugaaccgggcccugaccggcaucgccguggagcaggacaagaacacccaggagguguucgcccaggugaagcagaucuacaagaccccucccaucaaggacuucggcggcuucaacuucagccagauccugcccgaccccagcaagcccagcaagcggagcuucaucgaggaccugcuguucaacaaggugacccuagccgacgccggcuucaucaagcaguacggcgacugccucggcgacauagccgcccgggaccugaucugcgcccagaaguucaacggccugaccgugcugccuccccugcugaccgacgagaugaucgcccaguacaccagcgcccuguuagccggaaccaucaccagcggcuggacuuucggcgcuggagccgcucugcagauccccuucgccaugcagauggccuaccgguucaacggcaucggcgugacccagaacgugcuguacgagaaccagaagcugaucgccaaccaguucaacagcgccaucggcaagauccaggacagccugagcagcaccgcuagcgcccugggcaagcugcaggacguggugaaccagaacgcccaggcccugaacacccuggugaagcagcugagcagcaacuucggcgccaucagcagcgugcugaacgacauccugagccggcuggacaaggucgaggccgaggugcagaucgaccggcugaucacuggccggcugcagagccugcagaccuacgugacccagcagcugauccgggccgccgagauucgggccagcgccaaccuggccgccaccaagaugagcgagugcgugcugggccagagcaagcggguggacuucugcggcaagggcuaccaccugaugagcuuuccccagagcgcaccccacggagugguguuccugcacgugaccuacgugcccgcccaggagaagaacuucaccaccgccccagccaucugccacgacggcaaggcccacuuuccccgggagggcguguucgugagcaacggcacccacugguucgugacccagcggaacuucuacgagccccagaucaucaccaccgacaacaccuucgugagcggcaacugcgacguggugaucggcaucgugaacaacaccguguacgauccccugcagcccgagcuggacagcuucaaggaggagcuggacaaguacuucaagaaucacaccagccccgacguggaccugggcgacaucagcggcaucaacgccagcguggugaacauccagaaggagaucgaucggcugaacgagguggccaagaaccugaacgagagccugaucgaccugcaggagcugggcaaguacgagcaguacaucaaguggcccugguacaucuggcugggcuucaucgccggccugaucgccaucgugauggugaccaucaugcugugcugcaugaccagcugcugcagcugccugaagggcuguugcagcugcggcagcugcugcaaguucgacgaggacgacagcgagcccgugcugaagggcgugaagcugcacuacaccugaggacuagucccuguucccagagcccacuuuuuuuucuuuuuuugaaauaaaauagccugucuuucagaucucaaaggcucuuuucagagccaccaaaaaaaaaaaaaaaaaaaaaaaaaaaaaaaaaaaaaaaaaaaaaaaaaaaaaaaaaaaaaaaaaaaaaaaaaaaaaaaaaaaaaaaaaaaaaaaaaaaaa

SEQ ID NO: 23456 - RNA, 4088 nt, Artificial Sequence
  SARS-CoV-2/Wuhan/WIV05/2019__EPI_ISL_402128 spike protein mRNA gc (1-1273)(H69del_V70del_Y453F_D614G_I692V_M1229I)
aggagagucccgcagucggcguccagcggcucugcuuguucgugugugugucguugcaggccuuauucaagcuuaccauguucguguuccuggugcugcugccccuggugagcagccagugcgugaaccugaccacccggacccagcugccaccagccuacaccaacagcuucacccggggcgucuacuaccccgacaagguguuccggagcagcguccugcacagcacccaggaccuguuccugcccuucuucagcaacgugaccugguuccacgccaucagcggcaccaacggcaccaagcgguucgacaaccccgugcugcccuucaacgacggcguguacuucgccagcaccgagaagagcaacaucauccggggcuggaucuucggcaccacccuggacagcaagacccagagccugcugaucgugaauaacgccaccaacguggugaucaaggugugcgaguuccaguucugcaacgaccccuuccugggcguguacuaccacaagaacaacaagagcuggauggagagcgaguuccggguguacagcagcgccaacaacugcaccuucgaguacgugagccagcccuuccugauggaccuggagggcaagcagggcaacuucaagaaccugcgggaguucguguucaagaacaucgacggcuacuucaagaucuacagcaagcacaccccaaucaaccuggugcgggaucugccccagggcuucucagcccuggagccccugguggaccugcccaucggcaucaacaucacccgguuccagacccugcuggcccugcaccggagcuaccugaccccaggcgacagcagcagcggguggacagcaggcgcggcugcuuacuacgugggcuaccugcagccccggaccuuccugcugaaguacaacgagaacggcaccaucaccgacgccguggacugcgcccuggacccucugagcgagaccaagugcacccugaagagcuucaccguggagaagggcaucuaccagaccagcaacuuccgggugcagcccaccgagagcaucgugcgguuccccaacaucaccaaccugugccccuucggcgagguguucaacgccacccgguucgccagcguguacgccuggaaccggaagcggaucagcaacugcguggccgacuacagcgugcuguacaacagcgccagcuucagcaccuucaagugcuacggcgugagccccaccaagcugaacgaccugugcuucaccaacguguacgccgacagcuucgugauccguggcgacgaggugcggcagaucgcacccggccagacaggcaagaucgccgacuacaacuacaagcugcccgacgacuucaccggcugcgugaucgccuggaacagcaacaaccucgacagcaaggugggcggcaacuacaacuaccuguuccggcuguuccggaagagcaaccugaagcccuucgagcgggacaucagcaccgagaucuaccaagccggcuccaccccuugcaacggcguggagggcuucaacugcuacuucccucugcagagcuacggcuuccagcccaccaacggcgugggcuaccagcccuaccgggugguggugcugagcuucgagcugcugcacgccccagccaccguguguggccccaagaagagcaccaaccuggugaagaacaagugcgugaacuucaacuucaacggccuuaccggcaccggcgugcugaccgagagcaacaagaaauuccugcccuuucagcaguucggccgggacaucgccgacaccaccgacgcugugcgggauccccagacccuggagauccuggacaucaccccuugcagcuucggcggcgugagcgugaucaccccaggcaccaacaccagcaaccagguggccgugcuguaccagggcgugaacugcaccgaggugcccguggccauccacgccgaccagcugacacccaccuggcgggucuacagcaccggcagcaacguguuccagacccgggccgguugccugaucggcgccgagcacgugaacaacagcuacgagugcgacauccccaucggcgccggcaucugugccagcuaccagacccagaccaauucaccccggagggcaaggagcguggccagccagagcgugaucgccuacaccaugagccugggcgccgagaacagcguggccuacagcaacaacagcaucgccauccccaccaacuucaccaucagcgugaccaccgagauucugcccgugagcaugaccaagaccagcguggacugcaccauguacaucugcggcgacagcaccgagugcagcaaccugcugcugcaguacggcagcuucugcacccagcugaaccgggcccugaccggcaucgccguggagcaggacaagaacacccaggagguguucgcccaggugaagcagaucuacaagaccccucccaucaaggacuucggcggcuucaacuucagccagauccugcccgaccccagcaagcccagcaagcggagcuucaucgaggaccugcuguucaacaaggugacccuagccgacgccggcuucaucaagcaguacggcgacugccucggcgacauagccgcccgggaccugaucugcgcccagaaguucaacggccugaccgugcugccuccccugcugaccgacgagaugaucgcccaguacaccagcgcccuguuagccggaaccaucaccagcggcuggacuuucggcgcuggagccgcucugcagauccccuucgccaugcagauggccuaccgguucaacggcaucggcgugacccagaacgugcuguacgagaaccagaagcugaucgccaaccaguucaacagcgccaucggcaagauccaggacagccugagcagcaccgcuagcgcccugggcaagcugcaggacguggugaaccagaacgcccaggcccugaacacccuggugaagcagcugagcagcaacuucggcgccaucagcagcgugcugaacgacauccugagccggcuggacaaggucgaggccgaggugcagaucgaccggcugaucacuggccggcugcagagccugcagaccuacgugacccagcagcugauccgggccgccgagauucgggccagcgccaaccuggccgccaccaagaugagcgagugcgugcugggccagagcaagcggguggacuucugcggcaagggcuaccaccugaugagcuuuccccagagcgcaccccacggagugguguuccugcacgugaccuacgugcccgcccaggagaagaacuucaccaccgccccagccaucugccacgacggcaaggcccacuuuccccgggagggcguguucgugagcaacggcacccacugguucgugacccagcggaacuucuacgagccccagaucaucaccaccgacaacaccuucgugagcggcaacugcgacguggugaucggcaucgugaacaacaccguguacgauccccugcagcccgagcuggacagcuucaaggaggagcuggacaaguacuucaagaaucacaccagccccgacguggaccugggcgacaucagcggcaucaacgccagcguggugaacauccagaaggagaucgaucggcugaacgagguggccaagaaccugaacgagagccugaucgaccugcaggagcugggcaaguacgagcaguacaucaaguggcccugguacaucuggcugggcuucaucgccggccugaucgccaucgugaucgugaccaucaugcugugcugcaugaccagcugcugcagcugccugaagggcuguugcagcugcggcagcugcugcaaguucgacgaggacgacagcgagcccgugcugaagggcgugaagcugcacuacaccugaggacuagucccuguucccagagcccacuuuuuuuucuuuuuuugaaauaaaauagccugucuuucagaucucaaaggcucuuuucagagccaccaaaaaaaaaaaaaaaaaaaaaaaaaaaaaaaaaaaaaaaaaaaaaaaaaaaaaaaaaaaaaaaaaaaaaaaaaaaaaaaaaaaaaaaaaaaaaaaaaaaaa

SEQ ID NO: 23457 - RNA, 4085 nt, Artificial Sequence
  SARS-CoV-2/Wuhan/WIV05/2019__EPI_ISL_402128 spike protein mRNA gc (1-1273)(H69del_V70del_Y144del_N501Y_A570D_D614G_P681H_T716I_S982 A_D1118H)
aggagagucccgcagucggcguccagcggcucugcuuguucgugugugugucguugcaggccuuauucaagcuuaccauguucguguuccuggugcugcugccccuggugagcagccagugcgugaaccugaccacccggacccagcugccaccagccuacaccaacagcuucacccggggcgucuacuaccccgacaagguguuccggagcagcguccugcacagcacccaggaccuguuccugcccuucuucagcaacgugaccugguuccacgccaucagcggcaccaacggcaccaagcgguucgacaaccccgugcugcccuucaacgacggcguguacuucgccagcaccgagaagagcaacaucauccggggcuggaucuucggcaccacccuggacagcaagacccagagccugcugaucgugaauaacgccaccaacguggugaucaaggugugcgaguuccaguucugcaacgaccccuuccugggcguguaccacaagaacaacaagagcuggauggagagcgaguuccggguguacagcagcgccaacaacugcaccuucgaguacgugagccagcccuuccugauggaccuggagggcaagcagggcaacuucaagaaccugcgggaguucguguucaagaacaucgacggcuacuucaagaucuacagcaagcacaccccaaucaaccuggugcgggaucugccccagggcuucucagcccuggagccccugguggaccugcccaucggcaucaacaucacccgguuccagacccugcuggcccugcaccggagcuaccugaccccaggcgacagcagcagcggguggacagcaggcgcggcugcuuacuacgugggcuaccugcagccccggaccuuccugcugaaguacaacgagaacggcaccaucaccgacgccguggacugcgcccuggacccucugagcgagaccaagugcacccugaagagcuucaccguggagaagggcaucuaccagaccagcaacuuccgggugcagcccaccgagagcaucgugcgguuccccaacaucaccaaccugugccccuucggcgagguguucaacgccacccgguucgccagcguguacgccuggaaccggaagcggaucagcaacugcguggccgacuacagcgugcuguacaacagcgccagcuucagcaccuucaagugcuacggcgugagccccaccaagcugaacgaccugugcuucaccaacguguacgccgacagcuucgugauccguggcgacgaggugcggcagaucgcacccggccagacaggcaagaucgccgacuacaacuacaagcugcccgacgacuucaccggcugcgugaucgccuggaacagcaacaaccucgacagcaaggugggcggcaacuacaacuaccuguaccggcuguuccggaagagcaaccugaagcccuucgagcgggacaucagcaccgagaucuaccaagccggcuccaccccuugcaacggcguggagggcuucaacugcuacuucccucugcagagcuacggcuuccagcccaccuacggcgugggcuaccagcccuaccgggugguggugcugagcuucgagcugcugcacgccccagccaccguguguggccccaagaagagcaccaaccuggugaagaacaagugcgugaacuucaacuucaacggccuuaccggcaccggcgugcugaccgagagcaacaagaaauuccugcccuuucagcaguucggccgggacaucgacgacaccaccgacgcugugcgggauccccagacccuggagauccuggacaucaccccuugcagcuucggcggcgugagcgugaucaccccaggcaccaacaccagcaaccagguggccgugcuguaccagggcgugaacugcaccgaggugcccguggccauccacgccgaccagcugacacccaccuggcgggucuacagcaccggcagcaacguguuccagacccgggccgguugccugaucggcgccgagcacgugaacaacagcuacgagugcgacauccccaucggcgccggcaucugugccagcuaccagacccagaccaauucacaccggagggcaaggagcguggccagccagagcaucaucgccuacaccaugagccugggcgccgagaacagcguggccuacagcaacaacagcaucgccauccccaucaacuucaccaucagcgugaccaccgagauucugcccgugagcaugaccaagaccagcguggacugcaccauguacaucugcggcgacagcaccgagugcagcaaccugcugcugcaguacggcagcuucugcacccagcugaaccgggcccugaccggcaucgccguggagcaggacaagaacacccaggagguguucgcccaggugaagcagaucuacaagaccccucccaucaaggacuucggcggcuucaacuucagccagauccugcccgaccccagcaagcccagcaagcggagcuucaucgaggaccugcuguucaacaaggugacccuagccgacgccggcuucaucaagcaguacggcgacugccucggcgacauagccgcccgggaccugaucugcgcccagaaguucaacggccugaccgugcugccuccccugcugaccgacgagaugaucgcccaguacaccagcgcccuguuagccggaaccaucaccagcggcuggacuuucggcgcuggagccgcucugcagauccccuucgccaugcagauggccuaccgguucaacggcaucggcgugacccagaacgugcuguacgagaaccagaagcugaucgccaaccaguucaacagcgccaucggcaagauccaggacagccugagcagcaccgcuagcgcccugggcaagcugcaggacguggugaaccagaacgcccaggcccugaacacccuggugaagcagcugagcagcaacuucggcgccaucagcagcgugcugaacgacauccuggcccggcuggacaaggucgaggccgaggugcagaucgaccggcugaucacuggccggcugcagagccugcagaccuacgugacccagcagcugauccgggccgccgagauucgggccagcgccaaccuggccgccaccaagaugagcgagugcgugcugggccagagcaagcggguggacuucugcggcaagggcuaccaccugaugagcuuuccccagagcgcaccccacggagugguguuccugcacgugaccuacgugcccgcccaggagaagaacuucaccaccgccccagccaucugccacgacggcaaggcccacuuuccccgggagggcguguucgugagcaacggcacccacugguucgugacccagcggaacuucuacgagccccagaucaucaccacccacaacaccuucgugagcggcaacugcgacguggugaucggcaucgugaacaacaccguguacgauccccugcagcccgagcuggacagcuucaaggaggagcuggacaaguacuucaagaaucacaccagccccgacguggaccugggcgacaucagcggcaucaacgccagcguggugaacauccagaaggagaucgaucggcugaacgagguggccaagaaccugaacgagagccugaucgaccugcaggagcugggcaaguacgagcaguacaucaaguggcccugguacaucuggcugggcuucaucgccggccugaucgccaucgugauggugaccaucaugcugugcugcaugaccagcugcugcagcugccugaagggcuguugcagcugcggcagcugcugcaaguucgacgaggacgacagcgagcccgugcugaagggcgugaagcugcacuacaccugaggacuagucccuguucccagagcccacuuuuuuuucuuuuuuugaaauaaaauagccugucuuucagaucucaaaggcucuuuucagagccaccaaaaaaaaaaaaaaaaaaaaaaaaaaaaaaaaaaaaaaaaaaaaaaaaaaaaaaaaaaaaaaaaaaaaaaaaaaaaaaaaaaaaaaaaaaaaaaaaaaaaa

SEQ ID NO: 23458 - RNA, 4094 nt, Artificial Sequence
  SARS-CoV-2/Wuhan/WIV05/2019__EPI_ISL_402128 spike protein mRNA gc (1-1273)(K417N_E484K_N501Y_D614G)
aggagagucccgcagucggcguccagcggcucugcuuguucgugugugugucguugcaggccuuauucaagcuuaccauguucguguuccuggugcugcugccccuggugagcagccagugcgugaaccugaccacccggacccagcugccaccagccuacaccaacagcuucacccggggcgucuacuaccccgacaagguguuccggagcagcguccugcacagcacccaggaccuguuccugcccuucuucagcaacgugaccugguuccacgccauccacgugagcggcaccaacggcaccaagcgguucgacaaccccgugcugcccuucaacgacggcguguacuucgccagcaccgagaagagcaacaucauccggggcuggaucuucggcaccacccuggacagcaagacccagagccugcugaucgugaauaacgccaccaacguggugaucaaggugugcgaguuccaguucugcaacgaccccuuccugggcguguacuaccacaagaacaacaagagcuggauggagagcgaguuccggguguacagcagcgccaacaacugcaccuucgaguacgugagccagcccuuccugauggaccuggagggcaagcagggcaacuucaagaaccugcgggaguucguguucaagaacaucgacggcuacuucaagaucuacagcaagcacaccccaaucaaccuggugcgggaucugccccagggcuucucagcccuggagccccugguggaccugcccaucggcaucaacaucacccgguuccagacccugcuggcccugcaccggagcuaccugaccccaggcgacagcagcagcggguggacagcaggcgcggcugcuuacuacgugggcuaccugcagccccggaccuuccugcugaaguacaacgagaacggcaccaucaccgacgccguggacugcgcccuggacccucugagcgagaccaagugcacccugaagagcuucaccguggagaagggcaucuaccagaccagcaacuuccgggugcagcccaccgagagcaucgugcgguuccccaacaucaccaaccugugccccuucggcgagguguucaacgccacccgguucgccagcguguacgccuggaaccggaagcggaucagcaacugcguggccgacuacagcgugcuguacaacagcgccagcuucagcaccuucaagugcuacggcgugagccccaccaagcugaacgaccugugcuucaccaacguguacgccgacagcuucgugauccguggcgacgaggugcggcagaucgcacccggccagacaggcaacaucgccgacuacaacuacaagcugcccgacgacuucaccggcugcgugaucgccuggaacagcaacaaccucgacagcaaggugggcggcaacuacaacuaccuguaccggcuguuccggaagagcaaccugaagcccuucgagcgggacaucagcaccgagaucuaccaagccggcuccaccccuugcaacggcgugaagggcuucaacugcuacuucccucugcagagcuacggcuuccagcccaccuacggcgugggcuaccagcccuaccgggugguggugcugagcuucgagcugcugcacgccccagccaccguguguggccccaagaagagcaccaaccuggugaagaacaagugcgugaacuucaacuucaacggccuuaccggcaccggcgugcugaccgagagcaacaagaaauuccugcccuuucagcaguucggccgggacaucgccgacaccaccgacgcugugcgggauccccagacccuggagauccuggacaucaccccuugcagcuucggcggcgugagcgugaucaccccaggcaccaacaccagcaaccagguggccgugcuguaccagggcgugaacugcaccgaggugcccguggccauccacgccgaccagcugacacccaccuggcgggucuacagcaccggcagcaacguguuccagacccgggccgguugccugaucggcgccgagcacgugaacaacagcuacgagugcgacauccccaucggcgccggcaucugugccagcuaccagacccagaccaauucaccccggagggcaaggagcguggccagccagagcaucaucgccuacaccaugagccugggcgccgagaacagcguggccuacagcaacaacagcaucgccauccccaccaacuucaccaucagcgugaccaccgagauucugcccgugagcaugaccaagaccagcguggacugcaccauguacaucugcggcgacagcaccgagugcagcaaccugcugcugcaguacggcagcuucugcacccagcugaaccgggcccugaccggcaucgccguggagcaggacaagaacacccaggagguguucgcccaggugaagcagaucuacaagaccccucccaucaaggacuucggcggcuucaacuucagccagauccugcccgaccccagcaagcccagcaagcggagcuucaucgaggaccugcuguucaacaaggugacccuagccgacgccggcuucaucaagcaguacggcgacugccucggcgacauagccgcccgggaccugaucugcgcccagaaguucaacggccugaccgugcugccuccccugcugaccgacgagaugaucgcccaguacaccagcgcccuguuagccggaaccaucaccagcggcuggacuuucggcgcuggagccgcucugcagauccccuucgccaugcagauggccuaccgguucaacggcaucggcgugacccagaacgugcuguacgagaaccagaagcugaucgccaaccaguucaacagcgccaucggcaagauccaggacagccugagcagcaccgcuagcgcccugggcaagcugcaggacguggugaaccagaacgcccaggcccugaacacccuggugaagcagcugagcagcaacuucggcgccaucagcagcgugcugaacgacauccugagccggcuggacaaggucgaggccgaggugcagaucgaccggcugaucacuggccggcugcagagccugcagaccuacgugacccagcagcugauccgggccgccgagauucgggccagcgccaaccuggccgccaccaagaugagcgagugcgugcugggccagagcaagcggguggacuucugcggcaagggcuaccaccugaugagcuuuccccagagcgcaccccacggagugguguuccugcacgugaccuacgugcccgcccaggagaagaacuucaccaccgccccagccaucugccacgacggcaaggcccacuuuccccgggagggcguguucgugagcaacggcacccacugguucgugacccagcggaacuucuacgagccccagaucaucaccaccgacaacaccuucgugagcggcaacugcgacguggugaucggcaucgugaacaacaccguguacgauccccugcagcccgagcuggacagcuucaaggaggagcuggacaaguacuucaagaaucacaccagccccgacguggaccugggcgacaucagcggcaucaacgccagcguggugaacauccagaaggagaucgaucggcugaacgagguggccaagaaccugaacgagagccugaucgaccugcaggagcugggcaaguacgagcaguacaucaaguggcccugguacaucuggcugggcuucaucgccggccugaucgccaucgugauggugaccaucaugcugugcugcaugaccagcugcugcagcugccugaagggcuguugcagcugcggcagcugcugcaaguucgacgaggacgacagcgagcccgugcugaagggcgugaagcugcacuacaccugaggacuagucccuguucccagagcccacuuuuuuuucuuuuuuugaaauaaaauagccugucuuucagaucucaaaggcucuuuucagagccaccaaaaaaaaaaaaaaaaaaaaaaaaaaaaaaaaaaaaaaaaaaaaaaaaaaaaaaaaaaaaaaaaaaaaaaaaaaaaaaaaaaaaaaaaaaaaaaaaaaaaa

SEQ ID NO: 23459 - RNA, 4085 nt, Artificial Sequence
  SARS-CoV-2/Wuhan/WIV05/2019__EPI_ISL_402128 spike protein mRNA gc (1-1273)(L18F_D80A_D215G_L242del_A243del_L244del_R246I_K417N_E484 K_N501Y_D614G_A701V)
aggagagucccgcagucggcguccagcggcucugcuuguucgugugugugucguugcaggccuuauucaagcuuaccauguucguguuccuggugcugcugccccuggugagcagccagugcgugaacuucaccacccggacccagcugccaccagccuacaccaacagcuucacccggggcgucuacuaccccgacaagguguuccggagcagcguccugcacagcacccaggaccuguuccugcccuucuucagcaacgugaccugguuccacgccauccacgugagcggcaccaacggcaccaagcgguucgccaaccccgugcugcccuucaacgacggcguguacuucgccagcaccgagaagagcaacaucauccggggcuggaucuucggcaccacccuggacagcaagacccagagccugcugaucgugaauaacgccaccaacguggugaucaaggugugcgaguuccaguucugcaacgaccccuuccugggcguguacuaccacaagaacaacaagagcuggauggagagcgaguuccggguguacagcagcgccaacaacugcaccuucgaguacgugagccagcccuuccugauggaccuggagggcaagcagggcaacuucaagaaccugcgggaguucguguucaagaacaucgacggcuacuucaagaucuacagcaagcacaccccaaucaaccuggugcggggccugccccagggcuucucagcccuggagccccugguggaccugcccaucggcaucaacaucacccgguuccagacccugcacaucagcuaccugaccccaggcgacagcagcagcggguggacagcaggcgcggcugcuuacuacgugggcuaccugcagccccggaccuuccugcugaaguacaacgagaacggcaccaucaccgacgccguggacugcgcccuggacccucugagcgagaccaagugcacccugaagagcuucaccguggagaagggcaucuaccagaccagcaacuuccgggugcagcccaccgagagcaucgugcgguuccccaacaucaccaaccugugccccuucggcgagguguucaacgccacccgguucgccagcguguacgccuggaaccggaagcggaucagcaacugcguggccgacuacagcgugcuguacaacagcgccagcuucagcaccuucaagugcuacggcgugagccccaccaagcugaacgaccugugcuucaccaacguguacgccgacagcuucgugauccguggcgacgaggugcggcagaucgcacccggccagacaggcaacaucgccgacuacaacuacaagcugcccgacgacuucaccggcugcgugaucgccuggaacagcaacaaccucgacagcaaggugggcggcaacuacaacuaccuguaccggcuguuccggaagagcaaccugaagcccuucgagcgggacaucagcaccgagaucuaccaagccggcuccaccccuugcaacggcgugaagggcuucaacugcuacuucccucugcagagcuacggcuuccagcccaccuacggcgugggcuaccagcccuaccgggugguggugcugagcuucgagcugcugcacgccccagccaccguguguggccccaagaagagcaccaaccuggugaagaacaagugcgugaacuucaacuucaacggccuuaccggcaccggcgugcugaccgagagcaacaagaaauuccugcccuuucagcaguucggccgggacaucgccgacaccaccgacgcugugcgggauccccagacccuggagauccuggacaucaccccuugcagcuucggcggcgugagcgugaucaccccaggcaccaacaccagcaaccagguggccgugcuguaccagggcgugaacugcaccgaggugcccguggccauccacgccgaccagcugacacccaccuggcgggucuacagcaccggcagcaacguguuccagacccgggccgguugccugaucggcgccgagcacgugaacaacagcuacgagugcgacauccccaucggcgccggcaucugugccagcuaccagacccagaccaauucaccccggagggcaaggagcguggccagccagagcaucaucgccuacaccaugagccugggcguggagaacagcguggccuacagcaacaacagcaucgccauccccaccaacuucaccaucagcgugaccaccgagauucugcccgugagcaugaccaagaccagcguggacugcaccauguacaucugcggcgacagcaccgagugcagcaaccugcugcugcaguacggcagcuucugcacccagcugaaccgggcccugaccggcaucgccguggagcaggacaagaacacccaggagguguucgcccaggugaagcagaucuacaagaccccucccaucaaggacuucggcggcuucaacuucagccagauccugcccgaccccagcaagcccagcaagcggagcuucaucgaggaccugcuguucaacaaggugacccuagccgacgccggcuucaucaagcaguacggcgacugccucggcgacauagccgcccgggaccugaucugcgcccagaaguucaacggccugaccgugcugccuccccugcugaccgacgagaugaucgcccaguacaccagcgcccuguuagccggaaccaucaccagcggcuggacuuucggcgcuggagccgcucugcagauccccuucgccaugcagauggccuaccgguucaacggcaucggcgugacccagaacgugcuguacgagaaccagaagcugaucgccaaccaguucaacagcgccaucggcaagauccaggacagccugagcagcaccgcuagcgcccugggcaagcugcaggacguggugaaccagaacgcccaggcccugaacacccuggugaagcagcugagcagcaacuucggcgccaucagcagcgugcugaacgacauccugagccggcuggacaaggucgaggccgaggugcagaucgaccggcugaucacuggccggcugcagagccugcagaccuacgugacccagcagcugauccgggccgccgagauucgggccagcgccaaccuggccgccaccaagaugagcgagugcgugcugggccagagcaagcggguggacuucugcggcaagggcuaccaccugaugagcuuuccccagagcgcaccccacggagugguguuccugcacgugaccuacgugcccgcccaggagaagaacuucaccaccgccccagccaucugccacgacggcaaggcccacuuuccccgggagggcguguucgugagcaacggcacccacugguucgugacccagcggaacuucuacgagccccagaucaucaccaccgacaacaccuucgugagcggcaacugcgacguggugaucggcaucgugaacaacaccguguacgauccccugcagcccgagcuggacagcuucaaggaggagcuggacaaguacuucaagaaucacaccagccccgacguggaccugggcgacaucagcggcaucaacgccagcguggugaacauccagaaggagaucgaucggcugaacgagguggccaagaaccugaacgagagccugaucgaccugcaggagcugggcaaguacgagcaguacaucaaguggcccugguacaucuggcugggcuucaucgccggccugaucgccaucgugauggugaccaucaugcugugcugcaugaccagcugcugcagcugccugaagggcuguugcagcugcggcagcugcugcaaguucgacgaggacgacagcgagcccgugcugaagggcgugaagcugcacuacaccugaggacuagucccuguucccagagcccacuuuuuuuucuuuuuuugaaauaaaauagccugucuuucagaucucaaaggcucuuuucagagccaccaaaaaaaaaaaaaaaaaaaaaaaaaaaaaaaaaaaaaaaaaaaaaaaaaaaaaaaaaaaaaaaaaaaaaaaaaaaaaaaaaaaaaaaaaaaaaaaaaaaaa

SEQ ID NO: 23460 - RNA, 4094 nt, Artificial Sequence
  SARS-CoV-2/Wuhan/WIV05/2019__EPI_ISL_402128 spike protein mRNA gc (1-1273)(E484K_D614G)
aggagagucccgcagucggcguccagcggcucugcuuguucgugugugugucguugcaggccuuauucaagcuuaccauguucguguuccuggugcugcugccccuggugagcagccagugcgugaaccugaccacccggacccagcugccaccagccuacaccaacagcuucacccggggcgucuacuaccccgacaagguguuccggagcagcguccugcacagcacccaggaccuguuccugcccuucuucagcaacgugaccugguuccacgccauccacgugagcggcaccaacggcaccaagcgguucgacaaccccgugcugcccuucaacgacggcguguacuucgccagcaccgagaagagcaacaucauccggggcuggaucuucggcaccacccuggacagcaagacccagagccugcugaucgugaauaacgccaccaacguggugaucaaggugugcgaguuccaguucugcaacgaccccuuccugggcguguacuaccacaagaacaacaagagcuggauggagagcgaguuccggguguacagcagcgccaacaacugcaccuucgaguacgugagccagcccuuccugauggaccuggagggcaagcagggcaacuucaagaaccugcgggaguucguguucaagaacaucgacggcuacuucaagaucuacagcaagcacaccccaaucaaccuggugcgggaucugccccagggcuucucagcccuggagccccugguggaccugcccaucggcaucaacaucacccgguuccagacccugcuggcccugcaccggagcuaccugaccccaggcgacagcagcagcggguggacagcaggcgcggcugcuuacuacgugggcuaccugcagccccggaccuuccugcugaaguacaacgagaacggcaccaucaccgacgccguggacugcgcccuggacccucugagcgagaccaagugcacccugaagagcuucaccguggagaagggcaucuaccagaccagcaacuuccgggugcagcccaccgagagcaucgugcgguuccccaacaucaccaaccugugccccuucggcgagguguucaacgccacccgguucgccagcguguacgccuggaaccggaagcggaucagcaacugcguggccgacuacagcgugcuguacaacagcgccagcuucagcaccuucaagugcuacggcgugagccccaccaagcugaacgaccugugcuucaccaacguguacgccgacagcuucgugauccguggcgacgaggugcggcagaucgcacccggccagacaggcaagaucgccgacuacaacuacaagcugcccgacgacuucaccggcugcgugaucgccuggaacagcaacaaccucgacagcaaggugggcggcaacuacaacuaccuguaccggcuguuccggaagagcaaccugaagcccuucgagcgggacaucagcaccgagaucuaccaagccggcuccaccccuugcaacggcgugaagggcuucaacugcuacuucccucugcagagcuacggcuuccagcccaccaacggcgugggcuaccagcccuaccgggugguggugcugagcuucgagcugcugcacgccccagccaccguguguggccccaagaagagcaccaaccuggugaagaacaagugcgugaacuucaacuucaacggccuuaccggcaccggcgugcugaccgagagcaacaagaaauuccugcccuuucagcaguucggccgggacaucgccgacaccaccgacgcugugcgggauccccagacccuggagauccuggacaucaccccuugcagcuucggcggcgugagcgugaucaccccaggcaccaacaccagcaaccagguggccgugcuguaccagggcgugaacugcaccgaggugcccguggccauccacgccgaccagcugacacccaccuggcgggucuacagcaccggcagcaacguguuccagacccgggccgguugccugaucggcgccgagcacgugaacaacagcuacgagugcgacauccccaucggcgccggcaucugugccagcuaccagacccagaccaauucaccccggagggcaaggagcguggccagccagagcaucaucgccuacaccaugagccugggcgccgagaacagcguggccuacagcaacaacagcaucgccauccccaccaacuucaccaucagcgugaccaccgagauucugcccgugagcaugaccaagaccagcguggacugcaccauguacaucugcggcgacagcaccgagugcagcaaccugcugcugcaguacggcagcuucugcacccagcugaaccgggcccugaccggcaucgccguggagcaggacaagaacacccaggagguguucgcccaggugaagcagaucuacaagaccccucccaucaaggacuucggcggcuucaacuucagccagauccugcccgaccccagcaagcccagcaagcggagcuucaucgaggaccugcuguucaacaaggugacccuagccgacgccggcuucaucaagcaguacggcgacugccucggcgacauagccgcccgggaccugaucugcgcccagaaguucaacggccugaccgugcugccuccccugcugaccgacgagaugaucgcccaguacaccagcgcccuguuagccggaaccaucaccagcggcuggacuuucggcgcuggagccgcucugcagauccccuucgccaugcagauggccuaccgguucaacggcaucggcgugacccagaacgugcuguacgagaaccagaagcugaucgccaaccaguucaacagcgccaucggcaagauccaggacagccugagcagcaccgcuagcgcccugggcaagcugcaggacguggugaaccagaacgcccaggcccugaacacccuggugaagcagcugagcagcaacuucggcgccaucagcagcgugcugaacgacauccugagccggcuggacaaggucgaggccgaggugcagaucgaccggcugaucacuggccggcugcagagccugcagaccuacgugacccagcagcugauccgggccgccgagauucgggccagcgccaaccuggccgccaccaagaugagcgagugcgugcugggccagagcaagcggguggacuucugcggcaagggcuaccaccugaugagcuuuccccagagcgcaccccacggagugguguuccugcacgugaccuacgugcccgcccaggagaagaacuucaccaccgccccagccaucugccacgacggcaaggcccacuuuccccgggagggcguguucgugagcaacggcacccacugguucgugacccagcggaacuucuacgagccccagaucaucaccaccgacaacaccuucgugagcggcaacugcgacguggugaucggcaucgugaacaacaccguguacgauccccugcagcccgagcuggacagcuucaaggaggagcuggacaaguacuucaagaaucacaccagccccgacguggaccugggcgacaucagcggcaucaacgccagcguggugaacauccagaaggagaucgaucggcugaacgagguggccaagaaccugaacgagagccugaucgaccugcaggagcugggcaaguacgagcaguacaucaaguggcccugguacaucuggcugggcuucaucgccggccugaucgccaucgugauggugaccaucaugcugugcugcaugaccagcugcugcagcugccugaagggcuguugcagcugcggcagcugcugcaaguucgacgaggacgacagcgagcccgugcugaagggcgugaagcugcacuacaccugaggacuagucccuguucccagagcccacuuuuuuuucuuuuuuugaaauaaaauagccugucuuucagaucucaaaggcucuuuucagagccaccaaaaaaaaaaaaaaaaaaaaaaaaaaaaaaaaaaaaaaaaaaaaaaaaaaaaaaaaaaaaaaaaaaaaaaaaaaaaaaaaaaaaaaaaaaaaaaaaaaaaa

SEQ ID NO: 23461 - RNA, 4094 nt, Artificial Sequence
  SARS-CoV-2/Wuhan/WIV05/2019__EPI_ISL_402128 spike protein mRNA gc (1-1273)(L18F_T20N_P26S_D138Y_R190S_K417T_E484K_N501Y_D614G_H655Y _T1027I)
aggagagucccgcagucggcguccagcggcucugcuuguucgugugugugucguugcaggccuuauucaagcuuaccauguucguguuccuggugcugcugccccuggugagcagccagugcgugaacuucaccaaccggacccagcugccaagcgccuacaccaacagcuucacccggggcgucuacuaccccgacaagguguuccggagcagcguccugcacagcacccaggaccuguuccugcccuucuucagcaacgugaccugguuccacgccauccacgugagcggcaccaacggcaccaagcgguucgacaaccccgugcugcccuucaacgacggcguguacuucgccagcaccgagaagagcaacaucauccggggcuggaucuucggcaccacccuggacagcaagacccagagccugcugaucgugaauaacgccaccaacguggugaucaaggugugcgaguuccaguucugcaacuaccccuuccugggcguguacuaccacaagaacaacaagagcuggauggagagcgaguuccggguguacagcagcgccaacaacugcaccuucgaguacgugagccagcccuuccugauggaccuggagggcaagcagggcaacuucaagaaccugagcgaguucguguucaagaacaucgacggcuacuucaagaucuacagcaagcacaccccaaucaaccuggugcgggaucugccccagggcuucucagcccuggagccccugguggaccugcccaucggcaucaacaucacccgguuccagacccugcuggcccugcaccggagcuaccugaccccaggcgacagcagcagcggguggacagcaggcgcggcugcuuacuacgugggcuaccugcagccccggaccuuccugcugaaguacaacgagaacggcaccaucaccgacgccguggacugcgcccuggacccucugagcgagaccaagugcacccugaagagcuucaccguggagaagggcaucuaccagaccagcaacuuccgggugcagcccaccgagagcaucgugcgguuccccaacaucaccaaccugugccccuucggcgagguguucaacgccacccgguucgccagcguguacgccuggaaccggaagcggaucagcaacugcguggccgacuacagcgugcuguacaacagcgccagcuucagcaccuucaagugcuacggcgugagccccaccaagcugaacgaccugugcuucaccaacguguacgccgacagcuucgugauccguggcgacgaggugcggcagaucgcacccggccagacaggcaccaucgccgacuacaacuacaagcugcccgacgacuucaccggcugcgugaucgccuggaacagcaacaaccucgacagcaaggugggcggcaacuacaacuaccuguaccggcuguuccggaagagcaaccugaagcccuucgagcgggacaucagcaccgagaucuaccaagccggcuccaccccuugcaacggcgugaagggcuucaacugcuacuucccucugcagagcuacggcuuccagcccaccuacggcgugggcuaccagcccuaccgggugguggugcugagcuucgagcugcugcacgccccagccaccguguguggccccaagaagagcaccaaccuggugaagaacaagugcgugaacuucaacuucaacggccuuaccggcaccggcgugcugaccgagagcaacaagaaauuccugcccuuucagcaguucggccgggacaucgccgacaccaccgacgcugugcgggauccccagacccuggagauccuggacaucaccccuugcagcuucggcggcgugagcgugaucaccccaggcaccaacaccagcaaccagguggccgugcuguaccagggcgugaacugcaccgaggugcccguggccauccacgccgaccagcugacacccaccuggcgggucuacagcaccggcagcaacguguuccagacccgggccgguugccugaucggcgccgaguacgugaacaacagcuacgagugcgacauccccaucggcgccggcaucugugccagcuaccagacccagaccaauucaccccggagggcaaggagcguggccagccagagcaucaucgccuacaccaugagccugggcgccgagaacagcguggccuacagcaacaacagcaucgccauccccaccaacuucaccaucagcgugaccaccgagauucugcccgugagcaugaccaagaccagcguggacugcaccauguacaucugcggcgacagcaccgagugcagcaaccugcugcugcaguacggcagcuucugcacccagcugaaccgggcccugaccggcaucgccguggagcaggacaagaacacccaggagguguucgcccaggugaagcagaucuacaagaccccucccaucaaggacuucggcggcuucaacuucagccagauccugcccgaccccagcaagcccagcaagcggagcuucaucgaggaccugcuguucaacaaggugacccuagccgacgccggcuucaucaagcaguacggcgacugccucggcgacauagccgcccgggaccugaucugcgcccagaaguucaacggccugaccgugcugccuccccugcugaccgacgagaugaucgcccaguacaccagcgcccuguuagccggaaccaucaccagcggcuggacuuucggcgcuggagccgcucugcagauccccuucgccaugcagauggccuaccgguucaacggcaucggcgugacccagaacgugcuguacgagaaccagaagcugaucgccaaccaguucaacagcgccaucggcaagauccaggacagccugagcagcaccgcuagcgcccugggcaagcugcaggacguggugaaccagaacgcccaggcccugaacacccuggugaagcagcugagcagcaacuucggcgccaucagcagcgugcugaacgacauccugagccggcuggacaaggucgaggccgaggugcagaucgaccggcugaucacuggccggcugcagagccugcagaccuacgugacccagcagcugauccgggccgccgagauucgggccagcgccaaccuggccgccaucaagaugagcgagugcgugcugggccagagcaagcggguggacuucugcggcaagggcuaccaccugaugagcuuuccccagagcgcaccccacggagugguguuccugcacgugaccuacgugcccgcccaggagaagaacuucaccaccgccccagccaucugccacgacggcaaggcccacuuuccccgggagggcguguucgugagcaacggcacccacugguucgugacccagcggaacuucuacgagccccagaucaucaccaccgacaacaccuucgugagcggcaacugcgacguggugaucggcaucgugaacaacaccguguacgauccccugcagcccgagcuggacagcuucaaggaggagcuggacaaguacuucaagaaucacaccagccccgacguggaccugggcgacaucagcggcaucaacgccagcguggugaacauccagaaggagaucgaucggcugaacgagguggccaagaaccugaacgagagccugaucgaccugcaggagcugggcaaguacgagcaguacaucaaguggcccugguacaucuggcugggcuucaucgccggccugaucgccaucgugauggugaccaucaugcugugcugcaugaccagcugcugcagcugccugaagggcuguugcagcugcggcagcugcugcaaguucgacgaggacgacagcgagcccgugcugaagggcgugaagcugcacuacaccugaggacuagucccuguucccagagcccacuuuuuuuucuuuuuuugaaauaaaauagccugucuuucagaucucaaaggcucuuuucagagccaccaaaaaaaaaaaaaaaaaaaaaaaaaaaaaaaaaaaaaaaaaaaaaaaaaaaaaaaaaaaaaaaaaaaaaaaaaaaaaaaaaaaaaaaaaaaaaaaaaaaaa

SEQ ID NO: 23462 - RNA, 4094 nt, Artificial Sequence
  SARS-CoV-2/Wuhan/WIV05/2019__EPI_ISL_402128 spike protein mRNA gc (1-1273)(S13I_W152C_L452R_D614G)
aggagagucccgcagucggcguccagcggcucugcuuguucgugugugugucguugcaggccuuauucaagcuuaccauguucguguuccuggugcugcugccccuggugagcauccagugcgugaaccugaccacccggacccagcugccaccagccuacaccaacagcuucacccggggcgucuacuaccccgacaagguguuccggagcagcguccugcacagcacccaggaccuguuccugcccuucuucagcaacgugaccugguuccacgccauccacgugagcggcaccaacggcaccaagcgguucgacaaccccgugcugcccuucaacgacggcguguacuucgccagcaccgagaagagcaacaucauccggggcuggaucuucggcaccacccuggacagcaagacccagagccugcugaucgugaauaacgccaccaacguggugaucaaggugugcgaguuccaguucugcaacgaccccuuccugggcguguacuaccacaagaacaacaagagcugcauggagagcgaguuccggguguacagcagcgccaacaacugcaccuucgaguacgugagccagcccuuccugauggaccuggagggcaagcagggcaacuucaagaaccugcgggaguucguguucaagaacaucgacggcuacuucaagaucuacagcaagcacaccccaaucaaccuggugcgggaucugccccagggcuucucagcccuggagccccugguggaccugcccaucggcaucaacaucacccgguuccagacccugcuggcccugcaccggagcuaccugaccccaggcgacagcagcagcggguggacagcaggcgcggcugcuuacuacgugggcuaccugcagccccggaccuuccugcugaaguacaacgagaacggcaccaucaccgacgccguggacugcgcccuggacccucugagcgagaccaagugcacccugaagagcuucaccguggagaagggcaucuaccagaccagcaacuuccgggugcagcccaccgagagcaucgugcgguuccccaacaucaccaaccugugccccuucggcgagguguucaacgccacccgguucgccagcguguacgccuggaaccggaagcggaucagcaacugcguggccgacuacagcgugcuguacaacagcgccagcuucagcaccuucaagugcuacggcgugagccccaccaagcugaacgaccugugcuucaccaacguguacgccgacagcuucgugauccguggcgacgaggugcggcagaucgcacccggccagacaggcaagaucgccgacuacaacuacaagcugcccgacgacuucaccggcugcgugaucgccuggaacagcaacaaccucgacagcaaggugggcggcaacuacaacuaccgcuaccggcuguuccggaagagcaaccugaagcccuucgagcgggacaucagcaccgagaucuaccaagccggcuccaccccuugcaacggcguggagggcuucaacugcuacuucccucugcagagcuacggcuuccagcccaccaacggcgugggcuaccagcccuaccgggugguggugcugagcuucgagcugcugcacgccccagccaccguguguggccccaagaagagcaccaaccuggugaagaacaagugcgugaacuucaacuucaacggccuuaccggcaccggcgugcugaccgagagcaacaagaaauuccugcccuuucagcaguucggccgggacaucgccgacaccaccgacgcugugcgggauccccagacccuggagauccuggacaucaccccuugcagcuucggcggcgugagcgugaucaccccaggcaccaacaccagcaaccagguggccgugcuguaccagggcgugaacugcaccgaggugcccguggccauccacgccgaccagcugacacccaccuggcgggucuacagcaccggcagcaacguguuccagacccgggccgguugccugaucggcgccgagcacgugaacaacagcuacgagugcgacauccccaucggcgccggcaucugugccagcuaccagacccagaccaauucaccccggagggcaaggagcguggccagccagagcaucaucgccuacaccaugagccugggcgccgagaacagcguggccuacagcaacaacagcaucgccauccccaccaacuucaccaucagcgugaccaccgagauucugcccgugagcaugaccaagaccagcguggacugcaccauguacaucugcggcgacagcaccgagugcagcaaccugcugcugcaguacggcagcuucugcacccagcugaaccgggcccugaccggcaucgccguggagcaggacaagaacacccaggagguguucgcccaggugaagcagaucuacaagaccccucccaucaaggacuucggcggcuucaacuucagccagauccugcccgaccccagcaagcccagcaagcggagcuucaucgaggaccugcuguucaacaaggugacccuagccgacgccggcuucaucaagcaguacggcgacugccucggcgacauagccgcccgggaccugaucugcgcccagaaguucaacggccugaccgugcugccuccccugcugaccgacgagaugaucgcccaguacaccagcgcccuguuagccggaaccaucaccagcggcuggacuuucggcgcuggagccgcucugcagauccccuucgccaugcagauggccuaccgguucaacggcaucggcgugacccagaacgugcuguacgagaaccagaagcugaucgccaaccaguucaacagcgccaucggcaagauccaggacagccugagcagcaccgcuagcgcccugggcaagcugcaggacguggugaaccagaacgcccaggcccugaacacccuggugaagcagcugagcagcaacuucggcgccaucagcagcgugcugaacgacauccugagccggcuggacaaggucgaggccgaggugcagaucgaccggcugaucacuggccggcugcagagccugcagaccuacgugacccagcagcugauccgggccgccgagauucgggccagcgccaaccuggccgccaccaagaugagcgagugcgugcugggccagagcaagcggguggacuucugcggcaagggcuaccaccugaugagcuuuccccagagcgcaccccacggagugguguuccugcacgugaccuacgugcccgcccaggagaagaacuucaccaccgccccagccaucugccacgacggcaaggcccacuuuccccgggagggcguguucgugagcaacggcacccacugguucgugacccagcggaacuucuacgagccccagaucaucaccaccgacaacaccuucgugagcggcaacugcgacguggugaucggcaucgugaacaacaccguguacgauccccugcagcccgagcuggacagcuucaaggaggagcuggacaaguacuucaagaaucacaccagccccgacguggaccugggcgacaucagcggcaucaacgccagcguggugaacauccagaaggagaucgaucggcugaacgagguggccaagaaccugaacgagagccugaucgaccugcaggagcugggcaaguacgagcaguacaucaaguggcccugguacaucuggcugggcuucaucgccggccugaucgccaucgugauggugaccaucaugcugugcugcaugaccagcugcugcagcugccugaagggcuguugcagcugcggcagcugcugcaaguucgacgaggacgacagcgagcccgugcugaagggcgugaagcugcacuacaccugaggacuagucccuguucccagagcccacuuuuuuuucuuuuuuugaaauaaaauagccugucuuucagaucucaaaggcucuuuucagagccaccaaaaaaaaaaaaaaaaaaaaaaaaaaaaaaaaaaaaaaaaaaaaaaaaaaaaaaaaaaaaaaaaaaaaaaaaaaaaaaaaaaaaaaaaaaaaaaaaaaaaa

SEQ ID NO: 23463 - RNA, 4094 nt, Artificial Sequence
  SARS-CoV-2/Wuhan/WIV05/2019__EPI_ISL_402128 spike protein mRNA gc (1-1273)
aggagagucccgcagucggcguccagcggcucugcuuguucgugugugugucguugcaggccuuauucaagcuuaccauguucguguuccuggugcugcugccccuggugagcagccagugcgugaaccugaccacccggacccagcugcccccugccuacaccaacagcuucacccggggcguguacuaccccgacaagguguuccggagcagcgugcugcacagcacccaggaccuguuccugcccuucuucagcaacgugaccugguuccacgccauccacgugagcggcaccaacggcaccaagcgguucgacaacccagugcugcccuucaacgacggcguguacuucgccagcaccgagaagucaaacaucauccggggcuggaucuucggcaccacccuggacagcaagacacagagccugcugaucgugaacaacgccaccaacguggugaucaaggugugcgaguuucaguucugcaacgaccccuuccugggcguguacuaccacaagaacaacaagagcuggauggagagcgaguuccgggucuacagcagcgcuaacaauugcaccuucgaguacgugagccagcccuuccugauggaccucgagggcaagcagggcaacuucaagaaccugcgggaguucguguucaagaacaucgauggcuacuucaagaucuacagcaagcacacccccaucaaccuggugcgggaccugccccagggauucagcgcccuggagccucugguggaccugcccaucggcaucaacaucaccagguuccagacccugcuggcccugcaccggagcuaccugacccccggcgacagcagcagcggcuggaccgccggcgccgccgcauacuacgugggcuaccugcagccacggaccuuccugcugaaguacaacgagaacggcaccaucaccgacgccguggacugcgcccuggacccccugagcgagaccaagugcacccuaaagagcuucaccguggagaagggcaucuaccagaccagcaacuuccgggugcagcccacugagagcaucgugcgguuccccaacauuaccaaccugugucccuucggcgagguguucaacgccacccgguucgccagcguguacgccuggaaccggaagcggaucagcaacugcguggccgacuacagcgugcuguacaacagcgccagcuucagcaccuucaagugcuacggcgugagcccuaccaagcugaacgaccugugcuucaccaacguguacgcugacagcuucgugauccggggcgacgaggugcggcagaucgcccccggccagaccggcaagaucgccgacuacaacuacaagcugcccgacgacuucaccggcugcgugaucgccuggaacagcaacaaccuggacagcaaggugggcggcaacuacaacuaccuguaccggcuguuccguaagagcaaccugaagccauucgagcgggacaucagcaccgagaucuaccaggccggcagcacccccugcaacgguguggagggcuuuaacugcuacuucccccugcagagcuacggcuuccagcccaccaacggcgugggcuaccagcccuaccgggugguggugcugagcuucgagcugcugcacgcccccgccaccgugugcggcccuaaaaagagcaccaaccuggugaagaacaagugcgugaacuucaauuucaacggccugaccggcaccggcgugcugaccgagagcaacaagaaguuccugcccuuccagcaguucggccgggauaucgccgacaccaccgacgcagugcgggacccccagacccuggagauccuggacaucaccccaugcagcuucggcggcgugagcgucaucacccccggcacaaacaccagcaaccagguggccgugcuguaccaggacgugaacugcaccgaggugcccguggccauccacgccgaccagcugacccccaccuggcggguguacagcaccggaagcaacguguuccagacccgggccggcugccugaucggcgccgagcacgugaacaacuccuacgagugcgacauccccaucggcgcuggcaucugcgccagcuaccagacccagaccaacagcccccggcgggcccggagcguggccagccagagcaucaucgccuacaccaugagcuuaggcgccgagaacagcguggccuacagcaacaacagcaucgcgaucccuaccaacuucaccaucagcgugaccaccgagauacugcccgugagcaugaccaagaccagcguggacuguaccauguacaucugcggcgacagcaccgagugcagcaaccugcugcugcaguacggcagcuucugcacccagcugaaccgggcccugaccggcaucgccguggagcaggacaagaacacccaagagguguucgcccaggugaagcagaucuacaagacucccccaaucaaggacuucggcggcuucaacuucagccagauccugcccgaccccagcaagcccagcaagcggagcuucaucgaggaccugcuguucaacaaggugacccuggccgacgccggcuucaucaagcaguacggcgauugccugggcgacaucgccgcucgggaccugaucugcgcccagaaguucaacgggcugaccgugcugcccccucugcugaccgacgagaugaucgcccaguacaccagcgcccugcuugccggcaccaucaccagcggcuggaccuucggcgccggcgcagcccugcagauccccuucgccaugcagauggccuaccgguucaacggcaucggcgugacccagaacgugcuguacgagaaccagaagcugaucgccaaccaguucaacagcgccaucggcaagauccaggacagccugagcagcaccgccagcgcccugggcaagcugcaggacguggugaaccagaacgcucaggcccugaacacccuggugaagcagcugagcagcaacuucggcgccaucagcucagugcugaaugacauccugagcaggcuggacaagguggaggccgaggugcagaucgaccggcugaucaccggccggcugcagagccugcagaccuacgugacccagcagcugauccgggccgccgagauccgggccagcgccaaccuggcagccaccaagaugagcgagugcgugcugggccagagcaagcggguggacuuuugcggcaagggcuaccaccugaugagcuucccccagagcgccccacacggcgugguguuccuccacgucacauacgugcccgcccaggagaagaacuucaccaccgcccccgccauuugccacgacggcaaggcucacuucccccgggagggcguguucgugagcaacggaacccacugguucgugacccagcggaacuucuacgagccccagaucaucaccaccgacaacaccuucgugagcggcaacugcgacguggugaucggcaucgugaacaacaccguguacgacccccugcagccugagcuggacagcuucaaggaggagcuggacaaguacuucaagaaccacaccagccccgauguggaccugggcgacaucagcggcaucaacgccagcguggugaacauccagaaggagaucgaccggcugaacgagguggccaagaaccugaacgagagccugaucgaccugcaggagcugggcaaguacgagcaguacaucaaguggcccugguacaucuggcugggcuucaucgccggccugaucgccaucgugauggugaccaucaugcugugcugcaugaccagcugcuguagcugccugaagggcugcugcagcugcggcagcugcugcaaguucgacgaggacgacagcgagccagugcugaagggcgugaagcugcacuacaccugaggacuagucccuguucccagagcccacuuuuuuuucuuuuuuugaaauaaaauagccugucuuucagaucucaaaggcucuuuucagagccaccaaaaaaaaaaaaaaaaaaaaaaaaaaaaaaaaaaaaaaaaaaaaaaaaaaaaaaaaaaaaaaaaaaaaaaaaaaaaaaaaaaaaaaaaaaaaaaaaaaaaa

SEQ ID NO: 23464 - RNA, 4094 nt, Artificial Sequence
  SARS-CoV-2/Wuhan/WIV05/2019__EPI_ISL_402128 spike protein mRNA gc (1-1273)(D614G)
aggagagucccgcagucggcguccagcggcucugcuuguucgugugugugucguugcaggccuuauucaagcuuaccauguucguguuccuggugcugcugccccuggugagcagccagugcgugaaccugaccacccggacccagcugcccccugccuacaccaacagcuucacccggggcguguacuaccccgacaagguguuccggagcagcgugcugcacagcacccaggaccuguuccugcccuucuucagcaacgugaccugguuccacgccauccacgugagcggcaccaacggcaccaagcgguucgacaacccagugcugcccuucaacgacggcguguacuucgccagcaccgagaagucaaacaucauccggggcuggaucuucggcaccacccuggacagcaagacacagagccugcugaucgugaacaacgccaccaacguggugaucaaggugugcgaguuucaguucugcaacgaccccuuccugggcguguacuaccacaagaacaacaagagcuggauggagagcgaguuccgggucuacagcagcgcuaacaauugcaccuucgaguacgugagccagcccuuccugauggaccucgagggcaagcagggcaacuucaagaaccugcgggaguucguguucaagaacaucgauggcuacuucaagaucuacagcaagcacacccccaucaaccuggugcgggaccugccccagggauucagcgcccuggagccucugguggaccugcccaucggcaucaacaucaccagguuccagacccugcuggcccugcaccggagcuaccugacccccggcgacagcagcagcggcuggaccgccggcgccgccgcauacuacgugggcuaccugcagccacggaccuuccugcugaaguacaacgagaacggcaccaucaccgacgccguggacugcgcccuggacccccugagcgagaccaagugcacccuaaagagcuucaccguggagaagggcaucuaccagaccagcaacuuccgggugcagcccacugagagcaucgugcgguuccccaacauuaccaaccugugucccuucggcgagguguucaacgccacccgguucgccagcguguacgccuggaaccggaagcggaucagcaacugcguggccgacuacagcgugcuguacaacagcgccagcuucagcaccuucaagugcuacggcgugagcccuaccaagcugaacgaccugugcuucaccaacguguacgcugacagcuucgugauccggggcgacgaggugcggcagaucgcccccggccagaccggcaagaucgccgacuacaacuacaagcugcccgacgacuucaccggcugcgugaucgccuggaacagcaacaaccuggacagcaaggugggcggcaacuacaacuaccuguaccggcuguuccguaagagcaaccugaagccauucgagcgggacaucagcaccgagaucuaccaggccggcagcacccccugcaacgguguggagggcuuuaacugcuacuucccccugcagagcuacggcuuccagcccaccaacggcgugggcuaccagcccuaccgggugguggugcugagcuucgagcugcugcacgcccccgccaccgugugcggcccuaaaaagagcaccaaccuggugaagaacaagugcgugaacuucaauuucaacggccugaccggcaccggcgugcugaccgagagcaacaagaaguuccugcccuuccagcaguucggccgggauaucgccgacaccaccgacgcagugcgggacccccagacccuggagauccuggacaucaccccaugcagcuucggcggcgugagcgucaucacccccggcacaaacaccagcaaccagguggccgugcuguaccagggagugaacugcaccgaggugcccguggccauccacgccgaccagcugacccccaccuggcggguguacagcaccggcagcaacguguuccagacccgggccggcugccugaucggcgccgagcacgugaacaacuccuacgagugcgacauccccaucggcgcuggcaucugcgccagcuaccagacccagaccaacagcccccggcgggcccggagcguggccagccagagcaucaucgccuacaccaugagcuuaggcgccgagaacagcguggccuacagcaacaacagcaucgcgaucccuaccaacuucaccaucagcgugaccaccgagauacugcccgugagcaugaccaagaccagcguggacuguaccauguacaucugcggcgacagcaccgagugcagcaaccugcugcugcaguacggcagcuucugcacccagcugaaccgggcccugaccggcaucgccguggagcaggacaagaacacccaagagguguucgcccaggugaagcagaucuacaagacucccccaaucaaggacuucggcggcuucaacuucagccagauccugcccgaccccagcaagcccagcaagcggagcuucaucgaggaccugcuguucaacaaggugacccuggccgacgccggcuucaucaagcaguacggcgacugccugggggauaucgccgcucgggaccugaucugcgcccagaaguucaacggccugaccgugcugcccccucugcugaccgacgagaugaucgcccaguacaccagcgcccugcuugccggcaccaucaccagcggcuggaccuucggcgccggcgcagcccugcagauccccuucgccaugcagauggccuaccgguucaacggcaucggcgugacccagaacgugcuguacgagaaccagaagcugaucgccaaccaguucaacagcgccaucggcaagauccaggacagccugagcagcaccgccagcgcccugggcaagcugcaggacguggugaaccagaacgcucaggcccugaacacccuggugaagcagcugagcagcaacuucggcgccaucagcucagugcugaaugacauccugagcaggcuggacaagguggaggccgaggugcagaucgaccggcugaucaccggccggcugcagagccugcagaccuacgugacccagcagcugauccgggccgccgagauccgggccagcgccaaccuggcagccaccaagaugagcgagugcgugcugggccagagcaagcggguggacuuuugcggcaagggcuaccaccugaugagcuucccccagagcgccccacacggcgugguguuccuccacgucacauacgugcccgcccaggagaagaacuucaccaccgcccccgccauuugccacgacggcaaggcucacuucccccgggagggaguguucgugagcaacggcacccacugguucgugacccagcggaacuucuacgagccccagaucaucaccaccgacaacaccuucgugagcggcaacugcgacguggugaucggcaucgugaacaacaccguguacgacccccugcagccugagcuggacagcuucaaggaggagcuggacaaguacuucaagaaccacaccagccccgacguggaucugggcgacaucagcggcaucaacgccagcguggugaacauccagaaggagaucgaccggcugaacgagguggccaagaaccugaacgagagccugaucgaccugcaggagcugggcaaguacgagcaguacaucaaguggcccugguacaucuggcugggcuucaucgccggccugaucgccaucgugauggugaccaucaugcugugcugcaugaccagcugcuguagcugccugaagggcugcugcagcugcggcagcugcugcaaguucgacgaggacgacagcgagccagugcugaagggcgugaagcugcacuacaccugaggacuagucccuguucccagagcccacuuuuuuuucuuuuuuugaaauaaaauagccugucuuucagaucucaaaggcucuuuucagagccaccaaaaaaaaaaaaaaaaaaaaaaaaaaaaaaaaaaaaaaaaaaaaaaaaaaaaaaaaaaaaaaaaaaaaaaaaaaaaaaaaaaaaaaaaaaaaaaaaaaaaa

SEQ ID NO: 23465 - RNA, 4094 nt, Artificial Sequence
  SARS-CoV-2/Wuhan/WIV05/2019__EPI_ISL_402128 spike protein mRNA gc (1-1273)(A222V_D614G)
aggagagucccgcagucggcguccagcggcucugcuuguucgugugugugucguugcaggccuuauucaagcuuaccauguucguguuccuggugcugcugccccuggugagcagccagugcgugaaccugaccacccggacccagcugcccccugccuacaccaacagcuucacccggggcguguacuaccccgacaagguguuccggagcagcgugcugcacagcacccaggaccuguuccugcccuucuucagcaacgugaccugguuccacgccauccacgugagcggcaccaacggcaccaagcgguucgacaacccagugcugcccuucaacgacggcguguacuucgccagcaccgagaagucaaacaucauccggggcuggaucuucggcaccacccuggacagcaagacacagagccugcugaucgugaacaacgccaccaacguggugaucaaggugugcgaguuucaguucugcaacgaccccuuccugggcguguacuaccacaagaacaacaagagcuggauggagagcgaguuccgggucuacagcagcgcuaacaauugcaccuucgaguacgugagccagcccuuccugauggaccucgagggcaagcagggcaacuucaagaaccugcgggaguucguguucaagaacaucgauggcuacuucaagaucuacagcaagcacacccccaucaaccuggugcgggaccugccccagggauucagcgugcuggagccucugguggaccugcccaucggcaucaacaucaccagguuccagacccugcuggcccugcaccggagcuaccugacccccggcgacagcagcagcggcuggaccgccggcgccgccgccuacuacgugggcuaccugcagccacggaccuuccugcugaaguacaacgagaacggcaccaucaccgacgcaguggacugcgcccuggacccccugagcgagaccaagugcacccuaaagagcuucaccguggagaagggcaucuaccagaccagcaacuuccgggugcagcccacugagagcaucgugcgguuccccaacauuaccaaccugugucccuucggcgagguguucaacgccacccgguucgccagcguguacgccuggaaccggaagcggaucagcaacugcguggccgacuacagcgugcuguacaacagcgccagcuucagcaccuucaagugcuacggcgugagcccuaccaagcugaacgaccugugcuucaccaacguguacgccgacagcuucgugauccggggcgacgaggugcggcagaucgcucccggccagaccggcaagaucgccgacuacaacuacaagcugcccgacgacuucaccggcugcgugaucgccuggaacagcaacaaccuggacagcaaggugggcggcaacuacaacuaccuguaccggcuguuccguaagagcaaccugaagccauucgagcgggacaucagcaccgagaucuaccaggccggcagcacccccugcaacgguguggagggcuuuaacugcuacuucccccugcagagcuacggcuuccagcccaccaacggcgugggcuaccagcccuaccgggugguggugcugagcuucgagcugcugcacgcccccgccaccgugugcggcccuaaaaagagcaccaaccuggugaagaacaagugcgugaacuucaauuucaacggccugaccggcaccggcgugcugaccgagagcaacaagaaguuccugcccuuccagcaguucggccgggauaucgccgacaccaccgacgccgugcgggacccccagacccuggagauccuggacaucaccccaugcagcuucggcggcgucagcgugaucacccccggcacaaacaccagcaaccagguggcagugcuguaccagggagugaacugcaccgaggugcccguggccauccacgccgaccagcugacccccaccuggcggguguacagcaccggcagcaacguguuccagacccgggccggcugccugaucggcgccgagcacgugaacaacuccuacgagugcgacauccccaucggcgccggcaucugcgcuagcuaccagacccagaccaacagcccccggcgggcccggagcguggccagccagagcaucaucgccuacaccaugagcuuaggcgccgagaacagcguggccuacagcaacaacagcaucgccaucccuaccaacuucaccaucagcgugaccaccgagauacugcccgugagcaugaccaagaccagcguggacuguaccauguacaucugcggcgacagcaccgagugcagcaaccugcugcugcaguacggcagcuucugcacccagcugaaccgggcgcugaccggcaucgccguggagcaggacaagaacacccaagagguguucgcccaggugaagcagaucuacaagacucccccaaucaaggacuucggcggcuucaacuucagccagauccugcccgaccccagcaagcccagcaagcggagcuucaucgaggaccugcuguucaacaaggugacccuggccgacgccggcuucaucaagcaguacggcgacugccugggggauaucgccgcccgggaccugaucugcgcucagaaguucaacggccugaccgugcugcccccucugcugaccgacgagaugaucgcccaguacaccagcgcccugcuugccggcaccaucaccagcggcuggaccuucggcgccggcgccgcacugcagauccccuucgccaugcagauggccuaccgguucaacggcaucggcgugacccagaacgugcuguacgagaaccagaagcugaucgccaaccaguucaacagcgccaucggcaagauccaggacagccugagcagcaccgccagcgcccugggcaagcugcaggacguggugaaccagaacgcccaggcucugaacacccuggugaagcagcugagcagcaacuucggcgccaucagcucagugcugaaugacauccugagcaggcuggacaagguggaggccgaggugcagaucgaccggcugaucaccggccggcugcagagccugcagaccuacgugacccagcagcugauccgggccgccgagauccgggccagcgccaaccuggccgcaaccaagaugagcgagugcgugcugggccagagcaagcggguggacuuuugcggcaagggcuaccaccugaugagcuucccccagagcgccccacacggcguggucuuccuccacgugacauacgugcccgcccaggagaagaacuucaccaccgcccccgccauuugccacgacggcaaggcccacuucccccgggagggaguguucgugagcaacggcacccacugguucgugacccagcggaacuucuacgagccccagaucaucaccaccgacaacaccuucgugagcggcaacugcgacguggugaucggcaucgugaacaacaccguguacgacccccugcagccugagcuggacagcuucaaggaggagcuggacaaguacuucaagaaccacaccagccccgacguggaucugggcgacaucagcggcaucaacgcuagcguggugaacauccagaaggagaucgaccggcugaacgagguggccaagaaccugaacgagagccugaucgaccugcaggagcugggcaaguacgagcaguacaucaaguggcccugguacaucuggcugggcuucaucgccggccugaucgccaucgugauggugaccaucaugcugugcugcaugaccagcugcuguagcugccugaagggcugcugcagcugcggcagcugcugcaaguucgacgaggacgacagcgagccagugcugaagggcgugaagcugcacuacaccugaggacuagucccuguucccagagcccacuuuuuuuucuuuuuuugaaauaaaauagccugucuuucagaucucaaaggcucuuuucagagccaccaaaaaaaaaaaaaaaaaaaaaaaaaaaaaaaaaaaaaaaaaaaaaaaaaaaaaaaaaaaaaaaaaaaaaaaaaaaaaaaaaaaaaaaaaaaaaaaaaaaaa

SEQ ID NO: 23466 - RNA, 4094 nt, Artificial Sequence
  SARS-CoV-2/Wuhan/WIV05/2019__EPI_ISL_402128 spike protein mRNA gc (1-1273)(N439K_D614G)
aggagagucccgcagucggcguccagcggcucugcuuguucgugugugugucguugcaggccuuauucaagcuuaccauguucguguuccuggugcugcugccccuggugagcagccagugcgugaaccugaccacccggacccagcugcccccugccuacaccaacagcuucacccggggcguguacuaccccgacaagguguuccggagcagcgugcugcacagcacccaggaccuguuccugcccuucuucagcaacgugaccugguuccacgccauccacgugagcggcaccaacggcaccaagcgguucgacaacccagugcugcccuucaacgacggcguguacuucgccagcaccgagaagucaaacaucauccggggcuggaucuucggcaccacccuggacagcaagacacagagccugcugaucgugaacaacgccaccaacguggugaucaaggugugcgaguuucaguucugcaacgaccccuuccugggcguguacuaccacaagaacaacaagagcuggauggagagcgaguuccgggucuacagcagcgcuaacaauugcaccuucgaguacgugagccagcccuuccugauggaccucgagggcaagcagggcaacuucaagaaccugcgggaguucguguucaagaacaucgauggcuacuucaagaucuacagcaagcacacccccaucaaccuggugcgggaccugccccagggauucagcgcccuggagccucugguggaccugcccaucggcaucaacaucaccagguuccagacccugcuggcccugcaccggagcuaccugacccccggcgacagcagcagcggcuggaccgccggcgccgccgcauacuacgugggcuaccugcagccacggaccuuccugcugaaguacaacgagaacggcaccaucaccgacgccguggacugcgcccuggacccccugagcgagaccaagugcacccuaaagagcuucaccguggagaagggcaucuaccagaccagcaacuuccgggugcagcccacugagagcaucgugcgguuccccaacauuaccaaccugugucccuucggcgagguguucaacgccacccgguucgccagcguguacgccuggaaccggaagcggaucagcaacugcguggccgacuacagcgugcuguacaacagcgccagcuucagcaccuucaagugcuacggcgugagcccuaccaagcugaacgaccugugcuucaccaacguguacgcugacagcuucgugauccggggcgacgaggugcggcagaucgcccccggccagaccggcaagaucgccgacuacaacuacaagcugcccgacgacuucaccggcugcgugaucgccuggaacagcaagaaccuggacagcaaggugggcggcaacuacaacuaccuguaccggcuguuccguaagagcaaccugaagccauucgagcgggacaucagcaccgagaucuaccaggccggcagcacccccugcaacgguguggagggcuuuaacugcuacuucccccugcagagcuacggcuuccagcccaccaacggcgugggcuaccagcccuaccgggugguggugcugagcuucgagcugcugcacgcccccgccaccgugugcggcccuaaaaagagcaccaaccuggugaagaacaagugcgugaacuucaacuucaauggccugaccggcaccggcgugcugaccgagagcaacaagaaguuccugcccuuccagcaguucggccgggauaucgccgacaccaccgacgcagugcgggacccccagacccuggagauccuggacaucaccccaugcagcuucggcggcgugagcgucaucacccccggcacaaacaccagcaaccagguggccgugcuguaccagggagugaacugcaccgaggugcccguggccauccacgccgaccagcugacccccaccuggcggguguacagcaccggcagcaacguguuccagacccgggccggcugccugaucggcgccgagcacgugaacaacuccuacgagugcgacauccccaucggcgcuggcaucugcgccagcuaccagacccagaccaacagcccccggcgggcccggagcguggccagccagagcaucaucgccuacaccaugagcuuaggcgccgagaacagcguggccuacagcaacaacagcaucgcgaucccuaccaacuucaccaucagcgugaccaccgagauacugcccgugagcaugaccaagaccagcguggacuguaccauguacaucugcggcgacagcaccgagugcagcaaccugcugcugcaguacggcagcuucugcacccagcugaaccgggcccugaccggcaucgccguggagcaggacaagaacacccaagagguguucgcccaggugaagcagaucuacaagacucccccaaucaaggacuucggcggcuucaacuucagccagauccugcccgaccccagcaagcccagcaagcggagcuucaucgaggaccugcuguucaacaaggugacccuggccgacgccggcuucaucaagcaguacggcgacugccugggggauaucgccgcucgggaccugaucugcgcccagaaguucaacggccugaccgugcugcccccucugcugaccgacgagaugaucgcccaguacaccagcgcccugcuugccggcaccaucaccagcggcuggaccuucggcgccggcgcagcccugcagauccccuucgccaugcagauggccuaccgguucaacggcaucggcgugacccagaacgugcuguacgagaaccagaagcugaucgccaaccaguucaacagcgccaucggcaagauccaggacagccugagcagcaccgccagcgcccugggcaagcugcaggacguggugaaccagaacgcucaggcccugaacacccuggugaagcagcugagcagcaacuucggcgccaucagcucagugcugaacgacauccugagcaggcuggacaagguggaggccgaggugcagaucgaccggcugaucaccggccggcugcagagccugcagaccuacgugacccagcagcugauccgggccgccgagauccgggccagcgccaaucuggcagccaccaagaugagcgagugcgugcugggccagagcaagcggguggacuuuugcggcaagggcuaccaccugaugagcuucccccagagcgccccacacggcgugguguuccuccacgucacauacgugcccgcccaggagaagaacuucaccaccgcccccgccauuugccacgacggcaaggcucacuucccccgggagggaguguucgugagcaacggcacccacugguucgugacccagcggaacuucuacgagccccagaucaucaccaccgacaacaccuucgugagcggcaacugcgacguggugaucggcaucgugaacaacaccguguacgacccccugcagccugagcuggacagcuucaaggaggagcuggacaaguacuucaagaaccacaccagccccgacguggaucugggcgacaucagcggcaucaacgccagcguggugaacauccagaaggagaucgaccggcugaacgagguggccaagaaccugaacgagagccugaucgaccugcaggagcugggcaaguacgagcaguacaucaaguggcccugguacaucuggcugggcuucaucgccggccugaucgccaucgugauggugaccaucaugcugugcugcaugaccagcugcuguagcugccugaagggcugcugcagcugcggcagcugcugcaaguucgacgaggacgacagcgagccagugcugaagggcgugaagcugcacuacaccugaggacuagucccuguucccagagcccacuuuuuuuucuuuuuuugaaauaaaauagccugucuuucagaucucaaaggcucuuuucagagccaccaaaaaaaaaaaaaaaaaaaaaaaaaaaaaaaaaaaaaaaaaaaaaaaaaaaaaaaaaaaaaaaaaaaaaaaaaaaaaaaaaaaaaaaaaaaaaaaaaaaaa

SEQ ID NO: 23467 - RNA, 4094 nt, Artificial Sequence
  SARS-CoV-2/Wuhan/WIV05/2019__EPI_ISL_402128 spike protein mRNA gc (1-1273)(S477N_D614G)
aggagagucccgcagucggcguccagcggcucugcuuguucgugugugugucguugcaggccuuauucaagcuuaccauguucguguuccuggugcugcugccccuggugagcagccagugcgugaaccugaccacccggacccagcugcccccugccuacaccaacagcuucacccggggcguguacuaccccgacaagguguuccggagcagcgugcugcacagcacccaggaccuguuccugcccuucuucagcaacgugaccugguuccacgccauccacgugagcggcaccaacggcaccaagcgguucgacaacccagugcugcccuucaacgacggcguguacuucgccagcaccgagaagucaaacaucauccggggcuggaucuucggcaccacccuggacagcaagacacagagccugcugaucgugaacaacgccaccaacguggugaucaaggugugcgaguuucaguucugcaacgaccccuuccugggcguguacuaccacaagaacaacaagagcuggauggagagcgaguuccgggucuacagcagcgcuaacaauugcaccuucgaguacgugagccagcccuuccugauggaccucgagggcaagcagggcaacuucaagaaccugcgggaguucguguucaagaacaucgauggcuacuucaagaucuacagcaagcacacccccaucaaccuggugcgggaccugccccagggauucagcgcccuggagccucugguggaccugcccaucggcaucaacaucaccagguuccagacccugcuggcccugcaccggagcuaccugacccccggcgacagcagcagcggcuggaccgccggcgccgccgcauacuacgugggcuaccugcagccacggaccuuccugcugaaguacaacgagaacggcaccaucaccgacgccguggacugcgcccuggacccccugagcgagaccaagugcacccuaaagagcuucaccguggagaagggcaucuaccagaccagcaacuuccgggugcagcccacugagagcaucgugcgguuccccaacauuaccaaccugugucccuucggcgagguguucaacgccacccgguucgccagcguguacgccuggaaccggaagcggaucagcaacugcguggccgacuacagcgugcuguacaacagcgccagcuucagcaccuucaagugcuacggcgugagcccuaccaagcugaacgaccugugcuucaccaacguguacgcugacagcuucgugauccggggcgacgaggugcggcagaucgcccccggccagaccggcaagaucgccgacuacaacuacaagcugcccgacgacuucaccggcugcgugaucgccuggaacagcaacaaccuggacagcaaggugggcggcaacuacaacuaccuguaccggcuguuccguaagagcaaccugaagccauucgagcgggacaucagcaccgagaucuaccaggccggcaacacccccugcaacgguguggagggcuuuaacugcuacuucccccugcagagcuacggcuuccagcccaccaacggcgugggcuaccagcccuaccgggugguggugcugagcuucgagcugcugcacgcccccgccaccgugugcggcccuaaaaagagcaccaaccuggugaagaacaagugcgugaauuucaacuucaacggccugaccggcaccggcgugcugaccgagagcaacaagaaguuccugcccuuccagcaguucggccgggauaucgccgacaccaccgacgcagugcgggacccccagacccuggagauccuggacaucaccccaugcagcuucggcggcgugagcgucaucacccccggcacaaacaccagcaaccagguggccgugcuguaccagggagugaacugcaccgaggugcccguggccauccacgccgaccagcugacccccaccuggcggguguacagcaccggcagcaacguguuccagacccgggccggcugccugaucggcgccgagcacgugaacaacagcuacgagugcgacauccccaucggcgcuggcaucugcgccuccuaccagacccagaccaacagcccccggcgggcccggagcguggccagccagagcaucaucgccuacaccaugagcuuaggcgccgagaacagcguggccuacagcaacaacagcaucgcgaucccuaccaacuucaccaucagcgugaccaccgagauacugcccgugagcaugaccaagaccagcguggacuguaccauguacaucugcggcgacagcaccgagugcagcaaccugcugcugcaguacggcagcuucugcacccagcugaaccgggcccugaccggcaucgccguggagcaggacaagaacacccaagagguguucgcccaggugaagcagaucuacaagacucccccaaucaaggacuucggcggcuucaacuucagccagauccugcccgaccccagcaagcccagcaagcggagcuucaucgaggaccugcuguucaacaaggugacccuggccgacgccggcuucaucaagcaguacggcgacugccugggggauaucgccgcucgggaccugaucugcgcccagaaguucaacggccugaccgugcugcccccucugcugaccgacgagaugaucgcccaguacaccagcgcccugcuugccggcaccaucaccagcggcuggaccuucggcgccggcgcagcccugcagauccccuucgccaugcagauggccuaccgguucaacggcaucggcgugacccagaacgugcuguacgagaaccagaagcugaucgccaaccaguucaacagcgccaucggcaagauccaggacagccugagcagcaccgccagcgcccugggcaagcugcaggacguggugaaccagaacgcucaggcccugaacacccuggugaagcagcugagcagcaauuucggcgccaucagcagcgugcugaacgacauccugucaaggcuggacaagguggaggccgaggugcagaucgaccggcugaucaccggccggcugcagagccugcagaccuacgugacccagcagcugauccgggccgccgagauccgggccagcgccaaccuggcagccaccaagaugagcgagugcgugcugggccagagcaagcggguggacuuuugcggcaagggcuaccaccugaugagcuucccccagagcgccccacacggcgugguguuccuccacgucacauacgugcccgcccaggagaagaacuucaccaccgcccccgccauuugccacgacggcaaggcucacuucccccgggagggaguguucgugagcaacggcacccacugguucgugacccagcggaacuucuacgagccccagaucaucaccaccgacaacaccuucgugagcggcaacugcgacguggugaucggcaucgugaacaacaccguguacgacccccugcagccugagcuggacagcuucaaggaggagcuggacaaguacuucaagaaccacaccagccccgacguggaucugggcgacaucagcggcaucaacgccagcguggugaacauccagaaggagaucgaccggcugaacgagguggccaagaaccugaacgagagccugaucgaccugcaggagcugggcaaguacgagcaguacaucaaguggcccugguacaucuggcugggcuucaucgccggccugaucgccaucgugauggugaccaucaugcugugcugcaugaccagcugcuguagcugccugaagggcugcugcagcugcggcagcugcugcaaguucgacgaggacgacagcgagccagugcugaagggcgugaagcugcacuacaccugaggacuagucccuguucccagagcccacuuuuuuuucuuuuuuugaaauaaaauagccugucuuucagaucucaaaggcucuuuucagagccaccaaaaaaaaaaaaaaaaaaaaaaaaaaaaaaaaaaaaaaaaaaaaaaaaaaaaaaaaaaaaaaaaaaaaaaaaaaaaaaaaaaaaaaaaaaaaaaaaaaaaa

SEQ ID NO: 23468 - RNA, 4094 nt, Artificial Sequence
  SARS-CoV-2/Wuhan/WIV05/2019__EPI_ISL_402128 spike protein mRNA gc (1-1273)(N501Y_D614G)
aggagagucccgcagucggcguccagcggcucugcuuguucgugugugugucguugcaggccuuauucaagcuuaccauguucguguuccuggugcugcugccccuggugagcagccagugcgugaaccugaccacccggacccagcugcccccugccuacaccaacagcuucacccggggcguguacuaccccgacaagguguuccggagcagcgugcugcacagcacccaggaccuguuccugcccuucuucagcaacgugaccugguuccacgccauccacgugagcggcaccaacggcaccaagcgguucgacaacccagugcugcccuucaacgacggcguguacuucgccagcaccgagaagucaaacaucauccggggcuggaucuucggcaccacccuggacagcaagacacagagccugcugaucgugaacaacgccaccaacguggugaucaaggugugcgaguuucaguucugcaacgaccccuuccugggcguguacuaccacaagaacaacaagagcuggauggagagcgaguuccgggucuacagcagcgcuaacaauugcaccuucgaguacgugagccagcccuuccugauggaccucgagggcaagcagggcaacuucaagaaccugcgggaguucguguucaagaacaucgauggcuacuucaagaucuacagcaagcacacccccaucaaccuggugcgggaccugccccagggauucagcgcccuggagccucugguggaccugcccaucggcaucaacaucaccagguuccagacccugcuggcccugcaccggagcuaccugacccccggcgacagcagcagcggcuggaccgccggcgccgccgcauacuacgugggcuaccugcagccacggaccuuccugcugaaguacaacgagaacggcaccaucaccgacgccguggacugcgcccuggacccccugagcgagaccaagugcacccuaaagagcuucaccguggagaagggcaucuaccagaccagcaacuuccgggugcagcccacugagagcaucgugcgguuccccaacauuaccaaccugugucccuucggcgagguguucaacgccacccgguucgccagcguguacgccuggaaccggaagcggaucagcaacugcguggccgacuacagcgugcuguacaacagcgccagcuucagcaccuucaagugcuacggcgugagcccuaccaagcugaacgaccugugcuucaccaacguguacgcugacagcuucgugauccggggcgacgaggugcggcagaucgcccccggccagaccggcaagaucgccgacuacaacuacaagcugcccgacgacuucaccggcugcgugaucgccuggaacagcaacaaccuggacagcaaggugggcggcaacuacaacuaccuguaccggcuguuccguaagagcaaccugaagccauucgagcgggacaucagcaccgagaucuaccaggccggcagcacccccugcaacgguguggagggcuuuaacugcuacuucccccugcagagcuacggcuuccagcccaccuacggcgugggcuaccagcccuaccgggugguggugcugagcuucgagcugcugcacgcccccgccaccgugugcggcccuaaaaagagcaccaaccuggugaagaacaagugcgugaacuucaacuucaauggccugaccggcaccggcgugcugaccgagagcaacaagaaguuccugcccuuccagcaguucggccgggauaucgccgacaccaccgacgcagugcgggacccccagacccuggagauccuggacaucaccccaugcagcuucggcggcgugagcgucaucacccccggcacaaacaccagcaaccagguggccgugcuguaccagggagugaacugcaccgaggugcccguggccauccacgccgaccagcugacccccaccuggcggguguacagcaccggcagcaacguguuccagacccgggccggcugccugaucggcgccgagcacgugaacaacuccuacgagugcgacauccccaucggcgcuggcaucugcgccagcuaccagacccagaccaacagcccccggcgggcccggagcguggccagccagagcaucaucgccuacaccaugagcuuaggcgccgagaacagcguggccuacagcaacaacagcaucgcgaucccuaccaacuucaccaucagcgugaccaccgagauacugcccgugagcaugaccaagaccagcguggacuguaccauguacaucugcggcgacagcaccgagugcagcaaccugcugcugcaguacggcagcuucugcacccagcugaaccgggcccugaccggcaucgccguggagcaggacaagaacacccaagagguguucgcccaggugaagcagaucuacaagacucccccaaucaaggacuucggcggcuucaacuucagccagauccugcccgaccccagcaagcccagcaagcggagcuucaucgaggaccugcuguucaacaaggugacccuggccgacgccggcuucaucaagcaguacggcgacugccugggggauaucgccgcucgggaccugaucugcgcccagaaguucaacggccugaccgugcugcccccucugcugaccgacgagaugaucgcccaguacaccagcgcccugcuugccggcaccaucaccagcggcuggaccuucggcgccggcgcagcccugcagauccccuucgccaugcagauggccuaccgguucaacggcaucggcgugacccagaacgugcuguacgagaaccagaagcugaucgccaaccaguucaacagcgccaucggcaagauccaggacagccugagcagcaccgccagcgcccugggcaagcugcaggacguggugaaccagaacgcucaggcccugaacacccuggugaagcagcugagcagcaacuucggcgccaucagcucagugcugaacgacauccugagcaggcuggacaagguggaggccgaggugcagaucgaccggcugaucaccggccggcugcagagccugcagaccuacgugacccagcagcugauccgggccgccgagauccgggccagcgccaaucuggcagccaccaagaugagcgagugcgugcugggccagagcaagcggguggacuuuugcggcaagggcuaccaccugaugagcuucccccagagcgccccacacggcgugguguuccuccacgucacauacgugcccgcccaggagaagaacuucaccaccgcccccgccauuugccacgacggcaaggcucacuucccccgggagggaguguucgugagcaacggcacccacugguucgugacccagcggaacuucuacgagccccagaucaucaccaccgacaacaccuucgugagcggcaacugcgacguggugaucggcaucgugaacaacaccguguacgacccccugcagccugagcuggacagcuucaaggaggagcuggacaaguacuucaagaaccacaccagccccgacguggaucugggcgacaucagcggcaucaacgccagcguggugaacauccagaaggagaucgaccggcugaacgagguggccaagaaccugaacgagagccugaucgaccugcaggagcugggcaaguacgagcaguacaucaaguggcccugguacaucuggcugggcuucaucgccggccugaucgccaucgugauggugaccaucaugcugugcugcaugaccagcugcuguagcugccugaagggcugcugcagcugcggcagcugcugcaaguucgacgaggacgacagcgagccagugcugaagggcgugaagcugcacuacaccugaggacuagucccuguucccagagcccacuuuuuuuucuuuuuuugaaauaaaauagccugucuuucagaucucaaaggcucuuuucagagccaccaaaaaaaaaaaaaaaaaaaaaaaaaaaaaaaaaaaaaaaaaaaaaaaaaaaaaaaaaaaaaaaaaaaaaaaaaaaaaaaaaaaaaaaaaaaaaaaaaaaaa

SEQ ID NO: 23469 - RNA, 4088 nt, Artificial Sequence
  SARS-CoV-2/Wuhan/WIV05/2019__EPI_ISL_402128 spike protein mRNA gc (1-1273)(H69del_V70del_D614G)
aggagagucccgcagucggcguccagcggcucugcuuguucgugugugugucguugcaggccuuauucaagcuuaccauguucguguuccuggugcugcugccccuggugagcagccagugcgugaaccugaccacccggacccagcugcccccugccuacaccaacagcuucacccggggcguguacuaccccgacaagguguuccggagcagcgugcugcacagcacccaggaccuguuccugcccuucuucagcaacgugaccugguuccacgccaucagcggcaccaacggcaccaagcgguucgacaacccagugcugcccuucaacgacggcguguacuucgccagcaccgagaagucaaacaucauccggggcuggaucuucggcaccacccuggacagcaagacacagagccugcugaucgugaacaacgccaccaacguggugaucaaggugugcgaguuucaguucugcaacgaccccuuccugggcguguacuaccacaagaacaacaagagcuggauggagagcgaguuccggguguacagcagcgcuaacaauugcaccuucgaguacgucagccagcccuuccugauggaccucgagggcaagcagggcaacuucaagaaccugcgggaguucguguucaagaacaucgauggcuacuucaagaucuacagcaagcacacccccaucaaccuggugcgggaccugccccagggauucagcgcccuggagccucugguggaccugcccaucggcaucaacaucaccagguuccagacccugcuggcccugcaccggagcuaccugacccccggcgacagcagcagcggcuggaccgccggcgccgccgcauacuacgugggcuaccugcagccacggaccuuccugcugaaguacaacgagaacggcaccaucaccgacgccguggacugcgcccuggacccccugagcgagaccaagugcacccuaaagagcuucaccguggagaagggcaucuaccagaccagcaacuuccgggugcagcccacugagagcaucgugcgguuccccaacauuaccaaccugugucccuucggcgagguguucaacgccacccgguucgccagcguguacgccuggaaccggaagcggaucagcaacugcguggccgacuacagcgugcuguacaacagcgccagcuucagcaccuucaagugcuacggcgugagcccuaccaagcugaacgaccugugcuucaccaacguguacgcugacagcuucgugauccggggcgacgaggugcggcagaucgcccccggccagaccggcaagaucgccgacuacaacuacaagcugcccgacgacuucaccggcugcgugaucgccuggaacagcaacaaccuggacagcaaggugggcggcaacuacaacuaccuguaccggcuguuccguaagagcaaccugaagccauucgagcgggacaucagcaccgagaucuaccaggccggcagcacccccugcaacgguguggagggcuuuaacugcuacuucccccugcagagcuacggcuuccagcccaccaacggcgugggcuaccagcccuaccgggugguggugcugagcuucgagcugcugcacgcccccgccaccgugugcggcccuaaaaagagcaccaaccuggugaagaacaagugcgugaacuucaauuucaacggccugaccggcaccggcgugcugaccgagagcaacaagaaguuccugcccuuccagcaguucggccgggauaucgccgacaccaccgacgcagugcgggacccccagacccuggagauccuggacaucaccccaugcagcuucggcggcgugagcgugaucacccccggcacaaacaccagcaaccaggucgccgugcuguaccagggagugaacugcaccgaggugcccguggccauccacgccgaccagcugacccccaccuggcggguguacagcaccggcagcaacguguuccagacccgggccggcugccugaucggcgccgagcacgugaacaacuccuacgagugcgacauccccaucggcgcuggcaucugcgccagcuaccagacccagaccaacagcccccggcgggcccggagcguggccagccagagcaucaucgccuacaccaugagcuuaggcgccgagaacagcguggccuacagcaacaacagcaucgcgaucccuaccaacuucaccaucagcgugaccaccgagauacugcccgugagcaugaccaagaccagcguggacuguaccauguacaucugcggcgacagcaccgagugcagcaaccugcugcugcaguacggcagcuucugcacccagcugaaccgggcccugaccggcaucgccguggagcaggacaagaacacccaagagguguucgcccaggugaagcagaucuacaagacucccccaaucaaggacuucggcggcuucaacuucagccagauccugcccgaccccagcaagcccagcaagcggagcuucaucgaggaccugcuguucaacaaggugacccuggccgacgccggcuucaucaagcaguacggcgacugccugggggauaucgccgcucgggaccugaucugcgcccagaaguucaacggccugaccgugcugcccccucugcugaccgacgagaugaucgcccaguacaccagcgcccugcuugccggcaccaucaccagcggcuggaccuucggcgccggcgcagcccugcagauccccuucgccaugcagauggccuaccgguucaacggcaucggcgugacccagaacgugcuguacgagaaccagaagcugaucgccaaccaguucaacagcgccaucggcaagauccaggacagccugagcagcaccgccagcgcccugggcaagcugcaggacguggugaaccagaacgcucaggcccugaacacccuggugaagcagcugagcagcaacuucggcgccaucagcucagugcugaaugacauccugagcaggcuggacaagguggaggccgaggugcagaucgaccggcugaucaccggccggcugcagagccugcagaccuacgugacccagcagcugauccgggccgccgagauccgggccagcgccaaccuggcagccaccaagaugagcgagugcgugcugggccagagcaagcggguggacuuuugcggcaagggcuaccaccugaugagcuucccccagagcgccccacacggcgugguguuccuccacgugacauacguccccgcccaggagaagaacuucaccaccgcccccgccauuugccacgacggcaaggcucacuucccccgggagggaguguucgugagcaacggcacccacugguucgugacccagcggaacuucuacgagccccagaucaucaccaccgacaacaccuucgugagcggcaacugcgacguggugaucggcaucgugaacaacaccguguacgacccccugcagccugagcuggacagcuucaaggaggagcuggacaaguacuucaagaaccacaccagccccgacguggaucugggcgacaucagcggcaucaacgccagcguggugaacauccagaaggagaucgaccggcugaacgagguggccaagaaccugaacgagagccugaucgaccugcaggagcugggcaaguacgagcaguacaucaaguggcccugguacaucuggcugggcuucaucgccggccugaucgccaucgugauggugaccaucaugcugugcugcaugaccagcugcuguagcugccugaagggcugcugcagcugcggcagcugcugcaaguucgacgaggacgacagcgagccagugcugaagggcgugaagcugcacuacaccugaggacuagucccuguucccagagcccacuuuuuuuucuuuuuuugaaauaaaauagccugucuuucagaucucaaaggcucuuuucagagccaccaaaaaaaaaaaaaaaaaaaaaaaaaaaaaaaaaaaaaaaaaaaaaaaaaaaaaaaaaaaaaaaaaaaaaaaaaaaaaaaaaaaaaaaaaaaaaaaaaaaaa

SEQ ID NO: 23470 - RNA, 4094 nt, Artificial Sequence
  SARS-CoV-2/Wuhan/WIV05/2019__EPI_ISL_402128 spike protein mRNA gc (1-1273)(Y453F_D614G)
aggagagucccgcagucggcguccagcggcucugcuuguucgugugugugucguugcaggccuuauucaagcuuaccauguucguguuccuggugcugcugccccuggugagcagccagugcgugaaccugaccacccggacccagcugcccccugccuacaccaacagcuucacccggggcguguacuaccccgacaagguguuccggagcagcgugcugcacagcacccaggaccuguuccugcccuucuucagcaacgugaccugguuccacgccauccacgugagcggcaccaacggcaccaagcgguucgacaacccagugcugcccuucaacgacggcguguacuucgccagcaccgagaagucaaacaucauccggggcuggaucuucggcaccacccuggacagcaagacacagagccugcugaucgugaacaacgccaccaacguggugaucaaggugugcgaguuucaguucugcaacgaccccuuccugggcguguacuaccacaagaacaacaagagcuggauggagagcgaguuccgggucuacagcagcgcuaacaauugcaccuucgaguacgugagccagcccuuccugauggaccucgagggcaagcagggcaacuucaagaaccugcgggaguucguguucaagaacaucgauggcuacuucaagaucuacagcaagcacacccccaucaaccuggugcgggaccugccccagggauucagcgcccuggagccucugguggaccugcccaucggcaucaacaucaccagguuccagacccugcuggcccugcaccggagcuaccugacccccggcgacagcagcagcggcuggaccgccggcgccgccgcauacuacgugggcuaccugcagccacggaccuuccugcugaaguacaacgagaacggcaccaucaccgacgccguggacugcgcccuggacccccugagcgagaccaagugcacccuaaagagcuucaccguggagaagggcaucuaccagaccagcaacuuccgggugcagcccacugagagcaucgugcgguuccccaacauuaccaaccugugucccuucggcgagguguucaacgccacccgguucgccagcguguacgccuggaaccggaagcggaucagcaacugcguggccgacuacagcgugcuguacaacagcgccagcuucagcaccuucaagugcuacggcgugagcccuaccaagcugaacgaccugugcuucaccaacguguacgcugacagcuucgugauccggggcgacgaggugcggcagaucgcccccggccagaccggcaagaucgccgacuacaacuacaagcugcccgacgacuucaccggcugcgugaucgccuggaacagcaacaaccuggacagcaaggugggcggcaacuacaacuaccuguuccggcuguuccguaagagcaaccugaagccauuugagcgggacaucagcaccgagaucuaccaggccggcagcacccccugcaacgguguggagggcuucaacugcuacuucccccugcagagcuacggcuuccagcccaccaacggcgugggcuaccagcccuaccgggugguggugcugagcuucgagcugcugcacgcccccgccaccgugugcggcccuaaaaagagcaccaaccuggugaagaacaagugcgugaacuucaauuucaacggccugaccggcaccggcgugcugaccgagagcaacaagaaguuccugcccuuccagcaguucggccgggauaucgccgacaccaccgacgcagugcgggacccccagacccuggagauccuggacaucaccccaugcagcuucggcggcgugagcgucaucacccccggcacaaacaccagcaaccagguggccgugcuguaccagggagugaacugcaccgaggugcccguggccauccacgccgaccagcugacccccaccuggcggguguacagcaccggcagcaacguguuccagacccgggccggcugccugaucggcgccgagcacgugaacaacuccuacgagugcgacauccccaucggcgcuggcaucugcgccagcuaccagacccagaccaacagcccccggcgggcccggagcguggccagccagagcaucaucgccuacaccaugagcuuaggcgccgagaacagcguggccuacagcaacaacagcaucgcgaucccuaccaacuucaccaucagcgugaccaccgagauacugcccgugagcaugaccaagaccagcguggacuguaccauguacaucugcggcgacagcaccgagugcagcaaccugcugcugcaguacggcagcuucugcacccagcugaaccgggcccugaccggcaucgccguggagcaggacaagaacacccaagagguguucgcccaggugaagcagaucuacaagacucccccaaucaaggacuucggcggcuucaacuucagccagauccugcccgaccccagcaagcccagcaagcggagcuucaucgaggaccugcuguucaacaaggugacccuggccgacgccggcuucaucaagcaguacggcgacugccugggggauaucgccgcucgggaccugaucugcgcccagaaguucaacggccugaccgugcugcccccucugcugaccgacgagaugaucgcccaguacaccagcgcccugcuugccggcaccaucaccagcggcuggaccuucggcgccggcgcagcccugcagauccccuucgccaugcagauggccuaccgguucaacggcaucggcgugacccagaacgugcuguacgagaaccagaagcugaucgccaaccaguucaacagcgccaucggcaagauccaggacagccugagcagcaccgccagcgcccugggcaagcugcaggacguggugaaccagaacgcucaggcccugaacacccuggugaagcagcugagcagcaacuuuggcgccaucagcucagugcugaaugacauccugagcaggcuggacaagguggaggccgaggugcagaucgaccggcugaucaccggccggcugcagagccugcagaccuacgugacccagcagcugauccgggccgccgagauccgggccagcgccaaccuggcagccaccaagaugagcgagugcgugcugggccagagcaagcggguggacuucugcggcaagggcuaccaccugaugagcuucccccagagcgccccacacggcgugguguuccuccacgucacauacgugcccgcccaggagaagaacuucaccaccgcccccgccauuugccacgacggcaaggcucacuucccccgggagggaguguucgugagcaacggcacccacugguucgugacccagcggaacuucuacgagccccagaucaucaccaccgacaacaccuucgugagcggcaacugcgacguggugaucggcaucgugaacaacaccguguacgacccccugcagccugagcuggacagcuucaaggaggagcuggacaaguacuucaagaaccacaccagccccgacguggaucugggcgacaucagcggcaucaacgccagcguggugaacauccagaaggagaucgaccggcugaacgagguggccaagaaccugaacgagagccugaucgaccugcaggagcugggcaaguacgagcaguacaucaaguggcccugguacaucuggcugggcuucaucgccggccugaucgccaucgugauggugaccaucaugcugugcugcaugaccagcugcuguagcugccugaagggcugcugcagcugcggcagcugcugcaaguucgacgaggacgacagcgagccagugcugaagggcgugaagcugcacuacaccugaggacuagucccuguucccagagcccacuuuuuuuucuuuuuuugaaauaaaauagccugucuuucagaucucaaaggcucuuuucagagccaccaaaaaaaaaaaaaaaaaaaaaaaaaaaaaaaaaaaaaaaaaaaaaaaaaaaaaaaaaaaaaaaaaaaaaaaaaaaaaaaaaaaaaaaaaaaaaaaaaaaaa

SEQ ID NO: 23471 - RNA, 4094 nt, Artificial Sequence
  SARS-CoV-2/Wuhan/WIV05/2019__EPI_ISL_402128 spike protein mRNA gc (1-1273)(D614G_I692V)
aggagagucccgcagucggcguccagcggcucugcuuguucgugugugugucguugcaggccuuauucaagcuuaccauguucguguuccuggugcugcugccccuggugagcagccagugcgugaaccugaccacccggacccagcugcccccugccuacaccaacagcuucacccggggcguguacuaccccgacaagguguuccggagcagcgugcugcacagcacccaggaccuguuccugcccuucuucagcaacgugaccugguuccacgccauccacgugagcggcaccaacggcaccaagcgguucgacaacccagugcugcccuucaacgacggcguguacuucgccagcaccgagaagucaaacaucauccggggcuggaucuucggcaccacccuggacagcaagacacagagccugcugaucgugaacaacgccaccaacguggugaucaaggugugcgaguuucaguucugcaacgaccccuuccugggcguguacuaccacaagaacaacaagagcuggauggagagcgaguuccgggucuacagcagcgcuaacaauugcaccuucgaguacgugagccagcccuuccugauggaccucgagggcaagcagggcaacuucaagaaccugcgggaguucguguucaagaacaucgauggcuacuucaagaucuacagcaagcacacccccaucaaccuggugcgggaccugccccagggauucagcgcccuggagccucugguggaccugcccaucggcaucaacaucaccagguuccagacccugcuggcccugcaccggagcuaccugacccccggcgacagcagcagcggcuggaccgccggcgccgccgcauacuacgugggcuaccugcagccacggaccuuccugcugaaguacaacgagaacggcaccaucaccgacgccguggacugcgcccuggacccccugagcgagaccaagugcacccuaaagagcuucaccguggagaagggcaucuaccagaccagcaacuuccgggugcagcccacugagagcaucgugcgguuccccaacauuaccaaccugugucccuucggcgagguguucaacgccacccgguucgccagcguguacgccuggaaccggaagcggaucagcaacugcguggccgacuacagcgugcuguacaacagcgccagcuucagcaccuucaagugcuacggcgugagcccuaccaagcugaacgaccugugcuucaccaacguguacgcugacagcuucgugauccggggcgacgaggugcggcagaucgcccccggccagaccggcaagaucgccgacuacaacuacaagcugcccgacgacuucaccggcugcgugaucgccuggaacagcaacaaccuggacagcaaggugggcggcaacuacaacuaccuguaccggcuguuccguaagagcaaccugaagccauucgagcgggacaucagcaccgagaucuaccaggccggcagcacccccugcaacgguguggagggcuuuaacugcuacuucccccugcagagcuacggcuuccagcccaccaacggcgugggcuaccagcccuaccgggugguggugcugagcuucgagcugcugcacgcccccgccaccgugugcggcccuaaaaagagcaccaaccuggugaagaacaagugcgugaacuucaauuucaacggccugaccggcaccggcgugcugaccgagagcaacaagaaguuccugcccuuccagcaguucggccgggauaucgccgacaccaccgacgcagugcgggacccccagacccuggagauccuggacaucaccccaugcagcuucggcggcgugagcgucaucacccccggcacaaacaccagcaaccagguggccgugcuguaccagggagugaacugcaccgaggugcccguggccauccacgccgaccagcugacccccaccuggcggguguacagcaccggcagcaacguguuccagacccgggccggcugccugaucggcgccgagcacgugaacaacuccuacgagugcgacauccccaucggcgcuggcaucugcgccagcuaccagacccagaccaacagcccccggcgggcccggagcguggccagccagagcgugaucgccuacaccaugagcuuaggcgccgagaacagcguggccuacagcaacaacagcaucgcgaucccuaccaacuucaccaucagcgugaccaccgagauccugcccgugagcaugaccaagaccagcguggacuguaccauguacauaugcggcgacagcaccgagugcagcaaccugcugcugcaguacggcagcuucugcacccagcugaaccgggcccugaccggcaucgccguggagcaggacaagaacacccaagagguguucgcccaggugaagcagaucuacaagacucccccaaucaaggacuucggcggcuucaacuucagccagauccugcccgaccccagcaagcccagcaagcggagcuucaucgaggaccugcuguucaacaaggugacccuggccgacgccggcuucaucaagcaguacggcgacugccugggggauaucgccgcucgggaccugaucugcgcccagaaguucaacggccugaccgugcugcccccucugcugaccgacgagaugaucgcccaguacaccagcgcccugcuugccggcaccaucaccagcggcuggaccuucggcgccggcgcagcccugcagauccccuucgccaugcagauggccuaccgguucaacggcaucggcgugacccagaacgugcuguacgagaaccagaagcugaucgccaaccaguucaacagcgccaucggcaagauccaggacagccugagcagcaccgccagcgcccugggcaagcugcaggacguggugaaccagaacgcucaggcccugaacacccuggugaagcagcugagcagcaacuucggcgccaucagcucagugcugaaugacauccugagcaggcuggacaagguggaggccgaggugcagaucgaccggcugaucaccggccggcugcagagccugcagaccuacgugacccagcagcugauccgggccgccgagauccgggccagcgccaaccuggcagccaccaagaugagcgagugcgugcugggccagagcaagcggguggacuuuugcggcaagggcuaccaccugaugagcuucccccagagcgccccacacggcguggucuuccuccacgugacauacgugcccgcccaggagaagaacuucaccaccgcccccgccaucugccacgacggcaaggcucacuucccccgggagggaguguucgugagcaacggcacccacugguucgugacccagcggaacuucuacgagccccagauuaucaccaccgacaacaccuucgugagcggcaacugcgacguggugaucggcaucgugaacaacaccguguacgacccccugcagccugagcuggacagcuucaaggaggagcuggacaaguacuucaagaaccacaccagccccgacguggaucugggcgacaucagcggcaucaacgccagcguggugaacauccagaaggagaucgaccggcugaacgagguggccaagaaccugaacgagagccugaucgaccugcaggagcugggcaaguacgagcaguacaucaaguggcccugguacaucuggcugggcuucaucgccggccugaucgccaucgugauggugaccaucaugcugugcugcaugaccagcugcuguagcugccugaagggcugcugcagcugcggcagcugcugcaaguucgacgaggacgacagcgagccagugcugaagggcgugaagcugcacuacaccugaggacuagucccuguucccagagcccacuuuuuuuucuuuuuuugaaauaaaauagccugucuuucagaucucaaaggcucuuuucagagccaccaaaaaaaaaaaaaaaaaaaaaaaaaaaaaaaaaaaaaaaaaaaaaaaaaaaaaaaaaaaaaaaaaaaaaaaaaaaaaaaaaaaaaaaaaaaaaaaaaaaaa

SEQ ID NO: 23472 - RNA, 4094 nt, Artificial Sequence
  SARS-CoV-2/Wuhan/WIV05/2019__EPI_ISL_402128 spike protein mRNA gc (1-1273)(D614G_M1229I)
aggagagucccgcagucggcguccagcggcucugcuuguucgugugugugucguugcaggccuuauucaagcuuaccauguucguguuccuggugcugcugccccuggugagcagccagugcgugaaccugaccacccggacccagcugcccccugccuacaccaacagcuucacccggggcguguacuaccccgacaagguguuccggagcagcgugcugcacagcacccaggaccuguuccugcccuucuucagcaacgugaccugguuccacgccauccacgugagcggcaccaacggcaccaagcgguucgacaacccagugcugcccuucaacgacggcguguacuucgccagcaccgagaagucaaacaucauccggggcuggaucuucggcaccacccuggacagcaagacacagagccugcugaucgugaacaacgccaccaacguggugaucaaggugugcgaguuucaguucugcaacgaccccuuccugggcguguacuaccacaagaacaacaagagcuggauggagagcgaguuccgggucuacagcagcgcuaacaauugcaccuucgaguacgugagccagcccuuccugauggaccucgagggcaagcagggcaacuucaagaaccugcgggaguucguguucaagaacaucgauggcuacuucaagaucuacagcaagcacacccccaucaaccuggugcgggaccugccccagggauucagcgcccuggagccucugguggaccugcccaucggcaucaacaucaccagguuccagacccugcuggcccugcaccggagcuaccugacccccggcgacagcagcagcggcuggaccgccggcgccgccgcauacuacgugggcuaccugcagccacggaccuuccugcugaaguacaacgagaacggcaccaucaccgacgccguggacugcgcccuggacccccugagcgagaccaagugcacccuaaagagcuucaccguggagaagggcaucuaccagaccagcaacuuccgggugcagcccacugagagcaucgugcgguuccccaacauuaccaaccugugucccuucggcgagguguucaacgccacccgguucgccagcguguacgccuggaaccggaagcggaucagcaacugcguggccgacuacagcgugcuguacaacagcgccagcuucagcaccuucaagugcuacggcgugagcccuaccaagcugaacgaccugugcuucaccaacguguacgcugacagcuucgugauccggggcgacgaggugcggcagaucgcccccggccagaccggcaagaucgccgacuacaacuacaagcugcccgacgacuucaccggcugcgugaucgccuggaacagcaacaaccuggacagcaaggugggcggcaacuacaacuaccuguaccggcuguuccguaagagcaaccugaagccauucgagcgggacaucagcaccgagaucuaccaggccggcagcacccccugcaacgguguggagggcuuuaacugcuacuucccccugcagagcuacggcuuccagcccaccaacggcgugggcuaccagcccuaccgggugguggugcugagcuucgagcugcugcacgcccccgccaccgugugcggcccuaaaaagagcaccaaccuggugaagaacaagugcgugaacuucaauuucaacggccugaccggcaccggcgugcugaccgagagcaacaagaaguuccugcccuuccagcaguucggccgggauaucgccgacaccaccgacgcagugcgggacccccagacccuggagauccuggacaucaccccaugcagcuucggcggcgugagcgucaucacccccggcacaaacaccagcaaccagguggccgugcuguaccagggagugaacugcaccgaggugcccguggccauccacgccgaccagcugacccccaccuggcggguguacagcaccggcagcaacguguuccagacccgggccggcugccugaucggcgccgagcacgugaacaacuccuacgagugcgacauccccaucggcgcuggcaucugcgccagcuaccagacccagaccaacagcccccggcgggcccggagcguggccagccagagcaucaucgccuacaccaugagcuuaggcgccgagaacagcguggccuacagcaacaacagcaucgcgaucccuaccaacuucaccaucagcgugaccaccgagauacugcccgugagcaugaccaagaccagcguggacuguaccauguacaucugcggcgacagcaccgagugcagcaaccugcugcugcaguacggcagcuucugcacccagcugaaccgggcccugaccggcaucgccguggagcaggacaagaacacccaagagguguucgcccaggugaagcagaucuacaagacucccccaaucaaggacuucggcggcuucaacuucagccagauccugcccgaccccagcaagcccagcaagcggagcuucaucgaggaccugcuguucaacaaggugacccuggccgacgccggcuucaucaagcaguacggcgacugccugggggauaucgccgcucgggaccugaucugcgcccagaaguucaacggccugaccgugcugcccccucugcugaccgacgagaugaucgcccaguacaccagcgcccugcuugccggcaccaucaccagcggcuggaccuucggcgccggcgcagcccugcagauccccuucgccaugcagauggccuaccgguucaacggcaucggcgugacccagaacgugcuguacgagaaccagaagcugaucgccaaccaguucaacagcgccaucggcaagauccaggacagccugagcagcaccgccagcgcccugggcaagcugcaggacguggugaaccagaacgcucaggcccugaacacccuggugaagcagcugagcagcaacuucggcgccaucagcucagugcugaaugacauccugagcaggcuggacaagguggaggccgaggugcagaucgaccggcugaucaccggccggcugcagagccugcagaccuacgugacccagcagcugauccgggccgccgagauccgggccagcgccaaccuggcagccaccaagaugagcgagugcgugcugggccagagcaagcggguggacuuuugcggcaagggcuaccaccugaugagcuucccccagagcgccccacacggcgugguguuccuccacgucacauacgugcccgcccaggagaagaacuucaccaccgcccccgccauuugccacgacggcaaggcucacuucccccgggagggaguguucgugagcaacggcacccacugguucgugacccagcggaacuucuacgagccccagaucaucaccaccgacaacaccuucgugagcggcaacugcgacguggugaucggcaucgugaacaacaccguguacgacccccugcagccugagcuggacagcuucaaggaggagcuggacaaguacuucaagaaccacaccagccccgacguggaucugggcgacaucagcggcaucaacgccagcguggugaacauccagaaggagaucgaccggcugaacgagguggccaagaaccugaacgagagccugaucgaccugcaggagcugggcaaguacgagcaguacaucaaguggcccugguacaucuggcugggcuucaucgccggccugaucgccaucgugaucgugaccaucaugcugugcugcaugaccagcugcuguagcugccugaagggcugcugcagcugcggcagcugcugcaaguucgacgaggacgacagcgagccagugcugaagggcgugaagcugcacuacaccugaggacuagucccuguucccagagcccacuuuuuuuucuuuuuuugaaauaaaauagccugucuuucagaucucaaaggcucuuuucagagccaccaaaaaaaaaaaaaaaaaaaaaaaaaaaaaaaaaaaaaaaaaaaaaaaaaaaaaaaaaaaaaaaaaaaaaaaaaaaaaaaaaaaaaaaaaaaaaaaaaaaaa

SEQ ID NO: 23473 - RNA, 4088 nt, Artificial Sequence
  SARS-CoV-2/Wuhan/WIV05/2019__EPI_ISL_402128 spike protein mRNA gc (1-1273)(H69del_V70del_A222V_Y453F_S477N_D614G_I692V)
aggagagucccgcagucggcguccagcggcucugcuuguucgugugugugucguugcaggccuuauucaagcuuaccauguucguguuccuggugcugcugccccuggugagcagccagugcgugaaccugaccacccggacccagcugcccccugccuacaccaacagcuucacccggggcguguacuaccccgacaagguguuccggagcagcgugcugcacagcacccaggaccuguuccugcccuucuucagcaacgugaccugguuccacgccaucagcggcaccaacggcaccaagcgguucgacaacccagugcugcccuucaacgacggcguguacuucgccagcaccgagaagucaaacaucauccggggcuggaucuucggcaccacccuggacagcaagacacagagccugcugaucgugaacaacgccaccaacguggugaucaaggugugcgaguuucaguucugcaacgaccccuuccugggcguguacuaccacaagaacaacaagagcuggauggagagcgaguuccggguguacagcagcgcuaacaauugcaccuucgaguacgucagccagcccuuccugauggaccucgagggcaagcagggcaacuucaagaaccugcgggaguucguguucaagaacaucgauggcuacuucaagaucuacagcaagcacacccccaucaaccuggugcgggaccugccccagggauucagcgugcuggagccucugguggaccugcccaucggcaucaacaucaccagguuccagacccugcuggcccugcaccggagcuaccugacccccggcgacagcagcagcggcuggaccgccggcgccgccgccuacuacgugggcuaccugcagccacggaccuuccugcugaaguacaacgagaacggcaccaucaccgacgcaguggacugcgcccuggacccccugagcgagaccaagugcacccuaaagagcuucaccguggagaagggcaucuaccagaccagcaacuuccgggugcagcccacugagagcaucgugcgguuccccaacauuaccaaccugugucccuucggcgagguguucaacgccacccgguucgccagcguguacgccuggaaccggaagcggaucagcaacugcguggccgacuacagcgugcuguacaacagcgccagcuucagcaccuucaagugcuacggcgugagcccuaccaagcugaacgaccugugcuucaccaacguguacgccgacagcuucgugauccggggcgacgaggugcggcagaucgcucccggccagaccggcaagaucgccgacuacaacuacaagcugcccgacgacuucaccggcugcgugaucgccuggaacagcaacaaccuggacagcaaggugggcggcaacuacaacuaccuguuccggcuguuccguaagagcaaccugaagccauuugagcgggacaucagcaccgagaucuaccaggccggcaacacccccugcaacgguguggagggcuucaacugcuacuucccccugcagagcuacggcuuccagcccaccaacggcgugggcuaccagcccuaccgggugguggugcugagcuucgagcugcugcacgcccccgccaccgugugcggcccuaaaaagagcaccaaccuggugaagaacaagugcgugaauuucaacuucaacggccugaccggcaccggcgugcugaccgagagcaacaagaaguuccugcccuuccagcaguucggccgggauaucgccgacaccaccgacgccgugcgggacccccagacccuggagauccuggacaucaccccaugcagcuucggcggcgugagcgucaucacccccggcacaaacaccagcaaccagguggcagugcuguaccagggagugaacugcaccgaggugcccguggccauccacgccgaccagcugacccccaccuggcggguguacagcaccggcagcaacguguuccagacccgggccggcugccugaucggcgccgagcacgugaacaacagcuacgagugcgacauccccaucggcgccggcaucugcgcuuccuaccagacccagaccaacagcccccggcgggcccggagcguggccagccagagcgugaucgccuacaccaugagcuuaggcgccgagaacagcguggccuacagcaacaacagcaucgccaucccuaccaacuucaccaucagcgugaccaccgagauccugcccgugagcaugaccaagaccagcguggacuguaccauguacauaugcggcgacagcaccgagugcagcaaccugcugcugcaguacggcagcuucugcacccagcugaaccgggcgcugaccggcaucgccguggagcaggacaagaacacccaagagguguucgcccaggugaagcagaucuacaagacucccccaaucaaggacuucggcggcuucaacuucagccagauccugcccgaccccagcaagcccagcaagcggagcuucaucgaggaccugcuguucaacaaggugacccuggccgacgccggcuucaucaagcaguacggcgacugccugggggauaucgccgcccgggaccugaucugcgcucagaaguucaacggccugaccgugcugcccccucugcugaccgacgagaugaucgcccaguacaccagcgcccugcuugccggcaccaucaccagcggcuggaccuucggcgccggcgccgcacugcagauccccuucgccaugcagauggccuaccgguucaacggcaucggcgugacccagaacgugcuguacgagaaccagaagcugaucgccaaccaguucaacagcgccaucggcaagauccaggacagccugagcagcaccgccagcgcccugggcaagcugcaggacguggugaaccagaacgcccaggcucugaacacccuggugaagcagcugagcagcaauuuuggcgccaucagcagcgugcugaacgacauccugucaaggcuggacaagguggaggccgaggugcagaucgaccggcugaucaccggccggcugcagagccugcagaccuacgugacccagcagcugauccgggccgccgagauccgggccagcgccaaccuggccgcaaccaagaugagcgagugcgugcugggccagagcaagcggguggacuucugcggcaagggcuaccaccugaugagcuucccccagagcgccccacacggcguggucuuccuccacgugacauacgugcccgcccaggagaagaacuucaccaccgcccccgccaucugccacgacggcaaggcccacuucccccgggagggaguguucgugagcaacggcacccacugguucgugacccagcggaacuucuacgagccccagauuaucaccaccgacaacaccuucgugagcggcaacugcgacguggugaucggcaucgugaacaacaccguguacgacccccugcagccugagcuggacagcuucaaggaggagcuggacaaguacuucaagaaccacaccagccccgacguggaucugggcgacaucagcggcaucaacgcuagcguggugaacauccagaaggagaucgaccggcugaacgagguggccaagaaccugaacgagagccugaucgaccugcaggagcugggcaaguacgagcaguacaucaaguggcccugguacaucuggcugggcuucaucgccggccugaucgccaucgugauggugaccaucaugcugugcugcaugaccagcugcuguagcugccugaagggcugcugcagcugcggcagcugcugcaaguucgacgaggacgacagcgagccagugcugaagggcgugaagcugcacuacaccugaggacuagucccuguucccagagcccacuuuuuuuucuuuuuuugaaauaaaauagccugucuuucagaucucaaaggcucuuuucagagccaccaaaaaaaaaaaaaaaaaaaaaaaaaaaaaaaaaaaaaaaaaaaaaaaaaaaaaaaaaaaaaaaaaaaaaaaaaaaaaaaaaaaaaaaaaaaaaaaaaaaaa

SEQ ID NO: 23474 - RNA, 4088 nt, Artificial Sequence
  SARS-CoV-2/Wuhan/WIV05/2019__EPI_ISL_402128 spike protein mRNA gc (1-1273)(H69del_V70del_Y453F_D614G_I692V_M1229I)
aggagagucccgcagucggcguccagcggcucugcuuguucgugugugugucguugcaggccuuauucaagcuuaccauguucguguuccuggugcugcugccccuggugagcagccagugcgugaaccugaccacccggacccagcugcccccugccuacaccaacagcuucacccggggcguguacuaccccgacaagguguuccggagcagcgugcugcacagcacccaggaccuguuccugcccuucuucagcaacgugaccugguuccacgccaucagcggcaccaacggcaccaagcgguucgacaacccagugcugcccuucaacgacggcguguacuucgccagcaccgagaagucaaacaucauccggggcuggaucuucggcaccacccuggacagcaagacacagagccugcugaucgugaacaacgccaccaacguggugaucaaggugugcgaguuucaguucugcaacgaccccuuccugggcguguacuaccacaagaacaacaagagcuggauggagagcgaguuccggguguacagcagcgcuaacaauugcaccuucgaguacgucagccagcccuuccugauggaccucgagggcaagcagggcaacuucaagaaccugcgggaguucguguucaagaacaucgauggcuacuucaagaucuacagcaagcacacccccaucaaccuggugcgggaccugccccagggauucagcgcccuggagccucugguggaccugcccaucggcaucaacaucaccagguuccagacccugcuggcccugcaccggagcuaccugacccccggcgacagcagcagcggcuggaccgccggcgccgccgcauacuacgugggcuaccugcagccacggaccuuccugcugaaguacaacgagaacggcaccaucaccgacgccguggacugcgcccuggacccccugagcgagaccaagugcacccuaaagagcuucaccguggagaagggcaucuaccagaccagcaacuuccgggugcagcccacugagagcaucgugcgguuccccaacauuaccaaccugugucccuucggcgagguguucaacgccacccgguucgccagcguguacgccuggaaccggaagcggaucagcaacugcguggccgacuacagcgugcuguacaacagcgccagcuucagcaccuucaagugcuacggcgugagcccuaccaagcugaacgaccugugcuucaccaacguguacgcugacagcuucgugauccggggcgacgaggugcggcagaucgcccccggccagaccggcaagaucgccgacuacaacuacaagcugcccgacgacuucaccggcugcgugaucgccuggaacagcaacaaccuggacagcaaggugggcggcaacuacaacuaccuguuccggcuguuccguaagagcaaccugaagccauuugagcgggacaucagcaccgagaucuaccaggccggcagcacccccugcaacgguguggagggcuucaacugcuacuucccccugcagagcuacggcuuccagcccaccaacggcgugggcuaccagcccuaccgggugguggugcugagcuucgagcugcugcacgcccccgccaccgugugcggcccuaaaaagagcaccaaccuggugaagaacaagugcgugaacuucaauuucaacggccugaccggcaccggcgugcugaccgagagcaacaagaaguuccugcccuuccagcaguucggccgggauaucgccgacaccaccgacgcagugcgggacccccagacccuggagauccuggacaucaccccaugcagcuucggcggcgugagcgugaucacccccggcacaaacaccagcaaccaggucgccgugcuguaccagggagugaacugcaccgaggugcccguggccauccacgccgaccagcugacccccaccuggcggguguacagcaccggcagcaacguguuccagacccgggccggcugccugaucggcgccgagcacgugaacaacuccuacgagugcgacauccccaucggcgcuggcaucugcgccagcuaccagacccagaccaacagcccccggcgggcccggagcguggccagccagagcgugaucgccuacaccaugagcuuaggcgccgagaacagcguggccuacagcaacaacagcaucgcgaucccuaccaacuucaccaucagcgugaccaccgagauccugcccgugagcaugaccaagaccagcguggacuguaccauguacauaugcggcgacagcaccgagugcagcaaccugcugcugcaguacggcagcuucugcacccagcugaaccgggcccugaccggcaucgccguggagcaggacaagaacacccaagagguguucgcccaggugaagcagaucuacaagacucccccaaucaaggacuucggcggcuucaacuucagccagauccugcccgaccccagcaagcccagcaagcggagcuucaucgaggaccugcuguucaacaaggugacccuggccgacgccggcuucaucaagcaguacggcgacugccugggggauaucgccgcucgggaccugaucugcgcccagaaguucaacggccugaccgugcugcccccucugcugaccgacgagaugaucgcccaguacaccagcgcccugcuugccggcaccaucaccagcggcuggaccuucggcgccggcgcagcccugcagauccccuucgccaugcagauggccuaccgguucaacggcaucggcgugacccagaacgugcuguacgagaaccagaagcugaucgccaaccaguucaacagcgccaucggcaagauccaggacagccugagcagcaccgccagcgcccugggcaagcugcaggacguggugaaccagaacgcucaggcccugaacacccuggugaagcagcugagcagcaacuuuggcgccaucagcucagugcugaaugacauccugagcaggcuggacaagguggaggccgaggugcagaucgaccggcugaucaccggccggcugcagagccugcagaccuacgugacccagcagcugauccgggccgccgagauccgggccagcgccaaccuggcagccaccaagaugagcgagugcgugcugggccagagcaagcggguggacuucugcggcaagggcuaccaccugaugagcuucccccagagcgccccacacggcgugguguuccuccacgucacauacgugcccgcccaggagaagaacuucaccaccgcccccgccaucugccacgacggcaaggcucacuucccccgggagggaguguucgugagcaacggcacccacugguucgugacccagcggaacuucuacgagccccagauuaucaccaccgacaacaccuucgugagcggcaacugcgacguggugaucggcaucgugaacaacaccguguacgacccccugcagccugagcuggacagcuucaaggaggagcuggacaaguacuucaagaaccacaccagccccgacguggaucugggcgacaucagcggcaucaacgccagcguggugaacauccagaaggagaucgaccggcugaacgagguggccaagaaccugaacgagagccugaucgaccugcaggagcugggcaaguacgagcaguacaucaaguggcccugguacaucuggcugggcuucaucgccggccugaucgccaucgugaucgugaccaucaugcugugcugcaugaccagcugcuguagcugccugaagggcugcugcagcugcggcagcugcugcaaguucgacgaggacgacagcgagccagugcugaagggcgugaagcugcacuacaccugaggacuagucccuguucccagagcccacuuuuuuuucuuuuuuugaaauaaaauagccugucuuucagaucucaaaggcucuuuucagagccaccaaaaaaaaaaaaaaaaaaaaaaaaaaaaaaaaaaaaaaaaaaaaaaaaaaaaaaaaaaaaaaaaaaaaaaaaaaaaaaaaaaaaaaaaaaaaaaaaaaaaa

SEQ ID NO: 23475 - RNA, 4085 nt, Artificial Sequence
  SARS-CoV-2/Wuhan/WIV05/2019__EPI_ISL_402128 spike protein mRNA gc (1-1273)(H69del_V70del_Y144del_N501Y_A570D_D614G_P681H_T716I_S982 A_D1118H)
aggagagucccgcagucggcguccagcggcucugcuuguucgugugugugucguugcaggccuuauucaagcuuaccauguucguguuccuggugcugcugccccuggugagcagccagugcgugaaccugaccacccggacccagcugcccccugccuacaccaacagcuucacccggggcguguacuaccccgacaagguguuccggagcagcgugcugcacagcacccaggaccuguuccugcccuucuucagcaacgugaccugguuccacgccaucagcggcaccaacggcaccaagcgguucgacaacccagugcugcccuucaacgacggcguguacuucgccagcaccgagaagucaaacaucauccggggcuggaucuucggcaccacccuggacagcaagacacagagccugcugaucgugaacaacgccaccaacguggugaucaaggugugcgaguuucaguucugcaacgaccccuuccugggcguguaccacaagaacaacaagagcuggauggagagcgaguuccggguguacagcagcgcuaacaauugcaccuucgaguacgucagccagcccuuccugauggaccucgagggcaagcagggcaacuucaagaaccugcgggaguucguguucaagaacaucgauggcuacuucaagaucuacagcaagcacacccccaucaaccuggugcgggaccugccccagggauucagcgcccuggagccucugguggaccugcccaucggcaucaacaucaccagguuccagacccugcuggcccugcaccggagcuaccugacccccggcgacagcagcagcggcuggaccgccggcgccgccgcauacuacgugggcuaccugcagccacggaccuuccugcugaaguacaacgagaacggcaccaucaccgacgccguggacugcgcccuggacccccugagcgagaccaagugcacccuaaagagcuucaccguggagaagggcaucuaccagaccagcaacuuccgggugcagcccacugagagcaucgugcgguuccccaacauuaccaaccugugucccuucggcgagguguucaacgccacccgguucgccagcguguacgccuggaaccggaagcggaucagcaacugcguggccgacuacagcgugcuguacaacagcgccagcuucagcaccuucaagugcuacggcgugagcccuaccaagcugaacgaccugugcuucaccaacguguacgcugacagcuucgugauccggggcgacgaggugcggcagaucgcccccggccagaccggcaagaucgccgacuacaacuacaagcugcccgacgacuucaccggcugcgugaucgccuggaacagcaacaaccuggacagcaaggugggcggcaacuacaacuaccuguaccggcuguuccguaagagcaaccugaagccauucgagcgggacaucagcaccgagaucuaccaggccggcagcacccccugcaacgguguggagggcuuuaacugcuacuucccccugcagagcuacggcuuccagcccaccuacggcgugggcuaccagcccuaccgggugguggugcugagcuucgagcugcugcacgcccccgccaccgugugcggcccuaaaaagagcaccaaccuggugaagaacaagugcgugaacuucaacuucaauggccugaccggcaccggcgugcugaccgagagcaacaagaaguuccugcccuuccagcaguucggccgggauaucgacgacaccaccgacgccgugcgggacccccagacccuggagauccuggacaucaccccaugcagcuucggcggcgugagcgugaucacccccggcacaaacaccagcaaccaggucgcagugcuguaccagggagugaacugcaccgaggugcccguggccauccacgccgaccagcugacccccaccuggcggguguacagcaccggcagcaacguguuccagacccgggccggcugccugaucggcgccgagcacgugaacaacuccuacgagugcgacauccccaucggcgccggcaucugcgcuagcuaccagacccagaccaacagccaccggcgggcccggagcguggccagccagagcaucaucgccuacaccaugagcuuaggcgccgagaacagcguggccuacagcaacaacagcaucgccauccccaucaacuucaccauaagcgugaccaccgagauccugccugugagcaugaccaagaccagcguggacuguaccauguacaucugcggcgacagcaccgagugcagcaaccugcugcugcaguacggcagcuucugcacccagcugaaccgggcgcugaccggcaucgccguggagcaggacaagaacacccaagagguguucgcccaggugaagcagaucuacaagaccccacccaucaaggacuucggcggcuucaacuucagccagauccugcccgaccccagcaagcccagcaagcggagcuucaucgaggaccugcuguucaacaaggugacucuggccgacgccggcuucaucaagcaguacggcgauugccugggggacaucgccgcccgggaccugaucugcgcucagaaguucaacggccugaccgugcugccuccccugcugaccgacgagaugaucgcccaguacaccagcgcccugcuugccggcaccaucaccagcggcuggaccuucggcgccggcgccgcacugcagauccccuucgccaugcagauggccuaccgguucaacggcaucggcgugacccagaacgugcuguacgagaaccagaagcugaucgccaaccaguucaacagcgccaucggcaagauccaggacagccugagcagcaccgccagcgcccugggcaagcugcaggacguggugaaccagaacgcccaggcucugaacacccuggugaagcagcugagcagcaacuucggcgccaucagcucagugcugaacgacauccuggccaggcuggacaagguggaggccgaggugcagaucgaccggcugaucaccggccggcugcagagccugcagaccuacgugacccagcagcugauccgggccgccgagauucgggccagcgccaaucuggcagccaccaagaugagcgagugcgugcugggccagagcaagcggguggacuuuugcggcaagggcuaccaccugaugagcuucccccagagcgcuccccacggcgugguguuccuccacgugaccuacgucccagcccaggagaagaacuucacaaccgcccccgccaucugccacgacggcaaggcccacuucccccgggagggaguguucgugagcaacggcacccacugguucgugacccagcggaacuucuacgagccccagaucaucaccacccacaacaccuucgugagcggcaacugcgacguggugaucggcaucgugaacaacaccguguacgacccccugcagcccgagcuggacagcuucaaggaggagcuggacaaguacuucaagaaccacaccagcccugacguggaucugggcgacaucagcggcaucaacgccagcguggugaacauccagaaggagaucgaccggcugaacgagguggccaagaaccugaacgagagccugaucgaccugcaggagcugggcaaguacgagcaguacaucaaguggcccugguacaucuggcugggcuucaucgccggccugaucgccaucgugauggugaccaucaugcugugcugcaugaccagcugcuguagcugccugaagggcugcugcagcugcggcagcugcugcaaguucgacgaggacgacagcgagcccgugcugaagggcgugaagcugcacuacaccugaggacuagucccuguucccagagcccacuuuuuuuucuuuuuuugaaauaaaauagccugucuuucagaucucaaaggcucuuuucagagccaccaaaaaaaaaaaaaaaaaaaaaaaaaaaaaaaaaaaaaaaaaaaaaaaaaaaaaaaaaaaaaaaaaaaaaaaaaaaaaaaaaaaaaaaaaaaaaaaaaaaaa

SEQ ID NO: 23476 - RNA, 4094 nt, Artificial Sequence
  SARS-CoV-2/Wuhan/WIV05/2019__EPI_ISL_402128 spike protein mRNA gc (1-1273)(K417N_E484K_N501Y_D614G)
aggagagucccgcagucggcguccagcggcucugcuuguucgugugugugucguugcaggccuuauucaagcuuaccauguucguguuccuggugcugcugccccuggugagcagccagugcgugaaccugaccacccggacccagcugcccccugccuacaccaacagcuucacccggggcguguacuaccccgacaagguguuccggagcagcgugcugcacagcacccaggaccuguuccugcccuucuucagcaacgugaccugguuccacgccauccacgugagcggcaccaacggcaccaagcgguucgacaacccagugcugcccuucaacgacggcguguacuucgccagcaccgagaagucaaacaucauccggggcuggaucuucggcaccacccuggacagcaagacacagagccugcugaucgugaacaacgccaccaacguggugaucaaggugugcgaguuucaguucugcaacgaccccuuccugggcguguacuaccacaagaacaacaagagcuggauggagagcgaguuccgggucuacagcagcgcuaacaauugcaccuucgaguacgugagccagcccuuccugauggaccucgagggcaagcagggcaacuucaagaaccugcgggaguucguguucaagaacaucgauggcuacuucaagaucuacagcaagcacacccccaucaaccuggugcgggaccugccccagggauucagcgcccuggagccucugguggaccugcccaucggcaucaacaucaccagguuccagacccugcuggcccugcaccggagcuaccugacccccggcgacagcagcagcggcuggaccgccggcgccgccgcauacuacgugggcuaccugcagccacggaccuuccugcugaaguacaacgagaacggcaccaucaccgacgccguggacugcgcccuggacccccugagcgagaccaagugcacccuaaagagcuucaccguggagaagggcaucuaccagaccagcaacuuccgggugcagcccacugagagcaucgugcgguuccccaacauuaccaaccugugucccuucggcgagguguucaacgccacccgguucgccagcguguacgccuggaaccggaagcggaucagcaacugcguggccgacuacagcgugcuguacaacagcgccagcuucagcaccuucaagugcuacggcgugagcccuaccaagcugaacgaccugugcuucaccaacguguacgcugacagcuucgugauccggggcgacgaggugcggcagaucgcccccggccagaccggcaacaucgccgacuacaacuacaagcugcccgacgacuucaccggcugcgugaucgccuggaacagcaacaaccuggacagcaaggugggcggcaacuacaacuaccuguaccggcuguuccguaagagcaaccugaagccauucgagcgggacaucagcaccgagaucuaccaggccggcagcacccccugcaacggugugaagggcuuuaacugcuacuucccccugcagagcuacggcuuccagcccaccuacggcgugggcuaccagcccuaccgggugguggugcugagcuucgagcugcugcacgcccccgccaccgugugcggcccuaaaaagagcaccaaccuggugaagaacaagugcgugaacuucaauuucaacggccugaccggcaccggcgugcugaccgagagcaacaagaaguuccugcccuuccagcaguucggccgggauaucgccgacaccaccgacgcagugcgggacccccagacccuggagauccuggacaucaccccaugcagcuucggcggcgugagcgucaucacccccggcacaaacaccagcaaccagguggccgugcuguaccagggagugaacugcaccgaggugcccguggccauccacgccgaccagcugacccccaccuggcggguguacagcaccggcagcaacguguuccagacccgggccggcugccugaucggcgccgagcacgugaacaacuccuacgagugcgacauccccaucggcgcuggcaucugcgccagcuaccagacccagaccaacagcccccggcgggcccggagcguggccagccagagcaucaucgccuacaccaugagcuuaggcgccgagaacagcguggccuacagcaacaacagcaucgcgaucccuaccaacuucaccaucagcgugaccaccgagauacugcccgugagcaugaccaagaccagcguggacuguaccauguacaucugcggcgacagcaccgagugcagcaaccugcugcugcaguacggcagcuucugcacccagcugaaccgggcccugaccggcaucgccguggagcaggacaagaacacccaagagguguucgcccaggugaagcagaucuacaagacucccccaaucaaggacuucggcggcuucaacuucagccagauccugcccgaccccagcaagcccagcaagcggagcuucaucgaggaccugcuguucaacaaggugacccuggccgacgccggcuucaucaagcaguacggcgacugccugggggauaucgccgcucgggaccugaucugcgcccagaaguucaacggccugaccgugcugcccccucugcugaccgacgagaugaucgcccaguacaccagcgcccugcuugccggcaccaucaccagcggcuggaccuucggcgccggcgcagcccugcagauccccuucgccaugcagauggccuaccgguucaacggcaucggcgugacccagaacgugcuguacgagaaccagaagcugaucgccaaccaguucaacagcgccaucggcaagauccaggacagccugagcagcaccgccagcgcccugggcaagcugcaggacguggugaaccagaacgcucaggcccugaacacccuggugaagcagcugagcagcaacuucggcgccaucagcucagugcugaaugacauccugagcaggcuggacaagguggaggccgaggugcagaucgaccggcugaucaccggccggcugcagagccugcagaccuacgugacccagcagcugauccgggccgccgagauccgggccagcgccaaccuggcagccaccaagaugagcgagugcgugcugggccagagcaagcggguggacuuuugcggcaagggcuaccaccugaugagcuucccccagagcgccccacacggcgugguguuccuccacgucacauacgugcccgcccaggagaagaacuucaccaccgcccccgccauuugccacgacggcaaggcucacuucccccgggagggaguguucgugagcaacggcacccacugguucgugacccagcggaacuucuacgagccccagaucaucaccaccgacaacaccuucgugagcggcaacugcgacguggugaucggcaucgugaacaacaccguguacgacccccugcagccugagcuggacagcuucaaggaggagcuggacaaguacuucaagaaccacaccagccccgacguggaucugggcgacaucagcggcaucaacgccagcguggugaacauccagaaggagaucgaccggcugaacgagguggccaagaaccugaacgagagccugaucgaccugcaggagcugggcaaguacgagcaguacaucaaguggcccugguacaucuggcugggcuucaucgccggccugaucgccaucgugauggugaccaucaugcugugcugcaugaccagcugcuguagcugccugaagggcugcugcagcugcggcagcugcugcaaguucgacgaggacgacagcgagccagugcugaagggcgugaagcugcacuacaccugaggacuagucccuguucccagagcccacuuuuuuuucuuuuuuugaaauaaaauagccugucuuucagaucucaaaggcucuuuucagagccaccaaaaaaaaaaaaaaaaaaaaaaaaaaaaaaaaaaaaaaaaaaaaaaaaaaaaaaaaaaaaaaaaaaaaaaaaaaaaaaaaaaaaaaaaaaaaaaaaaaaaa

SEQ ID NO: 23477 - RNA, 4085 nt, Artificial Sequence
  SARS-CoV-2/Wuhan/WIV05/2019__EPI_ISL_402128 spike protein mRNA gc (1-1273)(L18F_D80A_D215G_L242del_A243del_L244del_R246I_K417N_E484 K_N501Y_D614G_A701V)
aggagagucccgcagucggcguccagcggcucugcuuguucgugugugugucguugcaggccuuauucaagcuuaccauguucguguuccuggugcugcugccccuggugagcagccagugcgugaacuucaccacccggacccagcugcccccugccuacaccaacagcuucacccggggcguguacuaccccgacaagguguuccggagcagcgugcugcacagcacccaggaccuguuccugcccuucuucagcaacgugaccugguuccacgccauccacgugagcggcaccaacggcaccaagcgguucgccaacccagugcugcccuucaacgacggcguguacuucgccagcaccgagaagucaaacaucauccggggcuggaucuuuggcaccacccuggacagcaagacacagagccugcugaucgugaacaacgcuaccaacguggugaucaaggugugcgaguuccaguucugcaacgaccccuuccugggcguguacuaccacaagaacaacaagagcuggauggagagcgaguuccgggucuacagcagcgccaacaauugcaccuucgaguacgugagccagcccuuccugauggaccuggagggcaagcagggcaacuucaagaaccuccgggaguucguguucaagaacaucgacggcuacuucaagaucuacagcaagcacacccccaucaaccuggugcggggacugccccagggcuucagcgcccuggagccucugguggaucugcccaucggcaucaacaucaccagguuccagacccugcacaucagcuaccugacccccggcgacagcagcagcggcuggaccgccggcgccgccgcauacuacgugggcuaccugcagccacggaccuuccugcugaaguacaacgagaacggcaccaucaccgacgccguggacugcgcccuggacccccugagcgagaccaagugcacccuuaagagcuucaccguggagaagggcaucuaccagaccagcaacuuccgggugcagcccacugagagcauugugcgguuccccaacaucaccaaccugugucccuucggcgagguguucaacgccacccgguucgccagcguguacgccuggaaccggaagcggaucagcaacugcguggccgacuacagcgugcuguacaacagcgccagcuucagcaccuucaagugcuacggcgugagcccuaccaagcugaacgaccugugcuucaccaacguguacgcugacagcuucgugauccggggcgacgaggugcggcagaucgcccccggccagaccggcaacaucgccgacuacaacuacaagcugcccgacgacuucaccggcugcgugaucgccuggaacagcaacaaccuggacagcaaggugggcggcaacuacaacuaccuguaccggcuauuccguaagagcaaccugaagccauuugagcgggacaucagcaccgagaucuaccaggccgguagcacccccugcaacggcgugaagggcuucaacugcuacuucccccugcagagcuacggcuuccagcccaccuacggcgugggcuaccagcccuaccgggugguggugcugagcuucgagcugcugcacgcccccgccaccgugugcggcccuaaaaagagcaccaaccuggugaagaacaagugcgugaacuucaauuucaacggccugaccggcaccggcgugcugaccgagagcaacaagaaguuccugcccuuccagcaguucggccgggacaucgccgacaccaccgaugcagugcgggacccccagacccuggagauccuggacaucaccccaugcagcuucggcggcgugagcgucaucacccccggaacaaacaccagcaaccagguggccgugcuguaccagggcgugaacugcaccgaggugcccguggccauccacgccgaccagcugacccccaccuggcggguguacagcaccggcagcaacguguuccagacccgggccggcugccugaucggcgccgagcacgugaacaacuccuacgagugcgacauccccaucggcgcuggcaucugcgccagcuaccagacccagaccaacagcccccggcgggcccggagcguggccagccagagcaucaucgccuacaccaugagccugggcguggagaacagcguggccuacagcaacaacagcaucgccaucccuaccaacuucaccauaagcgugaccaccgagauccugcccgugagcaugaccaagaccagcguggacuguaccauguacaucugcggcgacagcaccgagugcagcaaccuguuacugcaguacggcagcuucugcacccagcugaaccgggcgcugaccggcaucgccguggagcaggacaagaacacccaagagguguucgcccaggugaagcagaucuacaagacucccccaaucaaggacuucggcggcuucaacuucagccagauccugcccgaccccagcaagcccagcaagcggagcuucaucgaggaccugcuguucaacaaggugacccuggccgacgccggcuucaucaagcaguacggggacugccugggcgacaucgccgcccgggaccugaucugcgcucagaaguucaacggccugaccgugcugcccccucugcugaccgaugagaugaucgcccaguacaccagcgcccugcuggccggcaccaucaccagcggcuggaccuucggcgccggcgccgcacugcagauccccuucgccaugcagauggccuaccgguucaacggcaucggcgugacccagaacgugcuguacgagaaccagaagcugaucgccaaccaguucaacagcgccaucggcaagauccaggacagccugagcagcaccgccagcgcccugggcaagcugcaggacguggugaaccagaacgcccaggcucugaacacccuggugaagcagcugagcagcaacuuuggcgccaucagcucagugcugaaugacauccugagccggcuggacaagguggaggccgaggugcagaucgacaggcugaucaccggccggcugcagagccugcagaccuacgugacccagcagcugauccgggccgccgagauucgggccagcgccaaccuggccgcaaccaagaugagcgagugcgugcugggccagagcaagcggguggacuucugcggcaagggcuaccaccugaugagcuucccccagagcgccccacacggcguggucuuccugcacgugacauacgugcccgcccaggagaagaacuucaccaccgcccccgccaucugccacgacggaaaggcccacuucccccgggagggcguguucgugagcaacggcacccacugguucgugacccagcggaacuucuacgagccccagaucaucaccaccgacaacaccuucgugagcggcaacugcgacguggugaucggcaucgugaacaacaccguguacgacccccugcagccugagcuggacagcuucaaggaggagcucgacaaguacuucaagaaccacaccagccccgacguggaccugggcgacaucagcggcaucaacgcuagcguggugaacauccagaaggagaucgaucggcugaacgagguggccaagaaccugaacgagagccugaucgaccugcaggagcugggcaaguacgagcaguacaucaaguggcccugguacaucuggcugggcuucaucgccggccugaucgccaucgugauggugaccaucaugcugugcugcaugaccagcugcuguagcugccugaagggcugcugcagcugcggcagcugcugcaaguucgacgaggacgacagcgagccagugcugaagggcgugaagcugcacuacaccugaggacuagucccuguucccagagcccacuuuuuuuucuuuuuuugaaauaaaauagccugucuuucagaucucaaaggcucuuuucagagccaccaaaaaaaaaaaaaaaaaaaaaaaaaaaaaaaaaaaaaaaaaaaaaaaaaaaaaaaaaaaaaaaaaaaaaaaaaaaaaaaaaaaaaaaaaaaaaaaaaaaaa

SEQ ID NO: 23478 - RNA, 4094 nt, Artificial Sequence
  SARS-CoV-2/Wuhan/WIV05/2019__EPI_ISL_402128 spike protein mRNA gc (1-1273)(E484K_D614G)
aggagagucccgcagucggcguccagcggcucugcuuguucgugugugugucguugcaggccuuauucaagcuuaccauguucguguuccuggugcugcugccccuggugagcagccagugcgugaaccugaccacccggacccagcugcccccugccuacaccaacagcuucacccggggcguguacuaccccgacaagguguuccggagcagcgugcugcacagcacccaggaccuguuccugcccuucuucagcaacgugaccugguuccacgccauccacgugagcggcaccaacggcaccaagcgguucgacaacccagugcugcccuucaacgacggcguguacuucgccagcaccgagaagucaaacaucauccggggcuggaucuucggcaccacccuggacagcaagacacagagccugcugaucgugaacaacgccaccaacguggugaucaaggugugcgaguuucaguucugcaacgaccccuuccugggcguguacuaccacaagaacaacaagagcuggauggagagcgaguuccgggucuacagcagcgcuaacaauugcaccuucgaguacgugagccagcccuuccugauggaccucgagggcaagcagggcaacuucaagaaccugcgggaguucguguucaagaacaucgauggcuacuucaagaucuacagcaagcacacccccaucaaccuggugcgggaccugccccagggauucagcgcccuggagccucugguggaccugcccaucggcaucaacaucaccagguuccagacccugcuggcccugcaccggagcuaccugacccccggcgacagcagcagcggcuggaccgccggcgccgccgcauacuacgugggcuaccugcagccacggaccuuccugcugaaguacaacgagaacggcaccaucaccgacgccguggacugcgcccuggacccccugagcgagaccaagugcacccuaaagagcuucaccguggagaagggcaucuaccagaccagcaacuuccgggugcagcccacugagagcaucgugcgguuccccaacauuaccaaccugugucccuucggcgagguguucaacgccacccgguucgccagcguguacgccuggaaccggaagcggaucagcaacugcguggccgacuacagcgugcuguacaacagcgccagcuucagcaccuucaagugcuacggcgugagcccuaccaagcugaacgaccugugcuucaccaacguguacgcugacagcuucgugauccggggcgacgaggugcggcagaucgcccccggccagaccggcaagaucgccgacuacaacuacaagcugcccgacgacuucaccggcugcgugaucgccuggaacagcaacaaccuggacagcaaggugggcggcaacuacaacuaccuguaccggcuguuccguaagagcaaccugaagccauucgagcgggacaucagcaccgagaucuaccaggccggcagcacccccugcaacggugugaagggcuuuaacugcuacuucccccugcagagcuacggcuuccagcccaccaacggcgugggcuaccagcccuaccgggugguggugcugagcuucgagcugcugcacgcccccgccaccgugugcggcccuaaaaagagcaccaaccuggugaagaacaagugcgugaacuucaauuucaacggccugaccggcaccggcgugcugaccgagagcaacaagaaguuccugcccuuccagcaguucggccgggauaucgccgacaccaccgacgcagugcgggacccccagacccuggagauccuggacaucaccccaugcagcuucggcggcgugagcgucaucacccccggcacaaacaccagcaaccagguggccgugcuguaccagggagugaacugcaccgaggugcccguggccauccacgccgaccagcugacccccaccuggcggguguacagcaccggcagcaacguguuccagacccgggccggcugccugaucggcgccgagcacgugaacaacuccuacgagugcgacauccccaucggcgcuggcaucugcgccagcuaccagacccagaccaacagcccccggcgggcccggagcguggccagccagagcaucaucgccuacaccaugagcuuaggcgccgagaacagcguggccuacagcaacaacagcaucgcgaucccuaccaacuucaccaucagcgugaccaccgagauacugcccgugagcaugaccaagaccagcguggacuguaccauguacaucugcggcgacagcaccgagugcagcaaccugcugcugcaguacggcagcuucugcacccagcugaaccgggcccugaccggcaucgccguggagcaggacaagaacacccaagagguguucgcccaggugaagcagaucuacaagacucccccaaucaaggacuucggcggcuucaacuucagccagauccugcccgaccccagcaagcccagcaagcggagcuucaucgaggaccugcuguucaacaaggugacccuggccgacgccggcuucaucaagcaguacggcgacugccugggggauaucgccgcucgggaccugaucugcgcccagaaguucaacggccugaccgugcugcccccucugcugaccgacgagaugaucgcccaguacaccagcgcccugcuugccggcaccaucaccagcggcuggaccuucggcgccggcgcagcccugcagauccccuucgccaugcagauggccuaccgguucaacggcaucggcgugacccagaacgugcuguacgagaaccagaagcugaucgccaaccaguucaacagcgccaucggcaagauccaggacagccugagcagcaccgccagcgcccugggcaagcugcaggacguggugaaccagaacgcucaggcccugaacacccuggugaagcagcugagcagcaacuucggcgccaucagcucagugcugaaugacauccugagcaggcuggacaagguggaggccgaggugcagaucgaccggcugaucaccggccggcugcagagccugcagaccuacgugacccagcagcugauccgggccgccgagauccgggccagcgccaaccuggcagccaccaagaugagcgagugcgugcugggccagagcaagcggguggacuuuugcggcaagggcuaccaccugaugagcuucccccagagcgccccacacggcgugguguuccuccacgucacauacgugcccgcccaggagaagaacuucaccaccgcccccgccauuugccacgacggcaaggcucacuucccccgggagggaguguucgugagcaacggcacccacugguucgugacccagcggaacuucuacgagccccagaucaucaccaccgacaacaccuucgugagcggcaacugcgacguggugaucggcaucgugaacaacaccguguacgacccccugcagccugagcuggacagcuucaaggaggagcuggacaaguacuucaagaaccacaccagccccgacguggaucugggcgacaucagcggcaucaacgccagcguggugaacauccagaaggagaucgaccggcugaacgagguggccaagaaccugaacgagagccugaucgaccugcaggagcugggcaaguacgagcaguacaucaaguggcccugguacaucuggcugggcuucaucgccggccugaucgccaucgugauggugaccaucaugcugugcugcaugaccagcugcuguagcugccugaagggcugcugcagcugcggcagcugcugcaaguucgacgaggacgacagcgagccagugcugaagggcgugaagcugcacuacaccugaggacuagucccuguucccagagcccacuuuuuuuucuuuuuuugaaauaaaauagccugucuuucagaucucaaaggcucuuuucagagccaccaaaaaaaaaaaaaaaaaaaaaaaaaaaaaaaaaaaaaaaaaaaaaaaaaaaaaaaaaaaaaaaaaaaaaaaaaaaaaaaaaaaaaaaaaaaaaaaaaaaaa

SEQ ID NO: 23479 - RNA, 4094 nt, Artificial Sequence
  SARS-CoV-2/Wuhan/WIV05/2019__EPI_ISL_402128 spike protein mRNA gc (1-1273)(L18F_T20N_P26S_D138Y_R190S_K417T_E484K_N501Y_D614G_H655Y _T1027I)
aggagagucccgcagucggcguccagcggcucugcuuguucgugugugugucguugcaggccuuauucaagcuuaccauguucguguuccuggugcugcugccccuggugagcagccagugcgugaacuucaccaaccggacccagcugcccagcgccuacaccaacagcuucacccggggcguguacuacccugacaagguguuccggagcagcgugcugcacagcacccaggaccuguuccugcccuucuucagcaacgugaccugguuccacgccauccacgugagcggcaccaacggcaccaagcgguucgacaaccccgugcugccauucaacgacggcguguacuucgccagcaccgagaagucaaacaucauccggggcuggaucuuuggcaccacccuggacagcaagacccagagccugcugaucgugaacaacgccacaaacguggugaucaaggugugcgaguuccaguucugcaacuaccccuuccugggcguguacuaccacaagaacaacaagagcuggauggagagcgaguuccgggucuacagcagcgcuaauaacugcaccuucgaguacgugagccagcccuuccugauggaccuggagggcaagcagggcaacuucaagaaccucagcgaguucguguucaagaacaucgacggcuacuucaagaucuacagcaagcacacccccaucaaccuggugcgggaucugccccagggauucagcgcccuggagccccugguggaccugccuaucggcaucaacaucacccgguuccagacccugcuggcccugcacaggagcuaccugacccccggcgacagcagcagcggcuggaccgccggcgccgccgcauacuacgugggcuaccugcagccccggaccuuccugcugaaguacaacgagaacggcaccaucaccgacgccguggacugcgcccuggacccacugagcgagaccaagugcacccuaaagagcuucaccguggagaagggcaucuaccagaccagcaacuuccgggugcagcccaccgagagcaucgugcgguuccccaacauuacuaaccugugucccuucggcgagguguucaacgccacccgguucgccagcguguacgccuggaaccggaagcggaucagcaacugcguggccgacuacagcgugcuguacaacagcgccagcuucagcaccuucaagugcuacggcgugagccccaccaagcugaacgaccugugcuucaccaacguguacgcugacagcuucgugauccggggcgacgaggugcggcagaucgccccuggccagaccggcaccaucgccgacuacaacuacaagcugcccgacgacuucaccggcugcgugaucgccuggaacagcaacaaccuggacagcaaggugggcggcaacuacaacuaccuguaccggcuguuccguaagagcaaccugaagcccuuugagcgggacaucagcaccgagaucuaccaggccggcagcaccccaugcaacggugugaagggcuucaacugcuacuucccccugcagagcuacggcuuccagcccaccuacggcgugggcuaccagcccuaccgggugguggugcugagcuucgagcugcugcacgcccccgccaccgugugcggccccaaaaagagcaccaaccuggugaagaacaagugcgugaacuucaauuucaacggccugaccggcaccggcgugcugaccgagagcaacaagaaguuccugccuuuccagcaguucggccgggacaucgccgauaccaccgacgcagugcgggacccccagacccuggagauccuggacaucacccccugcagcuucggcggcgugagcgucaucaccccaggcacaaacaccagcaaccagguggccgugcuguaccagggagugaacugcaccgaggugcccguggccauccacgccgaccagcugacccccaccuggcggguguacuccaccggcagcaacguguuccagacccgggccggcugccugaucggcgccgaguacgugaacaacagcuacgagugcgacauccccaucggcgcuggcaucugcgccagcuaccagacccagaccaacagcccccggcgggcccggagcguggccagccagagcaucaucgccuacaccaugagccugggcgccgagaacagcguggccuacagcaacaacagcaucgcgauccccaccaacuucaccaucagcgugaccaccgagauauuaccugugagcaugaccaagaccagcguggacuguaccauguacaucugcggcgacagcaccgagugcagcaaccugcugcugcaguacggcagcuucugcacccagcugaaccgggcccugaccggcaucgccguggagcaggacaagaacacccaagagguguucgcccaggugaagcagaucuacaagacuccacccaucaaggacuucggcggcuucaacuucagccagauccugcccgaccccagcaagcccagcaagcggagcuucaucgaggaccugcuguucaacaaggugacccuggccgacgccggcuucaucaagcaguacggcgacugccugggggacaucgccgcucgggaucugaucugcgcccagaaguucaacggccugaccgugcugccuccccugcugaccgacgagaugaucgcccaguacaccagcgcccugcuggccggcaccaucaccagcggcuggaccuucggcgccggcgcagcccuucagauccccuucgccaugcagauggccuaccgguucaacggcaucggcgugacccagaacgugcuguacgagaaccagaagcugaucgccaaccaguucaacagcgccaucggcaagauccaggacagccugagcagcaccgccagcgcccugggcaagcugcaggacguggugaaccagaacgcucaggcccugaacacccuggugaagcagcugagcucaaacuuuggcgccaucagcagcgugcugaaugacauccugagccggcuggacaagguggaggccgaggugcagaucgacaggcugaucaccggccggcugcagagccugcagaccuacgugacccagcagcugauccgggccgccgagauccgggccagcgccaaccuggcagccauuaagaugagcgagugcgugcugggccagagcaagcggguggacuucugcggcaagggcuaccaccugaugagcuucccccagagcgcuccccacggcgugguguuccugcacgucaccuacgugccagcccaggagaagaacuucacaaccgcccccgccaucugccacgacggcaaggcccacuucccccgggagggaguguucgugagcaacggcacccacugguucgugacccagcggaacuucuacgagccccagaucaucaccaccgacaacaccuucgugagcggcaacugcgacguggugaucggcaucgugaacaacaccguguacgacccccuccagcccgagcuggacagcuucaaggaggagcuggacaaguacuucaagaaccacaccagcccugacguggaccugggcgauaucagcggcaucaacgccagcguggugaacauccagaaggagaucgaccggcugaacgagguggccaagaaccugaacgagagccugaucgaccugcaggagcugggcaaguacgagcaguacaucaaguggcccugguacaucuggcugggcuucaucgccggccugaucgccaucgugauggugaccaucaugcugugcugcaugaccagcugcuguagcugccugaagggcugcugcagcugcggcagcugcugcaaguucgacgaggacgacagcgagcccgugcugaagggcgugaagcugcacuacaccugaggacuagucccuguucccagagcccacuuuuuuuucuuuuuuugaaauaaaauagccugucuuucagaucucaaaggcucuuuucagagccaccaaaaaaaaaaaaaaaaaaaaaaaaaaaaaaaaaaaaaaaaaaaaaaaaaaaaaaaaaaaaaaaaaaaaaaaaaaaaaaaaaaaaaaaaaaaaaaaaaaaaa

SEQ ID NO: 23480 - RNA, 4094 nt, Artificial Sequence
  SARS-CoV-2/Wuhan/WIV05/2019__EPI_ISL_402128 spike protein mRNA gc (1-1273)(S13I_W152C_L452R_D614G)
aggagagucccgcagucggcguccagcggcucugcuuguucgugugugugucguugcaggccuuauucaagcuuaccauguucguguuccuggugcugcugccccuggugagcauccagugcgugaaccugaccacccggacccagcugcccccugccuacaccaacagcuucacccggggcguguacuaccccgacaagguguuccggagcagcgugcugcacagcacccaggaccuguuccugcccuucuucagcaacgugaccugguuccacgccauccacgugagcggcaccaacggcaccaagcgguucgacaacccagugcugcccuucaacgacggcguguacuucgccagcaccgagaagucaaacaucauccggggcuggaucuucggcaccacccuggacagcaagacacagagccugcugaucgugaacaacgccaccaacguggugaucaaggugugcgaguuucaguucugcaacgaccccuuccugggcguguacuaccacaagaacaacaagagcugcauggagagcgaguuccgggucuacagcagcgcuaacaauugcaccuucgaguacgugagccagcccuuccugauggaccucgagggcaagcagggcaacuucaagaaccugcgggaguucguguucaagaacaucgauggcuacuucaagaucuacagcaagcacacccccaucaaccuggugcgggaccugccccagggauucagcgcccuggagccucugguggaccugcccaucggcaucaacaucaccagguuccagacccugcuggcccugcaccggagcuaccugacccccggcgacagcagcagcggcuggaccgccggcgccgccgcauacuacgugggcuaccugcagccacggaccuuccugcugaaguacaacgagaacggcaccaucaccgacgccguggacugcgcccuggacccccugagcgagaccaaguguacccuaaagagcuucaccguggagaagggcaucuaccagaccagcaacuuccgggugcagcccacugagagcauugugcgguuccccaacaucaccaaccugugccccuucggcgagguguucaacgccacccgguucgccagcguguacgccuggaaccggaagcggaucagcaacugcguggccgacuacagcgugcuguacaacagcgccagcuucagcaccuucaagugcuacggcgugagcccuaccaagcugaacgaccugugcuucaccaacguguacgcugacagcuucgugauccggggcgacgaggugcggcagaucgcccccggccagaccggcaagaucgccgacuacaacuacaagcugcccgacgacuucaccggcugcgugaucgccuggaacagcaacaaccuggacagcaaggugggcggcaacuacaacuaccgguaccggcuguuccguaagagcaaccugaagccauucgagcgggacaucagcaccgagaucuaccaggccggcagcacccccugcaacgguguggagggcuuuaacugcuacuucccccugcagagcuacggcuuccagcccaccaacggcgugggcuaccagcccuaccgggugguggugcugagcuucgagcugcugcacgcccccgccaccgugugcggcccuaaaaagagcaccaaccuggugaagaacaagugcgugaacuucaauuucaacggccugaccggcaccggcgugcugaccgagagcaacaagaaguuccugcccuuccagcaguucggccgggauaucgccgacaccaccgacgcagugcgggacccccagacccuggagauccuggacaucaccccaugcagcuucggcggcgugagcgucaucacccccggcacaaacaccagcaaccagguggccgugcuguaccagggagugaacugcaccgaggugcccguggccauccacgccgaccagcugacccccaccuggcggguguacagcaccggcagcaacguguuccagacccgggccggcugccugaucggcgccgagcacgugaacaacagcuacgagugcgacauccccaucggcgcuggcaucugugccuccuaccagacccagaccaacagcccccggcgggcccggagcguggccagccagagcaucaucgccuacaccaugagccugggcgccgagaacagcguggccuacagcaacaacagcaucgcgaucccuaccaacuucaccauaagcgugaccaccgagaucuuacccgugagcaugaccaagaccagcguggacugcaccauguacaucugcggcgacagcaccgagugcagcaaccugcugcugcaguacggcagcuucugcacccagcugaaccgggcccugaccggcaucgccguggagcaggacaagaacacccaagagguguucgcccaggugaagcagaucuacaagacucccccaaucaaggacuucggcggcuucaacuucagccagauccugcccgaccccagcaagcccagcaagcggagcuucaucgaggaccugcuguucaacaaggugacccuggccgacgccggcuucaucaagcaguacggcgacugccugggggauaucgccgcucgggaccugaucugcgcccagaaguucaacggccugaccgugcugcccccucugcugaccgacgagaugaucgcccaguacaccagcgcccugcuggccggcaccaucaccagcggcuggaccuucggcgccggcgcagcccuucagauccccuucgccaugcagauggccuacagguucaacggcaucggcgugacccagaacgugcuguacgagaaccagaagcugaucgccaaccaguucaacagcgccaucggcaagauccaggacagccugagcagcaccgccagcgcccugggcaagcugcaggacguggugaaccagaacgcucaggcccugaacacccuggugaagcagcugagcagcaacuucggcgccaucagcagcgugcugaaugacauccugucacggcuggacaagguggaggccgaggugcagaucgaccggcugaucaccggccggcugcagagccugcagaccuacgugacccagcagcugauccgggccgccgagauucgggccagcgccaaccuggcagccaccaagaugagcgagugcgugcugggccagagcaagcggguggacuuuugcggcaagggcuaccaccugaugagcuucccccagagcgccccacacggcgugguguuccugcacgucacauacgugcccgcccaggagaagaacuucaccaccgcccccgccaucugccacgacggcaaggcucacuucccccgggagggaguguucgugagcaacggcacccacugguucgugacccagcggaacuucuacgagccccagaucaucaccaccgacaacaccuucgugagcggcaacugcgacguggugaucggcaucgugaacaacaccguguacgacccccuccagccugagcuggacagcuucaaggaggagcuggacaaguacuucaagaaccacaccagccccgacguggaucugggcgacaucagcggcaucaacgccagcguggugaacauccagaaggagaucgaccggcugaacgagguggccaagaaccugaacgagagccugaucgaccugcaggagcugggcaaguacgagcaguacaucaaguggcccugguacaucuggcugggcuucaucgccggccugaucgccaucgugauggugaccaucaugcugugcugcaugaccagcuguugcagcugccugaagggcugcugcagcugcggcagcugcugcaaguucgacgaggacgacagcgagccagugcugaagggcgugaagcugcacuacaccugaggacuagucccuguucccagagcccacuuuuuuuucuuuuuuugaaauaaaauagccugucuuucagaucucaaaggcucuuuucagagccaccaaaaaaaaaaaaaaaaaaaaaaaaaaaaaaaaaaaaaaaaaaaaaaaaaaaaaaaaaaaaaaaaaaaaaaaaaaaaaaaaaaaaaaaaaaaaaaaaaaaaa

SEQ ID NO: 23481 - RNA, 4094 nt, Artificial Sequence; identical to SEQ ID NO: 12540
  SARS-CoV-2/Wuhan/WIV05/2019__EPI_ISL_402128 spike protein mRNA gc mod (1-1273)

SEQ ID NO: 23482 - RNA, 4094 nt, Artificial Sequence
  SARS-CoV-2/Wuhan/WIV05/2019__EPI_ISL_402128 spike protein mRNA gc mod (1-1273)(D614G)
aggagagucccgcagucggcguccagcggcucugcuuguucgugugugugucguugcaggccuuauucaagcuuaccauguucguguuucuggugcugcugccccugguguccagccagugugugaaccugaccaccagaacacagcugccuccagccuacaccaacagcuucaccagaggcguguacuaccccgacaagguguucagauccagcgugcugcacucuacccaggaccuguuccugccuuucuucagcaacgugaccugguuccacgccauccacguguccggcaccaauggcaccaagagauucgacaaccccgugcugcccuucaacgacgggguguacuuugccagcaccgagaaguccaacaucaucagaggcuggaucuucggcaccacacuggacagcaagacccagagccugcugaucgugaacaacgccaccaacguggucaucaaagugugcgaguuccaguucugcaacgaccccuuccugggcgucuacuaccacaagaacaacaagagcuggauggaaagcgaguuccggguguacagcagcgccaacaacugcaccuucgaguacgugucccagccuuuccugauggaccuggaaggcaagcagggcaacuucaagaaccugcgcgaguucguguucaagaacaucgacggcuacuucaaaaucuacagcaagcacaccccuaucaaccucgugcgggaucugccucagggcuucucugcucuggaaccccugguggaucugcccaucggcaucaacaucacccgguuucagacacugcuggcccugcacagaagcuaccugacaccuggcgauagcagcagcggauggacagcuggugccgccgcuuacuaugugggcuaccugcagccuagaaccuuccugcugaaguacaacgagaacggcaccaucaccgacgccguggauugugcucuggauccucugagcgagacaaagugcacccugaaguccuucaccguggaaaagggcaucuaccagaccagcaacuuccgggugcagcccaccgaauccaucgugcgguuccccaauaucaccaaucugugccccuucggcgagguguucaaugccaccagauucgccucuguguacgccuggaaccggaagcggaucagcaauugcguggccgacuacuccgugcuguacaacuccgccagcuucagcaccuucaagugcuacggcguguccccuaccaagcugaacgaccugugcuucacaaacguguacgccgacagcuucgugauccggggagaugaagugcggcagauugccccuggacagacaggcaagaucgccgacuacaacuacaagcugcccgacgacuucaccggcugugugauugccuggaacagcaacaaccuggacuccaaagucggcggcaacuacaauuaccuguaccggcuguuccggaaguccaaucugaagcccuucgagcgggacaucagcaccgaaaucuaucaggccggcagcaccccuugcaacggcguggaaggcuucaacugcuacuucccacugcaguccuacggcuuucagcccacaaauggcgugggcuaucagcccuacagagugguggugcugagcuucgaacugcugcaugcuccugccacagugugcggcccuaagaaaagcaccaaucucgugaagaacaaaugcgugaacuucaacuucaacggccugaccggcaccggcgugcugacagagagcaacaagaaguuccugccauuccagcaguuuggccgggauaucgccgauaccacagacgccguuagagauccccagacacuggaaauccuggacaucaccccaugcagcuucggcggagugucugugaucaccccuggcaccaacaccagcaaucagguggcagugcuguaccagggcgugaacuguaccgaagugcccguggccauucacgccgaucagcugacaccuacauggcggguguacuccaccggcagcaauguguuucagaccagagccggcugucugaucggagccgagcacgugaacaauagcuacgagugcgacauccccaucggcgcuggcaucugugccagcuaccagacacagacaaacagccccagacgggcuagaagcguggccagccagagcaucauugccuacacaaugucucugggcgccgagaacagcguggccuacuccaacaacucuaucgcuauccccaccaacuucaccaucagcgugaccaccgagauccugccuguguccaugaccaagaccagcguggacugcaccauguacaucugcggcgauuccaccgagugcuccaaccugcugcugcaguacggcagcuucugcacccagcugaauagagcccugacagggaucgccguggaacaggacaagaacacccaagagguguucgcccaagugaagcaaaucuacaagaccccuccuaucaaggacuucggcggcuucaauuucagccagauucugcccgauccuagcaagcccagcaagcggagcuucaucgaggaccugcuguucaacaaagugacacuggccgacgccggcuucaucaagcaguauggcgauugucugggcgacauugccgccagggaucugauuugcgcccagaaguuuaacggacugacagugcugccuccucugcugaccgaugagaugaucgcccaguacacaucugcccugcuggccggcacaaucacaagcggcuggacauuuggagcuggcgccgcucugcagauccccuuugcuaugcagauggccuaccgguucaacggcaucggagugacccagaaugugcuguacgagaaccagaagcugaucgccaaccaguucaacagcgccaucggcaagauccaggacagccugagcagcacagcaagcgcccugggaaagcugcaggacguggucaaccagaaugcccaggcacugaacacccuggucaagcagcuguccuccaacuucggcgccaucagcucugugcugaacgauauccugagcagacuggacaaggucgaggccgaggugcagaucgacagacugaucacaggcagacugcagagccuccagacauacgugacccagcagcugaucagagccgccgagauuagagccucugccaaucuggccgccaccaagaugucugagugugugcugggccagagcaagagaguggacuuuugcggcaagggcuaccaccugaugagcuucccucagucugccccucacggcgugguguuucugcacgugacauaugugcccgcucaagagaagaauuucaccaccgcuccagccaucugccacgacggcaaagcccacuuuccuagagaaggcguguucguguccaacggcacccauugguucgugacacagcggaacuucuacgagccccagaucaucaccaccgacaacaccuucgugucuggcaacugcgacguugugaucggcauugugaacaauaccguguacgacccucugcagcccgagcuggacagcuucaaagaggaacuggacaaguacuuuaagaaccacacaagccccgacguggaccugggcgauaucagcggaaucaaugccagcgucgugaacauccagaaagagaucgaccggcugaacgagguggccaagaaucugaacgagagccugaucgaccugcaagaacuggggaaguacgagcaguacaucaaguggcccugguacaucuggcugggcuuuaucgccggacugauugccaucgugauggucacaaucaugcuguguugcaugaccagcugcuguagcugccugaagggcuguuguagcuguggcagcugcugcaaguucgacgaggacgauucugagcccgugcugaagggcgugaaacugcacuacaccugaggacuagucccuguucccagagcccacuuuuuuuucuuuuuuugaaauaaaauagccugucuuucagaucucaaaggcucuuuucagagccaccaaaaaaaaaaaaaaaaaaaaaaaaaaaaaaaaaaaaaaaaaaaaaaaaaaaaaaaaaaaaaaaaaaaaaaaaaaaaaaaaaaaaaaaaaaaaaaaaaaaaa

SEQ ID NO: 23483 - RNA, 4094 nt, Artificial Sequence
  SARS-CoV-2/Wuhan/WIV05/2019__EPI_ISL_402128 spike protein mRNA gc mod (1-1273)(A222V_D614G)
aggagagucccgcagucggcguccagcggcucugcuuguucgugugugugucguugcaggccuuauucaagcuuaccauguucguguuucuggugcugcugccccugguguccagccagugugugaaccugaccaccagaacacagcugccuccagccuacaccaacagcuucaccagaggcguguacuaccccgacaagguguucagauccagcgugcugcacucuacccaggaccuguuccugccuuucuucagcaacgugaccugguuccacgccauccacguguccggcaccaauggcaccaagagauucgacaaccccgugcugcccuucaacgacgggguguacuuugccagcaccgagaaguccaacaucaucagaggcuggaucuucggcaccacacuggacagcaagacccagagccugcugaucgugaacaacgccaccaacguggucaucaaagugugcgaguuccaguucugcaacgaccccuuccugggcgucuacuaccacaagaacaacaagagcuggauggaaagcgaguuccggguguacagcagcgccaacaacugcaccuucgaguacgugucccagccuuuccugauggaccuggaaggcaagcagggcaacuucaagaaccugcgcgaguucguguucaagaacaucgacggcuacuucaaaaucuacagcaagcacaccccuaucaaccucgugcgggaucugccucagggcuucucugugcuggaaccccugguggaucugcccaucggcaucaacaucacccgguuucagacacugcuggcccugcacagaagcuaccugacaccuggcgauagcagcagcggauggacagcuggugccgccgcuuacuaugugggcuaccugcagccuagaaccuuccugcugaaguacaacgagaacggcaccaucaccgacgccguggauugugcucuggauccucugagcgagacaaagugcacccugaaguccuucaccguggaaaagggcaucuaccagaccagcaacuuccgggugcagcccaccgaauccaucgugcgguuccccaauaucaccaaucugugccccuucggcgagguguucaaugccaccagauucgccucuguguacgccuggaaccggaagcggaucagcaauugcguggccgacuacuccgugcuguacaacuccgccagcuucagcaccuucaagugcuacggcguguccccuaccaagcugaacgaccugugcuucacaaacguguacgccgacagcuucgugauccggggagaugaagugcggcagauugccccuggacagacaggcaagaucgccgacuacaacuacaagcugcccgacgacuucaccggcugugugauugccuggaacagcaacaaccuggacuccaaagucggcggcaacuacaauuaccuguaccggcuguuccggaaguccaaucugaagcccuucgagcgggacaucagcaccgaaaucuaucaggccggcagcaccccuugcaacggcguggaaggcuucaacugcuacuucccacugcaguccuacggcuuucagcccacaaauggcgugggcuaucagcccuacagagugguggugcugagcuucgaacugcugcaugcuccugccacagugugcggcccuaagaaaagcaccaaucucgugaagaacaaaugcgugaacuucaacuucaacggccugaccggcaccggcgugcugacagagagcaacaagaaguuccugccauuccagcaguuuggccgggauaucgccgauaccacagacgccguuagagauccccagacacuggaaauccuggacaucaccccaugcagcuucggcggagugucugugaucaccccuggcaccaacaccagcaaucagguggcagugcuguaccagggcgugaacuguaccgaagugcccguggccauucacgccgaucagcugacaccuacauggcggguguacuccaccggcagcaauguguuucagaccagagccggcugucugaucggagccgagcacgugaacaauagcuacgagugcgacauccccaucggcgcuggcaucugugccagcuaccagacacagacaaacagccccagacgggcuagaagcguggccagccagagcaucauugccuacacaaugucucugggcgccgagaacagcguggccuacuccaacaacucuaucgcuauccccaccaacuucaccaucagcgugaccaccgagauccugccuguguccaugaccaagaccagcguggacugcaccauguacaucugcggcgauuccaccgagugcuccaaccugcugcugcaguacggcagcuucugcacccagcugaauagagcccugacagggaucgccguggaacaggacaagaacacccaagagguguucgcccaagugaagcaaaucuacaagaccccuccuaucaaggacuucggcggcuucaauuucagccagauucugcccgauccuagcaagcccagcaagcggagcuucaucgaggaccugcuguucaacaaagugacacuggccgacgccggcuucaucaagcaguauggcgauugucugggcgacauugccgccagggaucugauuugcgcccagaaguuuaacggacugacagugcugccuccucugcugaccgaugagaugaucgcccaguacacaucugcccugcuggccggcacaaucacaagcggcuggacauuuggagcuggcgccgcucugcagauccccuuugcuaugcagauggccuaccgguucaacggcaucggagugacccagaaugugcuguacgagaaccagaagcugaucgccaaccaguucaacagcgccaucggcaagauccaggacagccugagcagcacagcaagcgcccugggaaagcugcaggacguggucaaccagaaugcccaggcacugaacacccuggucaagcagcuguccuccaacuucggcgccaucagcucugugcugaacgauauccugagcagacuggacaaggucgaggccgaggugcagaucgacagacugaucacaggcagacugcagagccuccagacauacgugacccagcagcugaucagagccgccgagauuagagccucugccaaucuggccgccaccaagaugucugagugugugcugggccagagcaagagaguggacuuuugcggcaagggcuaccaccugaugagcuucccucagucugccccucacggcgugguguuucugcacgugacauaugugcccgcucaagagaagaauuucaccaccgcuccagccaucugccacgacggcaaagcccacuuuccuagagaaggcguguucguguccaacggcacccauugguucgugacacagcggaacuucuacgagccccagaucaucaccaccgacaacaccuucgugucuggcaacugcgacguugugaucggcauugugaacaauaccguguacgacccucugcagcccgagcuggacagcuucaaagaggaacuggacaaguacuuuaagaaccacacaagccccgacguggaccugggcgauaucagcggaaucaaugccagcgucgugaacauccagaaagagaucgaccggcugaacgagguggccaagaaucugaacgagagccugaucgaccugcaagaacuggggaaguacgagcaguacaucaaguggcccugguacaucuggcugggcuuuaucgccggacugauugccaucgugauggucacaaucaugcuguguugcaugaccagcugcuguagcugccugaagggcuguuguagcuguggcagcugcugcaaguucgacgaggacgauucugagcccgugcugaagggcgugaaacugcacuacaccugaggacuagucccuguucccagagcccacuuuuuuuucuuuuuuugaaauaaaauagccugucuuucagaucucaaaggcucuuuucagagccaccaaaaaaaaaaaaaaaaaaaaaaaaaaaaaaaaaaaaaaaaaaaaaaaaaaaaaaaaaaaaaaaaaaaaaaaaaaaaaaaaaaaaaaaaaaaaaaaaaaaaa

SEQ ID NO: 23484 - RNA, 4094 nt, Artificial Sequence
  SARS-CoV-2/Wuhan/WIV05/2019__EPI_ISL_402128 spike protein mRNA gc mod (1-1273)(N439K_D614G)
aggagagucccgcagucggcguccagcggcucugcuuguucgugugugugucguugcaggccuuauucaagcuuaccauguucguguuucuggugcugcugccccugguguccagccagugugugaaccugaccaccagaacacagcugccuccagccuacaccaacagcuucaccagaggcguguacuaccccgacaagguguucagauccagcgugcugcacucuacccaggaccuguuccugccuuucuucagcaacgugaccugguuccacgccauccacguguccggcaccaauggcaccaagagauucgacaaccccgugcugcccuucaacgacgggguguacuuugccagcaccgagaaguccaacaucaucagaggcuggaucuucggcaccacacuggacagcaagacccagagccugcugaucgugaacaacgccaccaacguggucaucaaagugugcgaguuccaguucugcaacgaccccuuccugggcgucuacuaccacaagaacaacaagagcuggauggaaagcgaguuccggguguacagcagcgccaacaacugcaccuucgaguacgugucccagccuuuccugauggaccuggaaggcaagcagggcaacuucaagaaccugcgcgaguucguguucaagaacaucgacggcuacuucaaaaucuacagcaagcacaccccuaucaaccucgugcgggaucugccucagggcuucucugcucuggaaccccugguggaucugcccaucggcaucaacaucacccgguuucagacacugcuggcccugcacagaagcuaccugacaccuggcgauagcagcagcggauggacagcuggugccgccgcuuacuaugugggcuaccugcagccuagaaccuuccugcugaaguacaacgagaacggcaccaucaccgacgccguggauugugcucuggauccucugagcgagacaaagugcacccugaaguccuucaccguggaaaagggcaucuaccagaccagcaacuuccgggugcagcccaccgaauccaucgugcgguuccccaauaucaccaaucugugccccuucggcgagguguucaaugccaccagauucgccucuguguacgccuggaaccggaagcggaucagcaauugcguggccgacuacuccgugcuguacaacuccgccagcuucagcaccuucaagugcuacggcguguccccuaccaagcugaacgaccugugcuucacaaacguguacgccgacagcuucgugauccggggagaugaagugcggcagauugccccuggacagacaggcaagaucgccgacuacaacuacaagcugcccgacgacuucaccggcugugugauugccuggaacagcaagaaccuggacuccaaagucggcggcaacuacaauuaccuguaccggcuguuccggaaguccaaucugaagcccuucgagcgggacaucagcaccgaaaucuaucaggccggcagcaccccuugcaacggcguggaaggcuucaacugcuacuucccacugcaguccuacggcuuucagcccacaaauggcgugggcuaucagcccuacagagugguggugcugagcuucgaacugcugcaugcuccugccacagugugcggcccuaagaaaagcaccaaucucgugaagaacaaaugcgugaacuucaacuucaacggccugaccggcaccggcgugcugacagagagcaacaagaaguuccugccauuccagcaguuuggccgggauaucgccgauaccacagacgccguuagagauccccagacacuggaaauccuggacaucaccccaugcagcuucggcggagugucugugaucaccccuggcaccaacaccagcaaucagguggcagugcuguaccagggcgugaacuguaccgaagugcccguggccauucacgccgaucagcugacaccuacauggcggguguacuccaccggcagcaauguguuucagaccagagccggcugucugaucggagccgagcacgugaacaauagcuacgagugcgacauccccaucggcgcuggcaucugugccagcuaccagacacagacaaacagccccagacgggcuagaagcguggccagccagagcaucauugccuacacaaugucucugggcgccgagaacagcguggccuacuccaacaacucuaucgcuauccccaccaacuucaccaucagcgugaccaccgagauccugccuguguccaugaccaagaccagcguggacugcaccauguacaucugcggcgauuccaccgagugcuccaaccugcugcugcaguacggcagcuucugcacccagcugaauagagcccugacagggaucgccguggaacaggacaagaacacccaagagguguucgcccaagugaagcaaaucuacaagaccccuccuaucaaggacuucggcggcuucaauuucagccagauucugcccgauccuagcaagcccagcaagcggagcuucaucgaggaccugcuguucaacaaagugacacuggccgacgccggcuucaucaagcaguauggcgauugucugggcgacauugccgccagggaucugauuugcgcccagaaguuuaacggacugacagugcugccuccucugcugaccgaugagaugaucgcccaguacacaucugcccugcuggccggcacaaucacaagcggcuggacauuuggagcuggcgccgcucugcagauccccuuugcuaugcagauggccuaccgguucaacggcaucggagugacccagaaugugcuguacgagaaccagaagcugaucgccaaccaguucaacagcgccaucggcaagauccaggacagccugagcagcacagcaagcgcccugggaaagcugcaggacguggucaaccagaaugcccaggcacugaacacccuggucaagcagcuguccuccaacuucggcgccaucagcucugugcugaacgauauccugagcagacuggacaaggucgaggccgaggugcagaucgacagacugaucacaggcagacugcagagccuccagacauacgugacccagcagcugaucagagccgccgagauuagagccucugccaaucuggccgccaccaagaugucugagugugugcugggccagagcaagagaguggacuuuugcggcaagggcuaccaccugaugagcuucccucagucugccccucacggcgugguguuucugcacgugacauaugugcccgcucaagagaagaauuucaccaccgcuccagccaucugccacgacggcaaagcccacuuuccuagagaaggcguguucguguccaacggcacccauugguucgugacacagcggaacuucuacgagccccagaucaucaccaccgacaacaccuucgugucuggcaacugcgacguugugaucggcauugugaacaauaccguguacgacccucugcagcccgagcuggacagcuucaaagaggaacuggacaaguacuuuaagaaccacacaagccccgacguggaccugggcgauaucagcggaaucaaugccagcgucgugaacauccagaaagagaucgaccggcugaacgagguggccaagaaucugaacgagagccugaucgaccugcaagaacuggggaaguacgagcaguacaucaaguggcccugguacaucuggcugggcuuuaucgccggacugauugccaucgugauggucacaaucaugcuguguugcaugaccagcugcuguagcugccugaagggcuguuguagcuguggcagcugcugcaaguucgacgaggacgauucugagcccgugcugaagggcgugaaacugcacuacaccugaggacuagucccuguucccagagcccacuuuuuuuucuuuuuuugaaauaaaauagccugucuuucagaucucaaaggcucuuuucagagccaccaaaaaaaaaaaaaaaaaaaaaaaaaaaaaaaaaaaaaaaaaaaaaaaaaaaaaaaaaaaaaaaaaaaaaaaaaaaaaaaaaaaaaaaaaaaaaaaaaaaaa

SEQ ID NO: 23485 - RNA, 4094 nt, Artificial Sequence
  SARS-CoV-2/Wuhan/WIV05/2019__EPI_ISL_402128 spike protein mRNA gc mod (1-1273)(S477N_D614G)
aggagagucccgcagucggcguccagcggcucugcuuguucgugugugugucguugcaggccuuauucaagcuuaccauguucguguuucuggugcugcugccccugguguccagccagugugugaaccugaccaccagaacacagcugccuccagccuacaccaacagcuucaccagaggcguguacuaccccgacaagguguucagauccagcgugcugcacucuacccaggaccuguuccugccuuucuucagcaacgugaccugguuccacgccauccacguguccggcaccaauggcaccaagagauucgacaaccccgugcugcccuucaacgacgggguguacuuugccagcaccgagaaguccaacaucaucagaggcuggaucuucggcaccacacuggacagcaagacccagagccugcugaucgugaacaacgccaccaacguggucaucaaagugugcgaguuccaguucugcaacgaccccuuccugggcgucuacuaccacaagaacaacaagagcuggauggaaagcgaguuccggguguacagcagcgccaacaacugcaccuucgaguacgugucccagccuuuccugauggaccuggaaggcaagcagggcaacuucaagaaccugcgcgaguucguguucaagaacaucgacggcuacuucaaaaucuacagcaagcacaccccuaucaaccucgugcgggaucugccucagggcuucucugcucuggaaccccugguggaucugcccaucggcaucaacaucacccgguuucagacacugcuggcccugcacagaagcuaccugacaccuggcgauagcagcagcggauggacagcuggugccgccgcuuacuaugugggcuaccugcagccuagaaccuuccugcugaaguacaacgagaacggcaccaucaccgacgccguggauugugcucuggauccucugagcgagacaaagugcacccugaaguccuucaccguggaaaagggcaucuaccagaccagcaacuuccgggugcagcccaccgaauccaucgugcgguuccccaauaucaccaaucugugccccuucggcgagguguucaaugccaccagauucgccucuguguacgccuggaaccggaagcggaucagcaauugcguggccgacuacuccgugcuguacaacuccgccagcuucagcaccuucaagugcuacggcguguccccuaccaagcugaacgaccugugcuucacaaacguguacgccgacagcuucgugauccggggagaugaagugcggcagauugccccuggacagacaggcaagaucgccgacuacaacuacaagcugcccgacgacuucaccggcugugugauugccuggaacagcaacaaccuggacuccaaagucggcggcaacuacaauuaccuguaccggcuguuccggaaguccaaucugaagcccuucgagcgggacaucagcaccgaaaucuaucaggccggcaacaccccuugcaacggcguggaaggcuucaacugcuacuucccacugcaguccuacggcuuucagcccacaaauggcgugggcuaucagcccuacagagugguggugcugagcuucgaacugcugcaugcuccugccacagugugcggcccuaagaaaagcaccaaucucgugaagaacaaaugcgugaacuucaacuucaacggccugaccggcaccggcgugcugacagagagcaacaagaaguuccugccauuccagcaguuuggccgggauaucgccgauaccacagacgccguuagagauccccagacacuggaaauccuggacaucaccccaugcagcuucggcggagugucugugaucaccccuggcaccaacaccagcaaucagguggcagugcuguaccagggcgugaacuguaccgaagugcccguggccauucacgccgaucagcugacaccuacauggcggguguacuccaccggcagcaauguguuucagaccagagccggcugucugaucggagccgagcacgugaacaauagcuacgagugcgacauccccaucggcgcuggcaucugugccagcuaccagacacagacaaacagccccagacgggcuagaagcguggccagccagagcaucauugccuacacaaugucucugggcgccgagaacagcguggccuacuccaacaacucuaucgcuauccccaccaacuucaccaucagcgugaccaccgagauccugccuguguccaugaccaagaccagcguggacugcaccauguacaucugcggcgauuccaccgagugcuccaaccugcugcugcaguacggcagcuucugcacccagcugaauagagcccugacagggaucgccguggaacaggacaagaacacccaagagguguucgcccaagugaagcaaaucuacaagaccccuccuaucaaggacuucggcggcuucaauuucagccagauucugcccgauccuagcaagcccagcaagcggagcuucaucgaggaccugcuguucaacaaagugacacuggccgacgccggcuucaucaagcaguauggcgauugucugggcgacauugccgccagggaucugauuugcgcccagaaguuuaacggacugacagugcugccuccucugcugaccgaugagaugaucgcccaguacacaucugcccugcuggccggcacaaucacaagcggcuggacauuuggagcuggcgccgcucugcagauccccuuugcuaugcagauggccuaccgguucaacggcaucggagugacccagaaugugcuguacgagaaccagaagcugaucgccaaccaguucaacagcgccaucggcaagauccaggacagccugagcagcacagcaagcgcccugggaaagcugcaggacguggucaaccagaaugcccaggcacugaacacccuggucaagcagcuguccuccaacuucggcgccaucagcucugugcugaacgauauccugagcagacuggacaaggucgaggccgaggugcagaucgacagacugaucacaggcagacugcagagccuccagacauacgugacccagcagcugaucagagccgccgagauuagagccucugccaaucuggccgccaccaagaugucugagugugugcugggccagagcaagagaguggacuuuugcggcaagggcuaccaccugaugagcuucccucagucugccccucacggcgugguguuucugcacgugacauaugugcccgcucaagagaagaauuucaccaccgcuccagccaucugccacgacggcaaagcccacuuuccuagagaaggcguguucguguccaacggcacccauugguucgugacacagcggaacuucuacgagccccagaucaucaccaccgacaacaccuucgugucuggcaacugcgacguugugaucggcauugugaacaauaccguguacgacccucugcagcccgagcuggacagcuucaaagaggaacuggacaaguacuuuaagaaccacacaagccccgacguggaccugggcgauaucagcggaaucaaugccagcgucgugaacauccagaaagagaucgaccggcugaacgagguggccaagaaucugaacgagagccugaucgaccugcaagaacuggggaaguacgagcaguacaucaaguggcccugguacaucuggcugggcuuuaucgccggacugauugccaucgugauggucacaaucaugcuguguugcaugaccagcugcuguagcugccugaagggcuguuguagcuguggcagcugcugcaaguucgacgaggacgauucugagcccgugcugaagggcgugaaacugcacuacaccugaggacuagucccuguucccagagcccacuuuuuuuucuuuuuuugaaauaaaauagccugucuuucagaucucaaaggcucuuuucagagccaccaaaaaaaaaaaaaaaaaaaaaaaaaaaaaaaaaaaaaaaaaaaaaaaaaaaaaaaaaaaaaaaaaaaaaaaaaaaaaaaaaaaaaaaaaaaaaaaaaaaaa

SEQ ID NO: 23486 - RNA, 4094 nt, Artificial Sequence
  SARS-CoV-2/Wuhan/WIV05/2019__EPI_ISL_402128 spike protein mRNA gc mod (1-1273)(N501Y_D614G)
aggagagucccgcagucggcguccagcggcucugcuuguucgugugugugucguugcaggccuuauucaagcuuaccauguucguguuucuggugcugcugccccugguguccagccagugugugaaccugaccaccagaacacagcugccuccagccuacaccaacagcuucaccagaggcguguacuaccccgacaagguguucagauccagcgugcugcacucuacccaggaccuguuccugccuuucuucagcaacgugaccugguuccacgccauccacguguccggcaccaauggcaccaagagauucgacaaccccgugcugcccuucaacgacgggguguacuuugccagcaccgagaaguccaacaucaucagaggcuggaucuucggcaccacacuggacagcaagacccagagccugcugaucgugaacaacgccaccaacguggucaucaaagugugcgaguuccaguucugcaacgaccccuuccugggcgucuacuaccacaagaacaacaagagcuggauggaaagcgaguuccggguguacagcagcgccaacaacugcaccuucgaguacgugucccagccuuuccugauggaccuggaaggcaagcagggcaacuucaagaaccugcgcgaguucguguucaagaacaucgacggcuacuucaaaaucuacagcaagcacaccccuaucaaccucgugcgggaucugccucagggcuucucugcucuggaaccccugguggaucugcccaucggcaucaacaucacccgguuucagacacugcuggcccugcacagaagcuaccugacaccuggcgauagcagcagcggauggacagcuggugccgccgcuuacuaugugggcuaccugcagccuagaaccuuccugcugaaguacaacgagaacggcaccaucaccgacgccguggauugugcucuggauccucugagcgagacaaagugcacccugaaguccuucaccguggaaaagggcaucuaccagaccagcaacuuccgggugcagcccaccgaauccaucgugcgguuccccaauaucaccaaucugugccccuucggcgagguguucaaugccaccagauucgccucuguguacgccuggaaccggaagcggaucagcaauugcguggccgacuacuccgugcuguacaacuccgccagcuucagcaccuucaagugcuacggcguguccccuaccaagcugaacgaccugugcuucacaaacguguacgccgacagcuucgugauccggggagaugaagugcggcagauugccccuggacagacaggcaagaucgccgacuacaacuacaagcugcccgacgacuucaccggcugugugauugccuggaacagcaacaaccuggacuccaaagucggcggcaacuacaauuaccuguaccggcuguuccggaaguccaaucugaagcccuucgagcgggacaucagcaccgaaaucuaucaggccggcagcaccccuugcaacggcguggaaggcuucaacugcuacuucccacugcaguccuacggcuuucagcccacauacggcgugggcuaucagcccuacagagugguggugcugagcuucgaacugcugcaugcuccugccacagugugcggcccuaagaaaagcaccaaucucgugaagaacaaaugcgugaacuucaacuucaacggccugaccggcaccggcgugcugacagagagcaacaagaaguuccugccauuccagcaguuuggccgggauaucgccgauaccacagacgccguuagagauccccagacacuggaaauccuggacaucaccccaugcagcuucggcggagugucugugaucaccccuggcaccaacaccagcaaucagguggcagugcuguaccagggcgugaacuguaccgaagugcccguggccauucacgccgaucagcugacaccuacauggcggguguacuccaccggcagcaauguguuucagaccagagccggcugucugaucggagccgagcacgugaacaauagcuacgagugcgacauccccaucggcgcuggcaucugugccagcuaccagacacagacaaacagccccagacgggcuagaagcguggccagccagagcaucauugccuacacaaugucucugggcgccgagaacagcguggccuacuccaacaacucuaucgcuauccccaccaacuucaccaucagcgugaccaccgagauccugccuguguccaugaccaagaccagcguggacugcaccauguacaucugcggcgauuccaccgagugcuccaaccugcugcugcaguacggcagcuucugcacccagcugaauagagcccugacagggaucgccguggaacaggacaagaacacccaagagguguucgcccaagugaagcaaaucuacaagaccccuccuaucaaggacuucggcggcuucaauuucagccagauucugcccgauccuagcaagcccagcaagcggagcuucaucgaggaccugcuguucaacaaagugacacuggccgacgccggcuucaucaagcaguauggcgauugucugggcgacauugccgccagggaucugauuugcgcccagaaguuuaacggacugacagugcugccuccucugcugaccgaugagaugaucgcccaguacacaucugcccugcuggccggcacaaucacaagcggcuggacauuuggagcuggcgccgcucugcagauccccuuugcuaugcagauggccuaccgguucaacggcaucggagugacccagaaugugcuguacgagaaccagaagcugaucgccaaccaguucaacagcgccaucggcaagauccaggacagccugagcagcacagcaagcgcccugggaaagcugcaggacguggucaaccagaaugcccaggcacugaacacccuggucaagcagcuguccuccaacuucggcgccaucagcucugugcugaacgauauccugagcagacuggacaaggucgaggccgaggugcagaucgacagacugaucacaggcagacugcagagccuccagacauacgugacccagcagcugaucagagccgccgagauuagagccucugccaaucuggccgccaccaagaugucugagugugugcugggccagagcaagagaguggacuuuugcggcaagggcuaccaccugaugagcuucccucagucugccccucacggcgugguguuucugcacgugacauaugugcccgcucaagagaagaauuucaccaccgcuccagccaucugccacgacggcaaagcccacuuuccuagagaaggcguguucguguccaacggcacccauugguucgugacacagcggaacuucuacgagccccagaucaucaccaccgacaacaccuucgugucuggcaacugcgacguugugaucggcauugugaacaauaccguguacgacccucugcagcccgagcuggacagcuucaaagaggaacuggacaaguacuuuaagaaccacacaagccccgacguggaccugggcgauaucagcggaaucaaugccagcgucgugaacauccagaaagagaucgaccggcugaacgagguggccaagaaucugaacgagagccugaucgaccugcaagaacuggggaaguacgagcaguacaucaaguggcccugguacaucuggcugggcuuuaucgccggacugauugccaucgugauggucacaaucaugcuguguugcaugaccagcugcuguagcugccugaagggcuguuguagcuguggcagcugcugcaaguucgacgaggacgauucugagcccgugcugaagggcgugaaacugcacuacaccugaggacuagucccuguucccagagcccacuuuuuuuucuuuuuuugaaauaaaauagccugucuuucagaucucaaaggcucuuuucagagccaccaaaaaaaaaaaaaaaaaaaaaaaaaaaaaaaaaaaaaaaaaaaaaaaaaaaaaaaaaaaaaaaaaaaaaaaaaaaaaaaaaaaaaaaaaaaaaaaaaaaaa

SEQ ID NO: 23487 - RNA, 4088 nt, Artificial Sequence
  SARS-CoV-2/Wuhan/WIV05/2019__EPI_ISL_402128 spike protein mRNA gc mod (1-1273)(H69del_V70del_D614G)
aggagagucccgcagucggcguccagcggcucugcuuguucgugugugugucguugcaggccuuauucaagcuuaccauguucguguuucuggugcugcugccccugguguccagccagugugugaaccugaccaccagaacacagcugccuccagccuacaccaacagcuucaccagaggcguguacuaccccgacaagguguucagauccagcgugcugcacucuacccaggaccuguuccugccuuucuucagcaacgugaccugguuccacgccaucuccggcaccaauggcaccaagagauucgacaaccccgugcugcccuucaacgacgggguguacuuugccagcaccgagaaguccaacaucaucagaggcuggaucuucggcaccacacuggacagcaagacccagagccugcugaucgugaacaacgccaccaacguggucaucaaagugugcgaguuccaguucugcaacgaccccuuccugggcgucuacuaccacaagaacaacaagagcuggauggaaagcgaguuccggguguacagcagcgccaacaacugcaccuucgaguacgugucccagccuuuccugauggaccuggaaggcaagcagggcaacuucaagaaccugcgcgaguucguguucaagaacaucgacggcuacuucaaaaucuacagcaagcacaccccuaucaaccucgugcgggaucugccucagggcuucucugcucuggaaccccugguggaucugcccaucggcaucaacaucacccgguuucagacacugcuggcccugcacagaagcuaccugacaccuggcgauagcagcagcggauggacagcuggugccgccgcuuacuaugugggcuaccugcagccuagaaccuuccugcugaaguacaacgagaacggcaccaucaccgacgccguggauugugcucuggauccucugagcgagacaaagugcacccugaaguccuucaccguggaaaagggcaucuaccagaccagcaacuuccgggugcagcccaccgaauccaucgugcgguuccccaauaucaccaaucugugccccuucggcgagguguucaaugccaccagauucgccucuguguacgccuggaaccggaagcggaucagcaauugcguggccgacuacuccgugcuguacaacuccgccagcuucagcaccuucaagugcuacggcguguccccuaccaagcugaacgaccugugcuucacaaacguguacgccgacagcuucgugauccggggagaugaagugcggcagauugccccuggacagacaggcaagaucgccgacuacaacuacaagcugcccgacgacuucaccggcugugugauugccuggaacagcaacaaccuggacuccaaagucggcggcaacuacaauuaccuguaccggcuguuccggaaguccaaucugaagcccuucgagcgggacaucagcaccgaaaucuaucaggccggcagcaccccuugcaacggcguggaaggcuucaacugcuacuucccacugcaguccuacggcuuucagcccacaaauggcgugggcuaucagcccuacagagugguggugcugagcuucgaacugcugcaugcuccugccacagugugcggcccuaagaaaagcaccaaucucgugaagaacaaaugcgugaacuucaacuucaacggccugaccggcaccggcgugcugacagagagcaacaagaaguuccugccauuccagcaguuuggccgggauaucgccgauaccacagacgccguuagagauccccagacacuggaaauccuggacaucaccccaugcagcuucggcggagugucugugaucaccccuggcaccaacaccagcaaucagguggcagugcuguaccagggcgugaacuguaccgaagugcccguggccauucacgccgaucagcugacaccuacauggcggguguacuccaccggcagcaauguguuucagaccagagccggcugucugaucggagccgagcacgugaacaauagcuacgagugcgacauccccaucggcgcuggcaucugugccagcuaccagacacagacaaacagccccagacgggcuagaagcguggccagccagagcaucauugccuacacaaugucucugggcgccgagaacagcguggccuacuccaacaacucuaucgcuauccccaccaacuucaccaucagcgugaccaccgagauccugccuguguccaugaccaagaccagcguggacugcaccauguacaucugcggcgauuccaccgagugcuccaaccugcugcugcaguacggcagcuucugcacccagcugaauagagcccugacagggaucgccguggaacaggacaagaacacccaagagguguucgcccaagugaagcaaaucuacaagaccccuccuaucaaggacuucggcggcuucaauuucagccagauucugcccgauccuagcaagcccagcaagcggagcuucaucgaggaccugcuguucaacaaagugacacuggccgacgccggcuucaucaagcaguauggcgauugucugggcgacauugccgccagggaucugauuugcgcccagaaguuuaacggacugacagugcugccuccucugcugaccgaugagaugaucgcccaguacacaucugcccugcuggccggcacaaucacaagcggcuggacauuuggagcuggcgccgcucugcagauccccuuugcuaugcagauggccuaccgguucaacggcaucggagugacccagaaugugcuguacgagaaccagaagcugaucgccaaccaguucaacagcgccaucggcaagauccaggacagccugagcagcacagcaagcgcccugggaaagcugcaggacguggucaaccagaaugcccaggcacugaacacccuggucaagcagcuguccuccaacuucggcgccaucagcucugugcugaacgauauccugagcagacuggacaaggucgaggccgaggugcagaucgacagacugaucacaggcagacugcagagccuccagacauacgugacccagcagcugaucagagccgccgagauuagagccucugccaaucuggccgccaccaagaugucugagugugugcugggccagagcaagagaguggacuuuugcggcaagggcuaccaccugaugagcuucccucagucugccccucacggcgugguguuucugcacgugacauaugugcccgcucaagagaagaauuucaccaccgcuccagccaucugccacgacggcaaagcccacuuuccuagagaaggcguguucguguccaacggcacccauugguucgugacacagcggaacuucuacgagccccagaucaucaccaccgacaacaccuucgugucuggcaacugcgacguugugaucggcauugugaacaauaccguguacgacccucugcagcccgagcuggacagcuucaaagaggaacuggacaaguacuuuaagaaccacacaagccccgacguggaccugggcgauaucagcggaaucaaugccagcgucgugaacauccagaaagagaucgaccggcugaacgagguggccaagaaucugaacgagagccugaucgaccugcaagaacuggggaaguacgagcaguacaucaaguggcccugguacaucuggcugggcuuuaucgccggacugauugccaucgugauggucacaaucaugcuguguugcaugaccagcugcuguagcugccugaagggcuguuguagcuguggcagcugcugcaaguucgacgaggacgauucugagcccgugcugaagggcgugaaacugcacuacaccugaggacuagucccuguucccagagcccacuuuuuuuucuuuuuuugaaauaaaauagccugucuuucagaucucaaaggcucuuuucagagccaccaaaaaaaaaaaaaaaaaaaaaaaaaaaaaaaaaaaaaaaaaaaaaaaaaaaaaaaaaaaaaaaaaaaaaaaaaaaaaaaaaaaaaaaaaaaaaaaaaaaaa

SEQ ID NO: 23488 - RNA, 4094 nt, Artificial Sequence
  SARS-CoV-2/Wuhan/WIV05/2019__EPI_ISL_402128 spike protein mRNA gc mod (1-1273)(Y453F_D614G)
aggagagucccgcagucggcguccagcggcucugcuuguucgugugugugucguugcaggccuuauucaagcuuaccauguucguguuucuggugcugcugccccugguguccagccagugugugaaccugaccaccagaacacagcugccuccagccuacaccaacagcuucaccagaggcguguacuaccccgacaagguguucagauccagcgugcugcacucuacccaggaccuguuccugccuuucuucagcaacgugaccugguuccacgccauccacguguccggcaccaauggcaccaagagauucgacaaccccgugcugcccuucaacgacgggguguacuuugccagcaccgagaaguccaacaucaucagaggcuggaucuucggcaccacacuggacagcaagacccagagccugcugaucgugaacaacgccaccaacguggucaucaaagugugcgaguuccaguucugcaacgaccccuuccugggcgucuacuaccacaagaacaacaagagcuggauggaaagcgaguuccggguguacagcagcgccaacaacugcaccuucgaguacgugucccagccuuuccugauggaccuggaaggcaagcagggcaacuucaagaaccugcgcgaguucguguucaagaacaucgacggcuacuucaaaaucuacagcaagcacaccccuaucaaccucgugcgggaucugccucagggcuucucugcucuggaaccccugguggaucugcccaucggcaucaacaucacccgguuucagacacugcuggcccugcacagaagcuaccugacaccuggcgauagcagcagcggauggacagcuggugccgccgcuuacuaugugggcuaccugcagccuagaaccuuccugcugaaguacaacgagaacggcaccaucaccgacgccguggauugugcucuggauccucugagcgagacaaagugcacccugaaguccuucaccguggaaaagggcaucuaccagaccagcaacuuccgggugcagcccaccgaauccaucgugcgguuccccaauaucaccaaucugugccccuucggcgagguguucaaugccaccagauucgccucuguguacgccuggaaccggaagcggaucagcaauugcguggccgacuacuccgugcuguacaacuccgccagcuucagcaccuucaagugcuacggcguguccccuaccaagcugaacgaccugugcuucacaaacguguacgccgacagcuucgugauccggggagaugaagugcggcagauugccccuggacagacaggcaagaucgccgacuacaacuacaagcugcccgacgacuucaccggcugugugauugccuggaacagcaacaaccuggacuccaaagucggcggcaacuacaauuaccuguuccggcuguuccggaaguccaaucugaagcccuucgagcgggacaucagcaccgaaaucuaucaggccggcagcaccccuugcaacggcguggaaggcuucaacugcuacuucccacugcaguccuacggcuuucagcccacaaauggcgugggcuaucagcccuacagagugguggugcugagcuucgaacugcugcaugcuccugccacagugugcggcccuaagaaaagcaccaaucucgugaagaacaaaugcgugaacuucaacuucaacggccugaccggcaccggcgugcugacagagagcaacaagaaguuccugccauuccagcaguuuggccgggauaucgccgauaccacagacgccguuagagauccccagacacuggaaauccuggacaucaccccaugcagcuucggcggagugucugugaucaccccuggcaccaacaccagcaaucagguggcagugcuguaccagggcgugaacuguaccgaagugcccguggccauucacgccgaucagcugacaccuacauggcggguguacuccaccggcagcaauguguuucagaccagagccggcugucugaucggagccgagcacgugaacaauagcuacgagugcgacauccccaucggcgcuggcaucugugccagcuaccagacacagacaaacagccccagacgggcuagaagcguggccagccagagcaucauugccuacacaaugucucugggcgccgagaacagcguggccuacuccaacaacucuaucgcuauccccaccaacuucaccaucagcgugaccaccgagauccugccuguguccaugaccaagaccagcguggacugcaccauguacaucugcggcgauuccaccgagugcuccaaccugcugcugcaguacggcagcuucugcacccagcugaauagagcccugacagggaucgccguggaacaggacaagaacacccaagagguguucgcccaagugaagcaaaucuacaagaccccuccuaucaaggacuucggcggcuucaauuucagccagauucugcccgauccuagcaagcccagcaagcggagcuucaucgaggaccugcuguucaacaaagugacacuggccgacgccggcuucaucaagcaguauggcgauugucugggcgacauugccgccagggaucugauuugcgcccagaaguuuaacggacugacagugcugccuccucugcugaccgaugagaugaucgcccaguacacaucugcccugcuggccggcacaaucacaagcggcuggacauuuggagcuggcgccgcucugcagauccccuuugcuaugcagauggccuaccgguucaacggcaucggagugacccagaaugugcuguacgagaaccagaagcugaucgccaaccaguucaacagcgccaucggcaagauccaggacagccugagcagcacagcaagcgcccugggaaagcugcaggacguggucaaccagaaugcccaggcacugaacacccuggucaagcagcuguccuccaacuucggcgccaucagcucugugcugaacgauauccugagcagacuggacaaggucgaggccgaggugcagaucgacagacugaucacaggcagacugcagagccuccagacauacgugacccagcagcugaucagagccgccgagauuagagccucugccaaucuggccgccaccaagaugucugagugugugcugggccagagcaagagaguggacuuuugcggcaagggcuaccaccugaugagcuucccucagucugccccucacggcgugguguuucugcacgugacauaugugcccgcucaagagaagaauuucaccaccgcuccagccaucugccacgacggcaaagcccacuuuccuagagaaggcguguucguguccaacggcacccauugguucgugacacagcggaacuucuacgagccccagaucaucaccaccgacaacaccuucgugucuggcaacugcgacguugugaucggcauugugaacaauaccguguacgacccucugcagcccgagcuggacagcuucaaagaggaacuggacaaguacuuuaagaaccacacaagccccgacguggaccugggcgauaucagcggaaucaaugccagcgucgugaacauccagaaagagaucgaccggcugaacgagguggccaagaaucugaacgagagccugaucgaccugcaagaacuggggaaguacgagcaguacaucaaguggcccugguacaucuggcugggcuuuaucgccggacugauugccaucgugauggucacaaucaugcuguguugcaugaccagcugcuguagcugccugaagggcuguuguagcuguggcagcugcugcaaguucgacgaggacgauucugagcccgugcugaagggcgugaaacugcacuacaccugaggacuagucccuguucccagagcccacuuuuuuuucuuuuuuugaaauaaaauagccugucuuucagaucucaaaggcucuuuucagagccaccaaaaaaaaaaaaaaaaaaaaaaaaaaaaaaaaaaaaaaaaaaaaaaaaaaaaaaaaaaaaaaaaaaaaaaaaaaaaaaaaaaaaaaaaaaaaaaaaaaaaa

SEQ ID NO: 23489 - RNA, 4094 nt, Artificial Sequence
  SARS-CoV-2/Wuhan/WIV05/2019__EPI_ISL_402128 spike protein mRNA gc mod (1-1273)(D614G_I692V)
aggagagucccgcagucggcguccagcggcucugcuuguucgugugugugucguugcaggccuuauucaagcuuaccauguucguguuucuggugcugcugccccugguguccagccagugugugaaccugaccaccagaacacagcugccuccagccuacaccaacagcuucaccagaggcguguacuaccccgacaagguguucagauccagcgugcugcacucuacccaggaccuguuccugccuuucuucagcaacgugaccugguuccacgccauccacguguccggcaccaauggcaccaagagauucgacaaccccgugcugcccuucaacgacgggguguacuuugccagcaccgagaaguccaacaucaucagaggcuggaucuucggcaccacacuggacagcaagacccagagccugcugaucgugaacaacgccaccaacguggucaucaaagugugcgaguuccaguucugcaacgaccccuuccugggcgucuacuaccacaagaacaacaagagcuggauggaaagcgaguuccggguguacagcagcgccaacaacugcaccuucgaguacgugucccagccuuuccugauggaccuggaaggcaagcagggcaacuucaagaaccugcgcgaguucguguucaagaacaucgacggcuacuucaaaaucuacagcaagcacaccccuaucaaccucgugcgggaucugccucagggcuucucugcucuggaaccccugguggaucugcccaucggcaucaacaucacccgguuucagacacugcuggcccugcacagaagcuaccugacaccuggcgauagcagcagcggauggacagcuggugccgccgcuuacuaugugggcuaccugcagccuagaaccuuccugcugaaguacaacgagaacggcaccaucaccgacgccguggauugugcucuggauccucugagcgagacaaagugcacccugaaguccuucaccguggaaaagggcaucuaccagaccagcaacuuccgggugcagcccaccgaauccaucgugcgguuccccaauaucaccaaucugugccccuucggcgagguguucaaugccaccagauucgccucuguguacgccuggaaccggaagcggaucagcaauugcguggccgacuacuccgugcuguacaacuccgccagcuucagcaccuucaagugcuacggcguguccccuaccaagcugaacgaccugugcuucacaaacguguacgccgacagcuucgugauccggggagaugaagugcggcagauugccccuggacagacaggcaagaucgccgacuacaacuacaagcugcccgacgacuucaccggcugugugauugccuggaacagcaacaaccuggacuccaaagucggcggcaacuacaauuaccuguaccggcuguuccggaaguccaaucugaagcccuucgagcgggacaucagcaccgaaaucuaucaggccggcagcaccccuugcaacggcguggaaggcuucaacugcuacuucccacugcaguccuacggcuuucagcccacaaauggcgugggcuaucagcccuacagagugguggugcugagcuucgaacugcugcaugcuccugccacagugugcggcccuaagaaaagcaccaaucucgugaagaacaaaugcgugaacuucaacuucaacggccugaccggcaccggcgugcugacagagagcaacaagaaguuccugccauuccagcaguuuggccgggauaucgccgauaccacagacgccguuagagauccccagacacuggaaauccuggacaucaccccaugcagcuucggcggagugucugugaucaccccuggcaccaacaccagcaaucagguggcagugcuguaccagggcgugaacuguaccgaagugcccguggccauucacgccgaucagcugacaccuacauggcggguguacuccaccggcagcaauguguuucagaccagagccggcugucugaucggagccgagcacgugaacaauagcuacgagugcgacauccccaucggcgcuggcaucugugccagcuaccagacacagacaaacagccccagacgggcuagaagcguggccagccagagcgugauugccuacacaaugucucugggcgccgagaacagcguggccuacuccaacaacucuaucgcuauccccaccaacuucaccaucagcgugaccaccgagauccugccuguguccaugaccaagaccagcguggacugcaccauguacaucugcggcgauuccaccgagugcuccaaccugcugcugcaguacggcagcuucugcacccagcugaauagagcccugacagggaucgccguggaacaggacaagaacacccaagagguguucgcccaagugaagcaaaucuacaagaccccuccuaucaaggacuucggcggcuucaauuucagccagauucugcccgauccuagcaagcccagcaagcggagcuucaucgaggaccugcuguucaacaaagugacacuggccgacgccggcuucaucaagcaguauggcgauugucugggcgacauugccgccagggaucugauuugcgcccagaaguuuaacggacugacagugcugccuccucugcugaccgaugagaugaucgcccaguacacaucugcccugcuggccggcacaaucacaagcggcuggacauuuggagcuggcgccgcucugcagauccccuuugcuaugcagauggccuaccgguucaacggcaucggagugacccagaaugugcuguacgagaaccagaagcugaucgccaaccaguucaacagcgccaucggcaagauccaggacagccugagcagcacagcaagcgcccugggaaagcugcaggacguggucaaccagaaugcccaggcacugaacacccuggucaagcagcuguccuccaacuucggcgccaucagcucugugcugaacgauauccugagcagacuggacaaggucgaggccgaggugcagaucgacagacugaucacaggcagacugcagagccuccagacauacgugacccagcagcugaucagagccgccgagauuagagccucugccaaucuggccgccaccaagaugucugagugugugcugggccagagcaagagaguggacuuuugcggcaagggcuaccaccugaugagcuucccucagucugccccucacggcgugguguuucugcacgugacauaugugcccgcucaagagaagaauuucaccaccgcuccagccaucugccacgacggcaaagcccacuuuccuagagaaggcguguucguguccaacggcacccauugguucgugacacagcggaacuucuacgagccccagaucaucaccaccgacaacaccuucgugucuggcaacugcgacguugugaucggcauugugaacaauaccguguacgacccucugcagcccgagcuggacagcuucaaagaggaacuggacaaguacuuuaagaaccacacaagccccgacguggaccugggcgauaucagcggaaucaaugccagcgucgugaacauccagaaagagaucgaccggcugaacgagguggccaagaaucugaacgagagccugaucgaccugcaagaacuggggaaguacgagcaguacaucaaguggcccugguacaucuggcugggcuuuaucgccggacugauugccaucgugauggucacaaucaugcuguguugcaugaccagcugcuguagcugccugaagggcuguuguagcuguggcagcugcugcaaguucgacgaggacgauucugagcccgugcugaagggcgugaaacugcacuacaccugaggacuagucccuguucccagagcccacuuuuuuuucuuuuuuugaaauaaaauagccugucuuucagaucucaaaggcucuuuucagagccaccaaaaaaaaaaaaaaaaaaaaaaaaaaaaaaaaaaaaaaaaaaaaaaaaaaaaaaaaaaaaaaaaaaaaaaaaaaaaaaaaaaaaaaaaaaaaaaaaaaaaa

SEQ ID NO: 23490 - RNA, 4094 nt, Artificial Sequence
  SARS-CoV-2/Wuhan/WIV05/2019__EPI_ISL_402128 spike protein mRNA gc mod (1-1273)(D614G_M1229I)
aggagagucccgcagucggcguccagcggcucugcuuguucgugugugugucguugcaggccuuauucaagcuuaccauguucguguuucuggugcugcugccccugguguccagccagugugugaaccugaccaccagaacacagcugccuccagccuacaccaacagcuucaccagaggcguguacuaccccgacaagguguucagauccagcgugcugcacucuacccaggaccuguuccugccuuucuucagcaacgugaccugguuccacgccauccacguguccggcaccaauggcaccaagagauucgacaaccccgugcugcccuucaacgacgggguguacuuugccagcaccgagaaguccaacaucaucagaggcuggaucuucggcaccacacuggacagcaagacccagagccugcugaucgugaacaacgccaccaacguggucaucaaagugugcgaguuccaguucugcaacgaccccuuccugggcgucuacuaccacaagaacaacaagagcuggauggaaagcgaguuccggguguacagcagcgccaacaacugcaccuucgaguacgugucccagccuuuccugauggaccuggaaggcaagcagggcaacuucaagaaccugcgcgaguucguguucaagaacaucgacggcuacuucaaaaucuacagcaagcacaccccuaucaaccucgugcgggaucugccucagggcuucucugcucuggaaccccugguggaucugcccaucggcaucaacaucacccgguuucagacacugcuggcccugcacagaagcuaccugacaccuggcgauagcagcagcggauggacagcuggugccgccgcuuacuaugugggcuaccugcagccuagaaccuuccugcugaaguacaacgagaacggcaccaucaccgacgccguggauugugcucuggauccucugagcgagacaaagugcacccugaaguccuucaccguggaaaagggcaucuaccagaccagcaacuuccgggugcagcccaccgaauccaucgugcgguuccccaauaucaccaaucugugccccuucggcgagguguucaaugccaccagauucgccucuguguacgccuggaaccggaagcggaucagcaauugcguggccgacuacuccgugcuguacaacuccgccagcuucagcaccuucaagugcuacggcguguccccuaccaagcugaacgaccugugcuucacaaacguguacgccgacagcuucgugauccggggagaugaagugcggcagauugccccuggacagacaggcaagaucgccgacuacaacuacaagcugcccgacgacuucaccggcugugugauugccuggaacagcaacaaccuggacuccaaagucggcggcaacuacaauuaccuguaccggcuguuccggaaguccaaucugaagcccuucgagcgggacaucagcaccgaaaucuaucaggccggcagcaccccuugcaacggcguggaaggcuucaacugcuacuucccacugcaguccuacggcuuucagcccacaaauggcgugggcuaucagcccuacagagugguggugcugagcuucgaacugcugcaugcuccugccacagugugcggcccuaagaaaagcaccaaucucgugaagaacaaaugcgugaacuucaacuucaacggccugaccggcaccggcgugcugacagagagcaacaagaaguuccugccauuccagcaguuuggccgggauaucgccgauaccacagacgccguuagagauccccagacacuggaaauccuggacaucaccccaugcagcuucggcggagugucugugaucaccccuggcaccaacaccagcaaucagguggcagugcuguaccagggcgugaacuguaccgaagugcccguggccauucacgccgaucagcugacaccuacauggcggguguacuccaccggcagcaauguguuucagaccagagccggcugucugaucggagccgagcacgugaacaauagcuacgagugcgacauccccaucggcgcuggcaucugugccagcuaccagacacagacaaacagccccagacgggcuagaagcguggccagccagagcaucauugccuacacaaugucucugggcgccgagaacagcguggccuacuccaacaacucuaucgcuauccccaccaacuucaccaucagcgugaccaccgagauccugccuguguccaugaccaagaccagcguggacugcaccauguacaucugcggcgauuccaccgagugcuccaaccugcugcugcaguacggcagcuucugcacccagcugaauagagcccugacagggaucgccguggaacaggacaagaacacccaagagguguucgcccaagugaagcaaaucuacaagaccccuccuaucaaggacuucggcggcuucaauuucagccagauucugcccgauccuagcaagcccagcaagcggagcuucaucgaggaccugcuguucaacaaagugacacuggccgacgccggcuucaucaagcaguauggcgauugucugggcgacauugccgccagggaucugauuugcgcccagaaguuuaacggacugacagugcugccuccucugcugaccgaugagaugaucgcccaguacacaucugcccugcuggccggcacaaucacaagcggcuggacauuuggagcuggcgccgcucugcagauccccuuugcuaugcagauggccuaccgguucaacggcaucggagugacccagaaugugcuguacgagaaccagaagcugaucgccaaccaguucaacagcgccaucggcaagauccaggacagccugagcagcacagcaagcgcccugggaaagcugcaggacguggucaaccagaaugcccaggcacugaacacccuggucaagcagcuguccuccaacuucggcgccaucagcucugugcugaacgauauccugagcagacuggacaaggucgaggccgaggugcagaucgacagacugaucacaggcagacugcagagccuccagacauacgugacccagcagcugaucagagccgccgagauuagagccucugccaaucuggccgccaccaagaugucugagugugugcugggccagagcaagagaguggacuuuugcggcaagggcuaccaccugaugagcuucccucagucugccccucacggcgugguguuucugcacgugacauaugugcccgcucaagagaagaauuucaccaccgcuccagccaucugccacgacggcaaagcccacuuuccuagagaaggcguguucguguccaacggcacccauugguucgugacacagcggaacuucuacgagccccagaucaucaccaccgacaacaccuucgugucuggcaacugcgacguugugaucggcauugugaacaauaccguguacgacccucugcagcccgagcuggacagcuucaaagaggaacuggacaaguacuuuaagaaccacacaagccccgacguggaccugggcgauaucagcggaaucaaugccagcgucgugaacauccagaaagagaucgaccggcugaacgagguggccaagaaucugaacgagagccugaucgaccugcaagaacuggggaaguacgagcaguacaucaaguggcccugguacaucuggcugggcuuuaucgccggacugauugccaucgugaucgucacaaucaugcuguguugcaugaccagcugcuguagcugccugaagggcuguuguagcuguggcagcugcugcaaguucgacgaggacgauucugagcccgugcugaagggcgugaaacugcacuacaccugaggacuagucccuguucccagagcccacuuuuuuuucuuuuuuugaaauaaaauagccugucuuucagaucucaaaggcucuuuucagagccaccaaaaaaaaaaaaaaaaaaaaaaaaaaaaaaaaaaaaaaaaaaaaaaaaaaaaaaaaaaaaaaaaaaaaaaaaaaaaaaaaaaaaaaaaaaaaaaaaaaaaa

SEQ ID NO: 23491 - RNA, 4088 nt, Artificial Sequence
  SARS-CoV-2/Wuhan/WIV05/2019__EPI_ISL_402128 spike protein mRNA gc mod (1-1273)(H69del_V70del_A222V_Y453F_S477N_D614G_I692V)
aggagagucccgcagucggcguccagcggcucugcuuguucgugugugugucguugcaggccuuauucaagcuuaccauguucguguuucuggugcugcugccccugguguccagccagugugugaaccugaccaccagaacacagcugccuccagccuacaccaacagcuucaccagaggcguguacuaccccgacaagguguucagauccagcgugcugcacucuacccaggaccuguuccugccuuucuucagcaacgugaccugguuccacgccaucuccggcaccaauggcaccaagagauucgacaaccccgugcugcccuucaacgacgggguguacuuugccagcaccgagaaguccaacaucaucagaggcuggaucuucggcaccacacuggacagcaagacccagagccugcugaucgugaacaacgccaccaacguggucaucaaagugugcgaguuccaguucugcaacgaccccuuccugggcgucuacuaccacaagaacaacaagagcuggauggaaagcgaguuccggguguacagcagcgccaacaacugcaccuucgaguacgugucccagccuuuccugauggaccuggaaggcaagcagggcaacuucaagaaccugcgcgaguucguguucaagaacaucgacggcuacuucaaaaucuacagcaagcacaccccuaucaaccucgugcgggaucugccucagggcuucucugugcuggaaccccugguggaucugcccaucggcaucaacaucacccgguuucagacacugcuggcccugcacagaagcuaccugacaccuggcgauagcagcagcggauggacagcuggugccgccgcuuacuaugugggcuaccugcagccuagaaccuuccugcugaaguacaacgagaacggcaccaucaccgacgccguggauugugcucuggauccucugagcgagacaaagugcacccugaaguccuucaccguggaaaagggcaucuaccagaccagcaacuuccgggugcagcccaccgaauccaucgugcgguuccccaauaucaccaaucugugccccuucggcgagguguucaaugccaccagauucgccucuguguacgccuggaaccggaagcggaucagcaauugcguggccgacuacuccgugcuguacaacuccgccagcuucagcaccuucaagugcuacggcguguccccuaccaagcugaacgaccugugcuucacaaacguguacgccgacagcuucgugauccggggagaugaagugcggcagauugccccuggacagacaggcaagaucgccgacuacaacuacaagcugcccgacgacuucaccggcugugugauugccuggaacagcaacaaccuggacuccaaagucggcggcaacuacaauuaccuguuccggcuguuccggaaguccaaucugaagcccuucgagcgggacaucagcaccgaaaucuaucaggccggcaacaccccuugcaacggcguggaaggcuucaacugcuacuucccacugcaguccuacggcuuucagcccacaaauggcgugggcuaucagcccuacagagugguggugcugagcuucgaacugcugcaugcuccugccacagugugcggcccuaagaaaagcaccaaucucgugaagaacaaaugcgugaacuucaacuucaacggccugaccggcaccggcgugcugacagagagcaacaagaaguuccugccauuccagcaguuuggccgggauaucgccgauaccacagacgccguuagagauccccagacacuggaaauccuggacaucaccccaugcagcuucggcggagugucugugaucaccccuggcaccaacaccagcaaucagguggcagugcuguaccagggcgugaacuguaccgaagugcccguggccauucacgccgaucagcugacaccuacauggcggguguacuccaccggcagcaauguguuucagaccagagccggcugucugaucggagccgagcacgugaacaauagcuacgagugcgacauccccaucggcgcuggcaucugugccagcuaccagacacagacaaacagccccagacgggcuagaagcguggccagccagagcgugauugccuacacaaugucucugggcgccgagaacagcguggccuacuccaacaacucuaucgcuauccccaccaacuucaccaucagcgugaccaccgagauccugccuguguccaugaccaagaccagcguggacugcaccauguacaucugcggcgauuccaccgagugcuccaaccugcugcugcaguacggcagcuucugcacccagcugaauagagcccugacagggaucgccguggaacaggacaagaacacccaagagguguucgcccaagugaagcaaaucuacaagaccccuccuaucaaggacuucggcggcuucaauuucagccagauucugcccgauccuagcaagcccagcaagcggagcuucaucgaggaccugcuguucaacaaagugacacuggccgacgccggcuucaucaagcaguauggcgauugucugggcgacauugccgccagggaucugauuugcgcccagaaguuuaacggacugacagugcugccuccucugcugaccgaugagaugaucgcccaguacacaucugcccugcuggccggcacaaucacaagcggcuggacauuuggagcuggcgccgcucugcagauccccuuugcuaugcagauggccuaccgguucaacggcaucggagugacccagaaugugcuguacgagaaccagaagcugaucgccaaccaguucaacagcgccaucggcaagauccaggacagccugagcagcacagcaagcgcccugggaaagcugcaggacguggucaaccagaaugcccaggcacugaacacccuggucaagcagcuguccuccaacuucggcgccaucagcucugugcugaacgauauccugagcagacuggacaaggucgaggccgaggugcagaucgacagacugaucacaggcagacugcagagccuccagacauacgugacccagcagcugaucagagccgccgagauuagagccucugccaaucuggccgccaccaagaugucugagugugugcugggccagagcaagagaguggacuuuugcggcaagggcuaccaccugaugagcuucccucagucugccccucacggcgugguguuucugcacgugacauaugugcccgcucaagagaagaauuucaccaccgcuccagccaucugccacgacggcaaagcccacuuuccuagagaaggcguguucguguccaacggcacccauugguucgugacacagcggaacuucuacgagccccagaucaucaccaccgacaacaccuucgugucuggcaacugcgacguugugaucggcauugugaacaauaccguguacgacccucugcagcccgagcuggacagcuucaaagaggaacuggacaaguacuuuaagaaccacacaagccccgacguggaccugggcgauaucagcggaaucaaugccagcgucgugaacauccagaaagagaucgaccggcugaacgagguggccaagaaucugaacgagagccugaucgaccugcaagaacuggggaaguacgagcaguacaucaaguggcccugguacaucuggcugggcuuuaucgccggacugauugccaucgugauggucacaaucaugcuguguugcaugaccagcugcuguagcugccugaagggcuguuguagcuguggcagcugcugcaaguucgacgaggacgauucugagcccgugcugaagggcgugaaacugcacuacaccugaggacuagucccuguucccagagcccacuuuuuuuucuuuuuuugaaauaaaauagccugucuuucagaucucaaaggcucuuuucagagccaccaaaaaaaaaaaaaaaaaaaaaaaaaaaaaaaaaaaaaaaaaaaaaaaaaaaaaaaaaaaaaaaaaaaaaaaaaaaaaaaaaaaaaaaaaaaaaaaaaaaaa

SEQ ID NO: 23492 - RNA, 4088 nt, Artificial Sequence
  SARS-CoV-2/Wuhan/WIV05/2019__EPI_ISL_402128 spike protein mRNA gc mod (1-1273)(H69del_V70del_Y453F_D614G_I692V_M1229I)
aggagagucccgcagucggcguccagcggcucugcuuguucgugugugugucguugcaggccuuauucaagcuuaccauguucguguuucuggugcugcugccccugguguccagccagugugugaaccugaccaccagaacacagcugccuccagccuacaccaacagcuucaccagaggcguguacuaccccgacaagguguucagauccagcgugcugcacucuacccaggaccuguuccugccuuucuucagcaacgugaccugguuccacgccaucuccggcaccaauggcaccaagagauucgacaaccccgugcugcccuucaacgacgggguguacuuugccagcaccgagaaguccaacaucaucagaggcuggaucuucggcaccacacuggacagcaagacccagagccugcugaucgugaacaacgccaccaacguggucaucaaagugugcgaguuccaguucugcaacgaccccuuccugggcgucuacuaccacaagaacaacaagagcuggauggaaagcgaguuccggguguacagcagcgccaacaacugcaccuucgaguacgugucccagccuuuccugauggaccuggaaggcaagcagggcaacuucaagaaccugcgcgaguucguguucaagaacaucgacggcuacuucaaaaucuacagcaagcacaccccuaucaaccucgugcgggaucugccucagggcuucucugcucuggaaccccugguggaucugcccaucggcaucaacaucacccgguuucagacacugcuggcccugcacagaagcuaccugacaccuggcgauagcagcagcggauggacagcuggugccgccgcuuacuaugugggcuaccugcagccuagaaccuuccugcugaaguacaacgagaacggcaccaucaccgacgccguggauugugcucuggauccucugagcgagacaaagugcacccugaaguccuucaccguggaaaagggcaucuaccagaccagcaacuuccgggugcagcccaccgaauccaucgugcgguuccccaauaucaccaaucugugccccuucggcgagguguucaaugccaccagauucgccucuguguacgccuggaaccggaagcggaucagcaauugcguggccgacuacuccgugcuguacaacuccgccagcuucagcaccuucaagugcuacggcguguccccuaccaagcugaacgaccugugcuucacaaacguguacgccgacagcuucgugauccggggagaugaagugcggcagauugccccuggacagacaggcaagaucgccgacuacaacuacaagcugcccgacgacuucaccggcugugugauugccuggaacagcaacaaccuggacuccaaagucggcggcaacuacaauuaccuguuccggcuguuccggaaguccaaucugaagcccuucgagcgggacaucagcaccgaaaucuaucaggccggcagcaccccuugcaacggcguggaaggcuucaacugcuacuucccacugcaguccuacggcuuucagcccacaaauggcgugggcuaucagcccuacagagugguggugcugagcuucgaacugcugcaugcuccugccacagugugcggcccuaagaaaagcaccaaucucgugaagaacaaaugcgugaacuucaacuucaacggccugaccggcaccggcgugcugacagagagcaacaagaaguuccugccauuccagcaguuuggccgggauaucgccgauaccacagacgccguuagagauccccagacacuggaaauccuggacaucaccccaugcagcuucggcggagugucugugaucaccccuggcaccaacaccagcaaucagguggcagugcuguaccagggcgugaacuguaccgaagugcccguggccauucacgccgaucagcugacaccuacauggcggguguacuccaccggcagcaauguguuucagaccagagccggcugucugaucggagccgagcacgugaacaauagcuacgagugcgacauccccaucggcgcuggcaucugugccagcuaccagacacagacaaacagccccagacgggcuagaagcguggccagccagagcgugauugccuacacaaugucucugggcgccgagaacagcguggccuacuccaacaacucuaucgcuauccccaccaacuucaccaucagcgugaccaccgagauccugccuguguccaugaccaagaccagcguggacugcaccauguacaucugcggcgauuccaccgagugcuccaaccugcugcugcaguacggcagcuucugcacccagcugaauagagcccugacagggaucgccguggaacaggacaagaacacccaagagguguucgcccaagugaagcaaaucuacaagaccccuccuaucaaggacuucggcggcuucaauuucagccagauucugcccgauccuagcaagcccagcaagcggagcuucaucgaggaccugcuguucaacaaagugacacuggccgacgccggcuucaucaagcaguauggcgauugucugggcgacauugccgccagggaucugauuugcgcccagaaguuuaacggacugacagugcugccuccucugcugaccgaugagaugaucgcccaguacacaucugcccugcuggccggcacaaucacaagcggcuggacauuuggagcuggcgccgcucugcagauccccuuugcuaugcagauggccuaccgguucaacggcaucggagugacccagaaugugcuguacgagaaccagaagcugaucgccaaccaguucaacagcgccaucggcaagauccaggacagccugagcagcacagcaagcgcccugggaaagcugcaggacguggucaaccagaaugcccaggcacugaacacccuggucaagcagcuguccuccaacuucggcgccaucagcucugugcugaacgauauccugagcagacuggacaaggucgaggccgaggugcagaucgacagacugaucacaggcagacugcagagccuccagacauacgugacccagcagcugaucagagccgccgagauuagagccucugccaaucuggccgccaccaagaugucugagugugugcugggccagagcaagagaguggacuuuugcggcaagggcuaccaccugaugagcuucccucagucugccccucacggcgugguguuucugcacgugacauaugugcccgcucaagagaagaauuucaccaccgcuccagccaucugccacgacggcaaagcccacuuuccuagagaaggcguguucguguccaacggcacccauugguucgugacacagcggaacuucuacgagccccagaucaucaccaccgacaacaccuucgugucuggcaacugcgacguugugaucggcauugugaacaauaccguguacgacccucugcagcccgagcuggacagcuucaaagaggaacuggacaaguacuuuaagaaccacacaagccccgacguggaccugggcgauaucagcggaaucaaugccagcgucgugaacauccagaaagagaucgaccggcugaacgagguggccaagaaucugaacgagagccugaucgaccugcaagaacuggggaaguacgagcaguacaucaaguggcccugguacaucuggcugggcuuuaucgccggacugauugccaucgugaucgucacaaucaugcuguguugcaugaccagcugcuguagcugccugaagggcuguuguagcuguggcagcugcugcaaguucgacgaggacgauucugagcccgugcugaagggcgugaaacugcacuacaccugaggacuagucccuguucccagagcccacuuuuuuuucuuuuuuugaaauaaaauagccugucuuucagaucucaaaggcucuuuucagagccaccaaaaaaaaaaaaaaaaaaaaaaaaaaaaaaaaaaaaaaaaaaaaaaaaaaaaaaaaaaaaaaaaaaaaaaaaaaaaaaaaaaaaaaaaaaaaaaaaaaaaa

SEQ ID NO: 23493 - RNA, 4085 nt, Artificial Sequence
  SARS-CoV-2/Wuhan/WIV05/2019__EPI_ISL_402128 spike protein mRNA gc mod (1-1273)(H69del_V70del_Y144del_N501Y_A570D_D614G_P681H_T716I_S982 A_D1118H)
aggagagucccgcagucggcguccagcggcucugcuuguucgugugugugucguugcaggccuuauucaagcuuaccauguucguguuucuggugcugcugccccugguguccagccagugugugaaccugaccaccagaacacagcugccuccagccuacaccaacagcuucaccagaggcguguacuaccccgacaagguguucagauccagcgugcugcacucuacccaggaccuguuccugccuuucuucagcaacgugaccugguuccacgccaucuccggcaccaauggcaccaagagauucgacaaccccgugcugcccuucaacgacgggguguacuuugccagcaccgagaaguccaacaucaucagaggcuggaucuucggcaccacacuggacagcaagacccagagccugcugaucgugaacaacgccaccaacguggucaucaaagugugcgaguuccaguucugcaacgaccccuuccugggcgucuaccacaagaacaacaagagcuggauggaaagcgaguuccggguguacagcagcgccaacaacugcaccuucgaguacgugucccagccuuuccugauggaccuggaaggcaagcagggcaacuucaagaaccugcgcgaguucguguucaagaacaucgacggcuacuucaaaaucuacagcaagcacaccccuaucaaccucgugcgggaucugccucagggcuucucugcucuggaaccccugguggaucugcccaucggcaucaacaucacccgguuucagacacugcuggcccugcacagaagcuaccugacaccuggcgauagcagcagcggauggacagcuggugccgccgcuuacuaugugggcuaccugcagccuagaaccuuccugcugaaguacaacgagaacggcaccaucaccgacgccguggauugugcucuggauccucugagcgagacaaagugcacccugaaguccuucaccguggaaaagggcaucuaccagaccagcaacuuccgggugcagcccaccgaauccaucgugcgguuccccaauaucaccaaucugugccccuucggcgagguguucaaugccaccagauucgccucuguguacgccuggaaccggaagcggaucagcaauugcguggccgacuacuccgugcuguacaacuccgccagcuucagcaccuucaagugcuacggcguguccccuaccaagcugaacgaccugugcuucacaaacguguacgccgacagcuucgugauccggggagaugaagugcggcagauugccccuggacagacaggcaagaucgccgacuacaacuacaagcugcccgacgacuucaccggcugugugauugccuggaacagcaacaaccuggacuccaaagucggcggcaacuacaauuaccuguaccggcuguuccggaaguccaaucugaagcccuucgagcgggacaucagcaccgaaaucuaucaggccggcagcaccccuugcaacggcguggaaggcuucaacugcuacuucccacugcaguccuacggcuuucagcccacauacggcgugggcuaucagcccuacagagugguggugcugagcuucgaacugcugcaugcuccugccacagugugcggcccuaagaaaagcaccaaucucgugaagaacaaaugcgugaacuucaacuucaacggccugaccggcaccggcgugcugacagagagcaacaagaaguuccugccauuccagcaguuuggccgggauaucgacgauaccacagacgccguuagagauccccagacacuggaaauccuggacaucaccccaugcagcuucggcggagugucugugaucaccccuggcaccaacaccagcaaucagguggcagugcuguaccagggcgugaacuguaccgaagugcccguggccauucacgccgaucagcugacaccuacauggcggguguacuccaccggcagcaauguguuucagaccagagccggcugucugaucggagccgagcacgugaacaauagcuacgagugcgacauccccaucggcgcuggcaucugugccagcuaccagacacagacaaacagccacagacgggcuagaagcguggccagccagagcaucauugccuacacaaugucucugggcgccgagaacagcguggccuacuccaacaacucuaucgcuauccccaucaacuucaccaucagcgugaccaccgagauccugccuguguccaugaccaagaccagcguggacugcaccauguacaucugcggcgauuccaccgagugcuccaaccugcugcugcaguacggcagcuucugcacccagcugaauagagcccugacagggaucgccguggaacaggacaagaacacccaagagguguucgcccaagugaagcaaaucuacaagaccccuccuaucaaggacuucggcggcuucaauuucagccagauucugcccgauccuagcaagcccagcaagcggagcuucaucgaggaccugcuguucaacaaagugacacuggccgacgccggcuucaucaagcaguauggcgauugucugggcgacauugccgccagggaucugauuugcgcccagaaguuuaacggacugacagugcugccuccucugcugaccgaugagaugaucgcccaguacacaucugcccugcuggccggcacaaucacaagcggcuggacauuuggagcuggcgccgcucugcagauccccuuugcuaugcagauggccuaccgguucaacggcaucggagugacccagaaugugcuguacgagaaccagaagcugaucgccaaccaguucaacagcgccaucggcaagauccaggacagccugagcagcacagcaagcgcccugggaaagcugcaggacguggucaaccagaaugcccaggcacugaacacccuggucaagcagcuguccuccaacuucggcgccaucagcucugugcugaacgauauccuggccagacuggacaaggucgaggccgaggugcagaucgacagacugaucacaggcagacugcagagccuccagacauacgugacccagcagcugaucagagccgccgagauuagagccucugccaaucuggccgccaccaagaugucugagugugugcugggccagagcaagagaguggacuuuugcggcaagggcuaccaccugaugagcuucccucagucugccccucacggcgugguguuucugcacgugacauaugugcccgcucaagagaagaauuucaccaccgcuccagccaucugccacgacggcaaagcccacuuuccuagagaaggcguguucguguccaacggcacccauugguucgugacacagcggaacuucuacgagccccagaucaucaccacccacaacaccuucgugucuggcaacugcgacguugugaucggcauugugaacaauaccguguacgacccucugcagcccgagcuggacagcuucaaagaggaacuggacaaguacuuuaagaaccacacaagccccgacguggaccugggcgauaucagcggaaucaaugccagcgucgugaacauccagaaagagaucgaccggcugaacgagguggccaagaaucugaacgagagccugaucgaccugcaagaacuggggaaguacgagcaguacaucaaguggcccugguacaucuggcugggcuuuaucgccggacugauugccaucgugauggucacaaucaugcuguguugcaugaccagcugcuguagcugccugaagggcuguuguagcuguggcagcugcugcaaguucgacgaggacgauucugagcccgugcugaagggcgugaaacugcacuacaccugaggacuagucccuguucccagagcccacuuuuuuuucuuuuuuugaaauaaaauagccugucuuucagaucucaaaggcucuuuucagagccaccaaaaaaaaaaaaaaaaaaaaaaaaaaaaaaaaaaaaaaaaaaaaaaaaaaaaaaaaaaaaaaaaaaaaaaaaaaaaaaaaaaaaaaaaaaaaaaaaaaaaa

SEQ ID NO: 23494 - RNA, 4094 nt, Artificial Sequence
  SARS-CoV-2/Wuhan/WIV05/2019__EPI_ISL_402128 spike protein mRNA gc mod (1-1273)(K417N_E484K_N501Y_D614G)
aggagagucccgcagucggcguccagcggcucugcuuguucgugugugugucguugcaggccuuauucaagcuuaccauguucguguuucuggugcugcugccccugguguccagccagugugugaaccugaccaccagaacacagcugccuccagccuacaccaacagcuucaccagaggcguguacuaccccgacaagguguucagauccagcgugcugcacucuacccaggaccuguuccugccuuucuucagcaacgugaccugguuccacgccauccacguguccggcaccaauggcaccaagagauucgacaaccccgugcugcccuucaacgacgggguguacuuugccagcaccgagaaguccaacaucaucagaggcuggaucuucggcaccacacuggacagcaagacccagagccugcugaucgugaacaacgccaccaacguggucaucaaagugugcgaguuccaguucugcaacgaccccuuccugggcgucuacuaccacaagaacaacaagagcuggauggaaagcgaguuccggguguacagcagcgccaacaacugcaccuucgaguacgugucccagccuuuccugauggaccuggaaggcaagcagggcaacuucaagaaccugcgcgaguucguguucaagaacaucgacggcuacuucaaaaucuacagcaagcacaccccuaucaaccucgugcgggaucugccucagggcuucucugcucuggaaccccugguggaucugcccaucggcaucaacaucacccgguuucagacacugcuggcccugcacagaagcuaccugacaccuggcgauagcagcagcggauggacagcuggugccgccgcuuacuaugugggcuaccugcagccuagaaccuuccugcugaaguacaacgagaacggcaccaucaccgacgccguggauugugcucuggauccucugagcgagacaaagugcacccugaaguccuucaccguggaaaagggcaucuaccagaccagcaacuuccgggugcagcccaccgaauccaucgugcgguuccccaauaucaccaaucugugccccuucggcgagguguucaaugccaccagauucgccucuguguacgccuggaaccggaagcggaucagcaauugcguggccgacuacuccgugcuguacaacuccgccagcuucagcaccuucaagugcuacggcguguccccuaccaagcugaacgaccugugcuucacaaacguguacgccgacagcuucgugauccggggagaugaagugcggcagauugccccuggacagacaggcaacaucgccgacuacaacuacaagcugcccgacgacuucaccggcugugugauugccuggaacagcaacaaccuggacuccaaagucggcggcaacuacaauuaccuguaccggcuguuccggaaguccaaucugaagcccuucgagcgggacaucagcaccgaaaucuaucaggccggcagcaccccuugcaacggcgugaagggcuucaacugcuacuucccacugcaguccuacggcuuucagcccacauacggcgugggcuaucagcccuacagagugguggugcugagcuucgaacugcugcaugcuccugccacagugugcggcccuaagaaaagcaccaaucucgugaagaacaaaugcgugaacuucaacuucaacggccugaccggcaccggcgugcugacagagagcaacaagaaguuccugccauuccagcaguuuggccgggauaucgccgauaccacagacgccguuagagauccccagacacuggaaauccuggacaucaccccaugcagcuucggcggagugucugugaucaccccuggcaccaacaccagcaaucagguggcagugcuguaccagggcgugaacuguaccgaagugcccguggccauucacgccgaucagcugacaccuacauggcggguguacuccaccggcagcaauguguuucagaccagagccggcugucugaucggagccgagcacgugaacaauagcuacgagugcgacauccccaucggcgcuggcaucugugccagcuaccagacacagacaaacagccccagacgggcuagaagcguggccagccagagcaucauugccuacacaaugucucugggcgccgagaacagcguggccuacuccaacaacucuaucgcuauccccaccaacuucaccaucagcgugaccaccgagauccugccuguguccaugaccaagaccagcguggacugcaccauguacaucugcggcgauuccaccgagugcuccaaccugcugcugcaguacggcagcuucugcacccagcugaauagagcccugacagggaucgccguggaacaggacaagaacacccaagagguguucgcccaagugaagcaaaucuacaagaccccuccuaucaaggacuucggcggcuucaauuucagccagauucugcccgauccuagcaagcccagcaagcggagcuucaucgaggaccugcuguucaacaaagugacacuggccgacgccggcuucaucaagcaguauggcgauugucugggcgacauugccgccagggaucugauuugcgcccagaaguuuaacggacugacagugcugccuccucugcugaccgaugagaugaucgcccaguacacaucugcccugcuggccggcacaaucacaagcggcuggacauuuggagcuggcgccgcucugcagauccccuuugcuaugcagauggccuaccgguucaacggcaucggagugacccagaaugugcuguacgagaaccagaagcugaucgccaaccaguucaacagcgccaucggcaagauccaggacagccugagcagcacagcaagcgcccugggaaagcugcaggacguggucaaccagaaugcccaggcacugaacacccuggucaagcagcuguccuccaacuucggcgccaucagcucugugcugaacgauauccugagcagacuggacaaggucgaggccgaggugcagaucgacagacugaucacaggcagacugcagagccuccagacauacgugacccagcagcugaucagagccgccgagauuagagccucugccaaucuggccgccaccaagaugucugagugugugcugggccagagcaagagaguggacuuuugcggcaagggcuaccaccugaugagcuucccucagucugccccucacggcgugguguuucugcacgugacauaugugcccgcucaagagaagaauuucaccaccgcuccagccaucugccacgacggcaaagcccacuuuccuagagaaggcguguucguguccaacggcacccauugguucgugacacagcggaacuucuacgagccccagaucaucaccaccgacaacaccuucgugucuggcaacugcgacguugugaucggcauugugaacaauaccguguacgacccucugcagcccgagcuggacagcuucaaagaggaacuggacaaguacuuuaagaaccacacaagccccgacguggaccugggcgauaucagcggaaucaaugccagcgucgugaacauccagaaagagaucgaccggcugaacgagguggccaagaaucugaacgagagccugaucgaccugcaagaacuggggaaguacgagcaguacaucaaguggcccugguacaucuggcugggcuuuaucgccggacugauugccaucgugauggucacaaucaugcuguguugcaugaccagcugcuguagcugccugaagggcuguuguagcuguggcagcugcugcaaguucgacgaggacgauucugagcccgugcugaagggcgugaaacugcacuacaccugaggacuagucccuguucccagagcccacuuuuuuuucuuuuuuugaaauaaaauagccugucuuucagaucucaaaggcucuuuucagagccaccaaaaaaaaaaaaaaaaaaaaaaaaaaaaaaaaaaaaaaaaaaaaaaaaaaaaaaaaaaaaaaaaaaaaaaaaaaaaaaaaaaaaaaaaaaaaaaaaaaaaa

SEQ ID NO: 23495 - RNA, 4085 nt, Artificial Sequence
  SARS-CoV-2/Wuhan/WIV05/2019__EPI_ISL_402128 spike protein mRNA gc mod (1-1273)(L18F_D80A_D215G_L242del_A243del_L244del_R246I_K417N_E484 K_N501Y_D614G_A701V)
aggagagucccgcagucggcguccagcggcucugcuuguucgugugugugucguugcaggccuuauucaagcuuaccauguucguguuucuggugcugcugccccugguguccagccagugugugaacuucaccaccagaacacagcugccuccagccuacaccaacagcuucaccagaggcguguacuaccccgacaagguguucagauccagcgugcugcacucuacccaggaccuguuccugccuuucuucagcaacgugaccugguuccacgccauccacguguccggcaccaauggcaccaagagauucgccaaccccgugcugcccuucaacgacgggguguacuuugccagcaccgagaaguccaacaucaucagaggcuggaucuucggcaccacacuggacagcaagacccagagccugcugaucgugaacaacgccaccaacguggucaucaaagugugcgaguuccaguucugcaacgaccccuuccugggcgucuacuaccacaagaacaacaagagcuggauggaaagcgaguuccggguguacagcagcgccaacaacugcaccuucgaguacgugucccagccuuuccugauggaccuggaaggcaagcagggcaacuucaagaaccugcgcgaguucguguucaagaacaucgacggcuacuucaaaaucuacagcaagcacaccccuaucaaccucgugcggggccugccucagggcuucucugcucuggaaccccugguggaucugcccaucggcaucaacaucacccgguuucagacacugcacaucagcuaccugacaccuggcgauagcagcagcggauggacagcuggugccgccgcuuacuaugugggcuaccugcagccuagaaccuuccugcugaaguacaacgagaacggcaccaucaccgacgccguggauugugcucuggauccucugagcgagacaaagugcacccugaaguccuucaccguggaaaagggcaucuaccagaccagcaacuuccgggugcagcccaccgaauccaucgugcgguuccccaauaucaccaaucugugccccuucggcgagguguucaaugccaccagauucgccucuguguacgccuggaaccggaagcggaucagcaauugcguggccgacuacuccgugcuguacaacuccgccagcuucagcaccuucaagugcuacggcguguccccuaccaagcugaacgaccugugcuucacaaacguguacgccgacagcuucgugauccggggagaugaagugcggcagauugccccuggacagacaggcaacaucgccgacuacaacuacaagcugcccgacgacuucaccggcugugugauugccuggaacagcaacaaccuggacuccaaagucggcggcaacuacaauuaccuguaccggcuguuccggaaguccaaucugaagcccuucgagcgggacaucagcaccgaaaucuaucaggccggcagcaccccuugcaacggcgugaagggcuucaacugcuacuucccacugcaguccuacggcuuucagcccacauacggcgugggcuaucagcccuacagagugguggugcugagcuucgaacugcugcaugcuccugccacagugugcggcccuaagaaaagcaccaaucucgugaagaacaaaugcgugaacuucaacuucaacggccugaccggcaccggcgugcugacagagagcaacaagaaguuccugccauuccagcaguuuggccgggauaucgccgauaccacagacgccguuagagauccccagacacuggaaauccuggacaucaccccaugcagcuucggcggagugucugugaucaccccuggcaccaacaccagcaaucagguggcagugcuguaccagggcgugaacuguaccgaagugcccguggccauucacgccgaucagcugacaccuacauggcggguguacuccaccggcagcaauguguuucagaccagagccggcugucugaucggagccgagcacgugaacaauagcuacgagugcgacauccccaucggcgcuggcaucugugccagcuaccagacacagacaaacagccccagacgggcuagaagcguggccagccagagcaucauugccuacacaaugucucugggcguggagaacagcguggccuacuccaacaacucuaucgcuauccccaccaacuucaccaucagcgugaccaccgagauccugccuguguccaugaccaagaccagcguggacugcaccauguacaucugcggcgauuccaccgagugcuccaaccugcugcugcaguacggcagcuucugcacccagcugaauagagcccugacagggaucgccguggaacaggacaagaacacccaagagguguucgcccaagugaagcaaaucuacaagaccccuccuaucaaggacuucggcggcuucaauuucagccagauucugcccgauccuagcaagcccagcaagcggagcuucaucgaggaccugcuguucaacaaagugacacuggccgacgccggcuucaucaagcaguauggcgauugucugggcgacauugccgccagggaucugauuugcgcccagaaguuuaacggacugacagugcugccuccucugcugaccgaugagaugaucgcccaguacacaucugcccugcuggccggcacaaucacaagcggcuggacauuuggagcuggcgccgcucugcagauccccuuugcuaugcagauggccuaccgguucaacggcaucggagugacccagaaugugcuguacgagaaccagaagcugaucgccaaccaguucaacagcgccaucggcaagauccaggacagccugagcagcacagcaagcgcccugggaaagcugcaggacguggucaaccagaaugcccaggcacugaacacccuggucaagcagcuguccuccaacuucggcgccaucagcucugugcugaacgauauccugagcagacuggacaaggucgaggccgaggugcagaucgacagacugaucacaggcagacugcagagccuccagacauacgugacccagcagcugaucagagccgccgagauuagagccucugccaaucuggccgccaccaagaugucugagugugugcugggccagagcaagagaguggacuuuugcggcaagggcuaccaccugaugagcuucccucagucugccccucacggcgugguguuucugcacgugacauaugugcccgcucaagagaagaauuucaccaccgcuccagccaucugccacgacggcaaagcccacuuuccuagagaaggcguguucguguccaacggcacccauugguucgugacacagcggaacuucuacgagccccagaucaucaccaccgacaacaccuucgugucuggcaacugcgacguugugaucggcauugugaacaauaccguguacgacccucugcagcccgagcuggacagcuucaaagaggaacuggacaaguacuuuaagaaccacacaagccccgacguggaccugggcgauaucagcggaaucaaugccagcgucgugaacauccagaaagagaucgaccggcugaacgagguggccaagaaucugaacgagagccugaucgaccugcaagaacuggggaaguacgagcaguacaucaaguggcccugguacaucuggcugggcuuuaucgccggacugauugccaucgugauggucacaaucaugcuguguugcaugaccagcugcuguagcugccugaagggcuguuguagcuguggcagcugcugcaaguucgacgaggacgauucugagcccgugcugaagggcgugaaacugcacuacaccugaggacuagucccuguucccagagcccacuuuuuuuucuuuuuuugaaauaaaauagccugucuuucagaucucaaaggcucuuuucagagccaccaaaaaaaaaaaaaaaaaaaaaaaaaaaaaaaaaaaaaaaaaaaaaaaaaaaaaaaaaaaaaaaaaaaaaaaaaaaaaaaaaaaaaaaaaaaaaaaaaaaaa

SEQ ID NO: 23496 - RNA, 4094 nt, Artificial Sequence
  SARS-CoV-2/Wuhan/WIV05/2019__EPI_ISL_402128 spike protein mRNA gc mod (1-1273)(E484K_D614G)
aggagagucccgcagucggcguccagcggcucugcuuguucgugugugugucguugcaggccuuauucaagcuuaccauguucguguuucuggugcugcugccccugguguccagccagugugugaaccugaccaccagaacacagcugccuccagccuacaccaacagcuucaccagaggcguguacuaccccgacaagguguucagauccagcgugcugcacucuacccaggaccuguuccugccuuucuucagcaacgugaccugguuccacgccauccacguguccggcaccaauggcaccaagagauucgacaaccccgugcugcccuucaacgacgggguguacuuugccagcaccgagaaguccaacaucaucagaggcuggaucuucggcaccacacuggacagcaagacccagagccugcugaucgugaacaacgccaccaacguggucaucaaagugugcgaguuccaguucugcaacgaccccuuccugggcgucuacuaccacaagaacaacaagagcuggauggaaagcgaguuccggguguacagcagcgccaacaacugcaccuucgaguacgugucccagccuuuccugauggaccuggaaggcaagcagggcaacuucaagaaccugcgcgaguucguguucaagaacaucgacggcuacuucaaaaucuacagcaagcacaccccuaucaaccucgugcgggaucugccucagggcuucucugcucuggaaccccugguggaucugcccaucggcaucaacaucacccgguuucagacacugcuggcccugcacagaagcuaccugacaccuggcgauagcagcagcggauggacagcuggugccgccgcuuacuaugugggcuaccugcagccuagaaccuuccugcugaaguacaacgagaacggcaccaucaccgacgccguggauugugcucuggauccucugagcgagacaaagugcacccugaaguccuucaccguggaaaagggcaucuaccagaccagcaacuuccgggugcagcccaccgaauccaucgugcgguuccccaauaucaccaaucugugccccuucggcgagguguucaaugccaccagauucgccucuguguacgccuggaaccggaagcggaucagcaauugcguggccgacuacuccgugcuguacaacuccgccagcuucagcaccuucaagugcuacggcguguccccuaccaagcugaacgaccugugcuucacaaacguguacgccgacagcuucgugauccggggagaugaagugcggcagauugccccuggacagacaggcaagaucgccgacuacaacuacaagcugcccgacgacuucaccggcugugugauugccuggaacagcaacaaccuggacuccaaagucggcggcaacuacaauuaccuguaccggcuguuccggaaguccaaucugaagcccuucgagcgggacaucagcaccgaaaucuaucaggccggcagcaccccuugcaacggcgugaagggcuucaacugcuacuucccacugcaguccuacggcuuucagcccacaaauggcgugggcuaucagcccuacagagugguggugcugagcuucgaacugcugcaugcuccugccacagugugcggcccuaagaaaagcaccaaucucgugaagaacaaaugcgugaacuucaacuucaacggccugaccggcaccggcgugcugacagagagcaacaagaaguuccugccauuccagcaguuuggccgggauaucgccgauaccacagacgccguuagagauccccagacacuggaaauccuggacaucaccccaugcagcuucggcggagugucugugaucaccccuggcaccaacaccagcaaucagguggcagugcuguaccagggcgugaacuguaccgaagugcccguggccauucacgccgaucagcugacaccuacauggcggguguacuccaccggcagcaauguguuucagaccagagccggcugucugaucggagccgagcacgugaacaauagcuacgagugcgacauccccaucggcgcuggcaucugugccagcuaccagacacagacaaacagccccagacgggcuagaagcguggccagccagagcaucauugccuacacaaugucucugggcgccgagaacagcguggccuacuccaacaacucuaucgcuauccccaccaacuucaccaucagcgugaccaccgagauccugccuguguccaugaccaagaccagcguggacugcaccauguacaucugcggcgauuccaccgagugcuccaaccugcugcugcaguacggcagcuucugcacccagcugaauagagcccugacagggaucgccguggaacaggacaagaacacccaagagguguucgcccaagugaagcaaaucuacaagaccccuccuaucaaggacuucggcggcuucaauuucagccagauucugcccgauccuagcaagcccagcaagcggagcuucaucgaggaccugcuguucaacaaagugacacuggccgacgccggcuucaucaagcaguauggcgauugucugggcgacauugccgccagggaucugauuugcgcccagaaguuuaacggacugacagugcugccuccucugcugaccgaugagaugaucgcccaguacacaucugcccugcuggccggcacaaucacaagcggcuggacauuuggagcuggcgccgcucugcagauccccuuugcuaugcagauggccuaccgguucaacggcaucggagugacccagaaugugcuguacgagaaccagaagcugaucgccaaccaguucaacagcgccaucggcaagauccaggacagccugagcagcacagcaagcgcccugggaaagcugcaggacguggucaaccagaaugcccaggcacugaacacccuggucaagcagcuguccuccaacuucggcgccaucagcucugugcugaacgauauccugagcagacuggacaaggucgaggccgaggugcagaucgacagacugaucacaggcagacugcagagccuccagacauacgugacccagcagcugaucagagccgccgagauuagagccucugccaaucuggccgccaccaagaugucugagugugugcugggccagagcaagagaguggacuuuugcggcaagggcuaccaccugaugagcuucccucagucugccccucacggcgugguguuucugcacgugacauaugugcccgcucaagagaagaauuucaccaccgcuccagccaucugccacgacggcaaagcccacuuuccuagagaaggcguguucguguccaacggcacccauugguucgugacacagcggaacuucuacgagccccagaucaucaccaccgacaacaccuucgugucuggcaacugcgacguugugaucggcauugugaacaauaccguguacgacccucugcagcccgagcuggacagcuucaaagaggaacuggacaaguacuuuaagaaccacacaagccccgacguggaccugggcgauaucagcggaaucaaugccagcgucgugaacauccagaaagagaucgaccggcugaacgagguggccaagaaucugaacgagagccugaucgaccugcaagaacuggggaaguacgagcaguacaucaaguggcccugguacaucuggcugggcuuuaucgccggacugauugccaucgugauggucacaaucaugcuguguugcaugaccagcugcuguagcugccugaagggcuguuguagcuguggcagcugcugcaaguucgacgaggacgauucugagcccgugcugaagggcgugaaacugcacuacaccugaggacuagucccuguucccagagcccacuuuuuuuucuuuuuuugaaauaaaauagccugucuuucagaucucaaaggcucuuuucagagccaccaaaaaaaaaaaaaaaaaaaaaaaaaaaaaaaaaaaaaaaaaaaaaaaaaaaaaaaaaaaaaaaaaaaaaaaaaaaaaaaaaaaaaaaaaaaaaaaaaaaaa

SEQ ID NO: 23497 - RNA, 4094 nt, Artificial Sequence
  SARS-CoV-2/Wuhan/WIV05/2019__EPI_ISL_402128 spike protein mRNA gc mod (1-1273)(L18F_T20N_P26S_D138Y_R190S_K417T_E484K_N501Y_D614G_H655Y _T1027I)
aggagagucccgcagucggcguccagcggcucugcuuguucgugugugugucguugcaggccuuauucaagcuuaccauguucguguuucuggugcugcugccccugguguccagccagugugugaacuucaccaacagaacacagcugccuagcgccuacaccaacagcuucaccagaggcguguacuaccccgacaagguguucagauccagcgugcugcacucuacccaggaccuguuccugccuuucuucagcaacgugaccugguuccacgccauccacguguccggcaccaauggcaccaagagauucgacaaccccgugcugcccuucaacgacgggguguacuuugccagcaccgagaaguccaacaucaucagaggcuggaucuucggcaccacacuggacagcaagacccagagccugcugaucgugaacaacgccaccaacguggucaucaaagugugcgaguuccaguucugcaacuaccccuuccugggcgucuacuaccacaagaacaacaagagcuggauggaaagcgaguuccggguguacagcagcgccaacaacugcaccuucgaguacgugucccagccuuuccugauggaccuggaaggcaagcagggcaacuucaagaaccugagcgaguucguguucaagaacaucgacggcuacuucaaaaucuacagcaagcacaccccuaucaaccucgugcgggaucugccucagggcuucucugcucuggaaccccugguggaucugcccaucggcaucaacaucacccgguuucagacacugcuggcccugcacagaagcuaccugacaccuggcgauagcagcagcggauggacagcuggugccgccgcuuacuaugugggcuaccugcagccuagaaccuuccugcugaaguacaacgagaacggcaccaucaccgacgccguggauugugcucuggauccucugagcgagacaaagugcacccugaaguccuucaccguggaaaagggcaucuaccagaccagcaacuuccgggugcagcccaccgaauccaucgugcgguuccccaauaucaccaaucugugccccuucggcgagguguucaaugccaccagauucgccucuguguacgccuggaaccggaagcggaucagcaauugcguggccgacuacuccgugcuguacaacuccgccagcuucagcaccuucaagugcuacggcguguccccuaccaagcugaacgaccugugcuucacaaacguguacgccgacagcuucgugauccggggagaugaagugcggcagauugccccuggacagacaggcaccaucgccgacuacaacuacaagcugcccgacgacuucaccggcugugugauugccuggaacagcaacaaccuggacuccaaagucggcggcaacuacaauuaccuguaccggcuguuccggaaguccaaucugaagcccuucgagcgggacaucagcaccgaaaucuaucaggccggcagcaccccuugcaacggcgugaagggcuucaacugcuacuucccacugcaguccuacggcuuucagcccacauacggcgugggcuaucagcccuacagagugguggugcugagcuucgaacugcugcaugcuccugccacagugugcggcccuaagaaaagcaccaaucucgugaagaacaaaugcgugaacuucaacuucaacggccugaccggcaccggcgugcugacagagagcaacaagaaguuccugccauuccagcaguuuggccgggauaucgccgauaccacagacgccguuagagauccccagacacuggaaauccuggacaucaccccaugcagcuucggcggagugucugugaucaccccuggcaccaacaccagcaaucagguggcagugcuguaccagggcgugaacuguaccgaagugcccguggccauucacgccgaucagcugacaccuacauggcggguguacuccaccggcagcaauguguuucagaccagagccggcugucugaucggagccgaguacgugaacaauagcuacgagugcgacauccccaucggcgcuggcaucugugccagcuaccagacacagacaaacagccccagacgggcuagaagcguggccagccagagcaucauugccuacacaaugucucugggcgccgagaacagcguggccuacuccaacaacucuaucgcuauccccaccaacuucaccaucagcgugaccaccgagauccugccuguguccaugaccaagaccagcguggacugcaccauguacaucugcggcgauuccaccgagugcuccaaccugcugcugcaguacggcagcuucugcacccagcugaauagagcccugacagggaucgccguggaacaggacaagaacacccaagagguguucgcccaagugaagcaaaucuacaagaccccuccuaucaaggacuucggcggcuucaauuucagccagauucugcccgauccuagcaagcccagcaagcggagcuucaucgaggaccugcuguucaacaaagugacacuggccgacgccggcuucaucaagcaguauggcgauugucugggcgacauugccgccagggaucugauuugcgcccagaaguuuaacggacugacagugcugccuccucugcugaccgaugagaugaucgcccaguacacaucugcccugcuggccggcacaaucacaagcggcuggacauuuggagcuggcgccgcucugcagauccccuuugcuaugcagauggccuaccgguucaacggcaucggagugacccagaaugugcuguacgagaaccagaagcugaucgccaaccaguucaacagcgccaucggcaagauccaggacagccugagcagcacagcaagcgcccugggaaagcugcaggacguggucaaccagaaugcccaggcacugaacacccuggucaagcagcuguccuccaacuucggcgccaucagcucugugcugaacgauauccugagcagacuggacaaggucgaggccgaggugcagaucgacagacugaucacaggcagacugcagagccuccagacauacgugacccagcagcugaucagagccgccgagauuagagccucugccaaucuggccgccaucaagaugucugagugugugcugggccagagcaagagaguggacuuuugcggcaagggcuaccaccugaugagcuucccucagucugccccucacggcgugguguuucugcacgugacauaugugcccgcucaagagaagaauuucaccaccgcuccagccaucugccacgacggcaaagcccacuuuccuagagaaggcguguucguguccaacggcacccauugguucgugacacagcggaacuucuacgagccccagaucaucaccaccgacaacaccuucgugucuggcaacugcgacguugugaucggcauugugaacaauaccguguacgacccucugcagcccgagcuggacagcuucaaagaggaacuggacaaguacuuuaagaaccacacaagccccgacguggaccugggcgauaucagcggaaucaaugccagcgucgugaacauccagaaagagaucgaccggcugaacgagguggccaagaaucugaacgagagccugaucgaccugcaagaacuggggaaguacgagcaguacaucaaguggcccugguacaucuggcugggcuuuaucgccggacugauugccaucgugauggucacaaucaugcuguguugcaugaccagcugcuguagcugccugaagggcuguuguagcuguggcagcugcugcaaguucgacgaggacgauucugagcccgugcugaagggcgugaaacugcacuacaccugaggacuagucccuguucccagagcccacuuuuuuuucuuuuuuugaaauaaaauagccugucuuucagaucucaaaggcucuuuucagagccaccaaaaaaaaaaaaaaaaaaaaaaaaaaaaaaaaaaaaaaaaaaaaaaaaaaaaaaaaaaaaaaaaaaaaaaaaaaaaaaaaaaaaaaaaaaaaaaaaaaaaa

SEQ ID NO: 23498 - RNA, 4094 nt, Artificial Sequence
  SARS-CoV-2/Wuhan/WIV05/2019__EPI_ISL_402128 spike protein mRNA gc mod (1-1273)(S13I_W152C_L452R_D614G)
aggagagucccgcagucggcguccagcggcucugcuuguucgugugugugucguugcaggccuuauucaagcuuaccauguucguguuucuggugcugcugccccugguguccauccagugugugaaccugaccaccagaacacagcugccuccagccuacaccaacagcuucaccagaggcguguacuaccccgacaagguguucagauccagcgugcugcacucuacccaggaccuguuccugccuuucuucagcaacgugaccugguuccacgccauccacguguccggcaccaauggcaccaagagauucgacaaccccgugcugcccuucaacgacgggguguacuuugccagcaccgagaaguccaacaucaucagaggcuggaucuucggcaccacacuggacagcaagacccagagccugcugaucgugaacaacgccaccaacguggucaucaaagugugcgaguuccaguucugcaacgaccccuuccugggcgucuacuaccacaagaacaacaagagcugcauggaaagcgaguuccggguguacagcagcgccaacaacugcaccuucgaguacgugucccagccuuuccugauggaccuggaaggcaagcagggcaacuucaagaaccugcgcgaguucguguucaagaacaucgacggcuacuucaaaaucuacagcaagcacaccccuaucaaccucgugcgggaucugccucagggcuucucugcucuggaaccccugguggaucugcccaucggcaucaacaucacccgguuucagacacugcuggcccugcacagaagcuaccugacaccuggcgauagcagcagcggauggacagcuggugccgccgcuuacuaugugggcuaccugcagccuagaaccuuccugcugaaguacaacgagaacggcaccaucaccgacgccguggauugugcucuggauccucugagcgagacaaagugcacccugaaguccuucaccguggaaaagggcaucuaccagaccagcaacuuccgggugcagcccaccgaauccaucgugcgguuccccaauaucaccaaucugugccccuucggcgagguguucaaugccaccagauucgccucuguguacgccuggaaccggaagcggaucagcaauugcguggccgacuacuccgugcuguacaacuccgccagcuucagcaccuucaagugcuacggcguguccccuaccaagcugaacgaccugugcuucacaaacguguacgccgacagcuucgugauccggggagaugaagugcggcagauugccccuggacagacaggcaagaucgccgacuacaacuacaagcugcccgacgacuucaccggcugugugauugccuggaacagcaacaaccuggacuccaaagucggcggcaacuacaauuaccgcuaccggcuguuccggaaguccaaucugaagcccuucgagcgggacaucagcaccgaaaucuaucaggccggcagcaccccuugcaacggcguggaaggcuucaacugcuacuucccacugcaguccuacggcuuucagcccacaaauggcgugggcuaucagcccuacagagugguggugcugagcuucgaacugcugcaugcuccugccacagugugcggcccuaagaaaagcaccaaucucgugaagaacaaaugcgugaacuucaacuucaacggccugaccggcaccggcgugcugacagagagcaacaagaaguuccugccauuccagcaguuuggccgggauaucgccgauaccacagacgccguuagagauccccagacacuggaaauccuggacaucaccccaugcagcuucggcggagugucugugaucaccccuggcaccaacaccagcaaucagguggcagugcuguaccagggcgugaacuguaccgaagugcccguggccauucacgccgaucagcugacaccuacauggcggguguacuccaccggcagcaauguguuucagaccagagccggcugucugaucggagccgagcacgugaacaauagcuacgagugcgacauccccaucggcgcuggcaucugugccagcuaccagacacagacaaacagccccagacgggcuagaagcguggccagccagagcaucauugccuacacaaugucucugggcgccgagaacagcguggccuacuccaacaacucuaucgcuauccccaccaacuucaccaucagcgugaccaccgagauccugccuguguccaugaccaagaccagcguggacugcaccauguacaucugcggcgauuccaccgagugcuccaaccugcugcugcaguacggcagcuucugcacccagcugaauagagcccugacagggaucgccguggaacaggacaagaacacccaagagguguucgcccaagugaagcaaaucuacaagaccccuccuaucaaggacuucggcggcuucaauuucagccagauucugcccgauccuagcaagcccagcaagcggagcuucaucgaggaccugcuguucaacaaagugacacuggccgacgccggcuucaucaagcaguauggcgauugucugggcgacauugccgccagggaucugauuugcgcccagaaguuuaacggacugacagugcugccuccucugcugaccgaugagaugaucgcccaguacacaucugcccugcuggccggcacaaucacaagcggcuggacauuuggagcuggcgccgcucugcagauccccuuugcuaugcagauggccuaccgguucaacggcaucggagugacccagaaugugcuguacgagaaccagaagcugaucgccaaccaguucaacagcgccaucggcaagauccaggacagccugagcagcacagcaagcgcccugggaaagcugcaggacguggucaaccagaaugcccaggcacugaacacccuggucaagcagcuguccuccaacuucggcgccaucagcucugugcugaacgauauccugagcagacuggacaaggucgaggccgaggugcagaucgacagacugaucacaggcagacugcagagccuccagacauacgugacccagcagcugaucagagccgccgagauuagagccucugccaaucuggccgccaccaagaugucugagugugugcugggccagagcaagagaguggacuuuugcggcaagggcuaccaccugaugagcuucccucagucugccccucacggcgugguguuucugcacgugacauaugugcccgcucaagagaagaauuucaccaccgcuccagccaucugccacgacggcaaagcccacuuuccuagagaaggcguguucguguccaacggcacccauugguucgugacacagcggaacuucuacgagccccagaucaucaccaccgacaacaccuucgugucuggcaacugcgacguugugaucggcauugugaacaauaccguguacgacccucugcagcccgagcuggacagcuucaaagaggaacuggacaaguacuuuaagaaccacacaagccccgacguggaccugggcgauaucagcggaaucaaugccagcgucgugaacauccagaaagagaucgaccggcugaacgagguggccaagaaucugaacgagagccugaucgaccugcaagaacuggggaaguacgagcaguacaucaaguggcccugguacaucuggcugggcuuuaucgccggacugauugccaucgugauggucacaaucaugcuguguugcaugaccagcugcuguagcugccugaagggcuguuguagcuguggcagcugcugcaaguucgacgaggacgauucugagcccgugcugaagggcgugaaacugcacuacaccugaggacuagucccuguucccagagcccacuuuuuuuucuuuuuuugaaauaaaauagccugucuuucagaucucaaaggcucuuuucagagccaccaaaaaaaaaaaaaaaaaaaaaaaaaaaaaaaaaaaaaaaaaaaaaaaaaaaaaaaaaaaaaaaaaaaaaaaaaaaaaaaaaaaaaaaaaaaaaaaaaaaaa

SEQ ID NO: 23499 - RNA, 4094 nt, Artificial Sequence
  SARS-CoV-2/Wuhan/WIV05/2019__EPI_ISL_402128 spike protein mRNA gc mod (1-1273)
aggagagucccgcagucggcguccagcggcucugcuuguucgugugugugucguugcaggccuuauucaagcuuaccauguucguguuccuggugcugcugccucugguguccagccagugugugaaccugaccaccagaacacagcugccuccagccuacaccaacagcuuuaccagaggcguguacuaccccgacaagguguucagauccagcgugcugcacucuacccaggaccuguuccugccuuucuucagcaacgugaccugguuccacgccauccacguguccggcaccaauggcaccaagagauucgacaaccccgugcugcccuucaacgacgggguguacuuugccagcaccgagaaguccaacaucaucagaggcuggaucuucggcaccacacuggacagcaagacccagagccugcugaucgugaacaacgccaccaacguggucaucaaagugugcgaguuccaguucugcaacgaccccuuccugggcgucuacuaccacaagaacaacaagagcuggauggaaagcgaguuccggguguacagcagcgccaacaacugcaccuucgaguacgugucccagccuuuccugauggaccuggaaggcaagcagggcaacuucaagaaccugcgcgaguucguguuuaagaacaucgacggcuacuucaagaucuacagcaagcacaccccuaucaaccucgugcgggaucugccucagggcuucucugcucuggaaccccugguggaucugcccaucggcaucaacaucacccgguuucagacacugcuggcccugcacagaagcuaccugacaccuggcgauagcagcagcggauggacagcuggugccgccgcuuacuaugugggcuaccugcagccuagaaccuuccugcugaaguacaacgagaacggcaccaucaccgacgccguggauugugcucuggauccucugagcgagacaaagugcacccugaaguccuucaccguggaaaagggcaucuaccagaccagcaacuuccgggugcagcccaccgaauccaucgugcgguuccccaauaucaccaaucugugccccuucggcgagguguucaaugccaccagauucgccucuguguacgccuggaaccggaagcggaucagcaauugcguggccgacuacuccgugcuguacaacuccgccagcuucagcaccuucaagugcuacggcguguccccuaccaagcugaacgaccugugcuucacaaacguguacgccgacagcuucgugauccggggagaugaagugcggcagauugccccuggacagacaggcaagaucgccgacuacaacuacaagcugcccgacgacuucaccggcugugugauugccuggaacagcaacaaccuggacuccaaagucggcggcaacuacaauuaccuguaccggcuguuccggaaguccaaucugaagcccuucgagcgggacaucuccaccgagaucuaucaggccggcagcaccccuuguaacggcguggaaggcuucaacugcuacuucccacugcaguccuacggcuuucagcccacaaauggcgugggcuaucagcccuacagagugguggugcugagcuucgaacugcugcaugccccugccacagugugcggcccuaagaaaagcaccaaucucgugaagaacaaaugcgugaacuucaacuucaacggccugaccggcaccggcgugcugacagagagcaacaagaaguuccugccauuccagcaguuuggccgggauaucgccgauaccacagacgccguuagagauccccagacacuggaaauccuggacaucaccccuugcagcuucggcggagugucugugaucaccccuggcaccaacaccagcaaucagguggcagugcuguaccaggacgugaacuguaccgaagugcccguggccauucacgccgaucagcugacaccuacauggcggguguacuccaccggcagcaauguguuucagaccagagccggcugucugaucggagccgagcacgugaacaauagcuacgagugcgacauccccaucggcgcuggaaucugcgccagcuaccagacacagacaaacagcccucggagagccagaagcguggccagccagagcaucauugccuacacaaugucucugggcgccgagaacagcguggccuacuccaacaacucuaucgcuauccccaccaacuucaccaucagcgugaccacagagauccugccuguguccaugaccaagaccagcguggacugcaccauguacaucugcggcgauuccaccgagugcuccaaccugcugcugcaguacggcagcuucugcacccagcugaauagagcccugacagggaucgccguggaacaggacaagaacacccaagagguguucgcccaagugaagcagaucuacaagaccccuccuaucaaggacuucggcggcuucaauuucagccagauucugcccgauccuagcaagcccagcaagcggagcuucaucgaggaccugcuguucaacaaagugacacuggccgacgccggcuucaucaagcaguauggcgauugucugggcgacauugccgccagggaucugauuugcgcccagaaguuuaacggacugacagugcugccuccucugcugaccgaugagaugaucgcccaguacacaucugcccugcuggccggcacaaucacaagcggcuggacauuuggagcaggcgccgcucugcagauccccuuugcuaugcagauggccuaccgguucaacggcaucggagugacccagaaugugcuguacgagaaccagaagcugaucgccaaccaguucaacagcgccaucggcaagauccaggacagccugagcagcacagcaagcgcccugggaaagcugcaggacguggucaaccagaaugcccaggcacugaacacccuggucaagcagcuguccuccaacuucggcgccaucagcucugugcugaacgauauccugagcagacuggacaaggucgaggccgaggugcagaucgacagacugaucacaggcagacugcagagccuccagacauacgugacccagcagcugaucagagccgccgagauuagagccucugccaaucuggccgccaccaagaugucugagugugugcugggccagagcaagagaguggacuuuugcggcaagggcuaccaccugaugagcuucccucagucugccccucacggcgugguguuucugcacgugacauaugugcccgcucaagagaagaauuucaccaccgcuccagccaucugccacgacggcaaagcccacuuuccuagagaaggcguguucguguccaacggcacccauugguucgugacacagcggaacuucuacgagccccagaucaucaccaccgacaacaccuucgugucuggcaacugcgacgucgugaucggcauugugaacaauaccguguacgacccucugcagcccgagcuggacagcuucaaagaggaacuggacaaguacuuuaagaaccacacaagccccgacguggaccugggcgauaucagcggaaucaaugccagcgucgugaacauccagaaagagaucgaccggcugaacgagguggccaagaaucugaacgagagccugaucgaccugcaagaacuggggaaguacgagcaguacaucaaguggcccugguacaucuggcugggcuuuaucgccggacugauugccaucgugauggucacaaucaugcuguguugcaugaccagcugcuguagcugccugaagggcuguuguagcuguggcagcugcugcaaguucgacgaggacgauucugagcccgugcugaagggcgugaaacugcacuacacaugaggacuagucccuguucccagagcccacuuuuuuuucuuuuuuugaaauaaaauagccugucuuucagaucucaaaggcucuuuucagagccaccaaaaaaaaaaaaaaaaaaaaaaaaaaaaaaaaaaaaaaaaaaaaaaaaaaaaaaaaaaaaaaaaaaaaaaaaaaaaaaaaaaaaaaaaaaaaaaaaaaaaa

SEQ ID NO: 23500 - RNA, 4094 nt, Artificial Sequence
  SARS-CoV-2/Wuhan/WIV05/2019__EPI_ISL_402128 spike protein mRNA gc mod (1-1273)(D614G)
aggagagucccgcagucggcguccagcggcucugcuuguucgugugugugucguugcaggccuuauucaagcuuaccauguucguguuccuggugcugcugccucugguguccagccagugugugaaccugaccaccagaacacagcugccuccagccuacaccaacagcuuuaccagaggcguguacuaccccgacaagguguucagauccagcgugcugcacucuacccaggaccuguuccugccuuucuucagcaacgugaccugguuccacgccauccacguguccggcaccaauggcaccaagagauucgacaaccccgugcugcccuucaacgacgggguguacuuugccagcaccgagaaguccaacaucaucagaggcuggaucuucggcaccacacuggacagcaagacccagagccugcugaucgugaacaacgccaccaacguggucaucaaagugugcgaguuccaguucugcaacgaccccuuccugggcgucuacuaccacaagaacaacaagagcuggauggaaagcgaguuccggguguacagcagcgccaacaacugcaccuucgaguacgugucccagccuuuccugauggaccuggaaggcaagcagggcaacuucaagaaccugcgcgaguucguguuuaagaacaucgacggcuacuucaagaucuacagcaagcacaccccuaucaaccucgugcgggaucugccucagggcuucucugcucuggaaccccugguggaucugcccaucggcaucaacaucacccgguuucagacacugcuggcccugcacagaagcuaccugacaccuggcgauagcagcagcggauggacagcuggugccgccgcuuacuaugugggcuaccugcagccuagaaccuuccugcugaaguacaacgagaacggcaccaucaccgacgccguggauugugcucuggauccucugagcgagacaaagugcacccugaaguccuucaccguggaaaagggcaucuaccagaccagcaacuuccgggugcagcccaccgaauccaucgugcgguuccccaauaucaccaaucugugccccuucggcgagguguucaaugccaccagauucgccucuguguacgccuggaaccggaagcggaucagcaauugcguggccgacuacuccgugcuguacaacuccgccagcuucagcaccuucaagugcuacggcguguccccuaccaagcugaacgaccugugcuucacaaacguguacgccgacagcuucgugauccggggagaugaagugcggcagauugccccuggacagacaggcaagaucgccgacuacaacuacaagcugcccgacgacuucaccggcugugugauugccuggaacagcaacaaccuggacuccaaagucggcggcaacuacaauuaccuguaccggcuguuccggaaguccaaucugaagcccuucgagcgggacaucuccaccgagaucuaucaggccggcagcaccccuuguaacggcguggaaggcuucaacugcuacuucccacugcaguccuacggcuuucagcccacaaauggcgugggcuaucagcccuacagagugguggugcugagcuucgaacugcugcaugccccugccacagugugcggcccuaagaaaagcaccaaucucgugaagaacaaaugcgugaacuucaacuucaacggccugaccggcaccggcgugcugacagagagcaacaagaaguuccugccauuccagcaguuuggccgggauaucgccgauaccacagacgccguuagagauccccagacacuggaaauccuggacaucaccccuugcagcuucggcggagugucugugaucaccccuggcaccaacaccagcaaucagguggcagugcuguaccagggcgugaacuguaccgaagugcccguggccauucacgccgaucagcugacaccuacauggcggguguacuccaccggcagcaauguguuucagaccagagccggcugucugaucggagccgagcacgugaacaauagcuacgagugcgacauccccaucggcgcuggaaucugcgccagcuaccagacacagacaaacagcccucggagagccagaagcguggccagccagagcaucauugccuacacaaugucucugggcgccgagaacagcguggccuacuccaacaacucuaucgcuauccccaccaacuucaccaucagcgugaccacagagauccugccuguguccaugaccaagaccagcguggacugcaccauguacaucugcggcgauuccaccgagugcuccaaccugcugcugcaguacggcagcuucugcacccagcugaauagagcccugacagggaucgccguggaacaggacaagaacacccaagagguguucgcccaagugaagcagaucuacaagaccccuccuaucaaggacuucggcggcuucaauuucagccagauucugcccgauccuagcaagcccagcaagcggagcuucaucgaggaccugcuguucaacaaagugacacuggccgacgccggcuucaucaagcaguauggcgauugucugggcgacauugccgccagggaucugauuugcgcccagaaguuuaacggacugacagugcugccuccucugcugaccgaugagaugaucgcccaguacacaucugcccugcuggccggcacaaucacaagcggcuggacauuuggagcaggcgccgcucugcagauccccuuugcuaugcagauggccuaccgguucaacggcaucggagugacccagaaugugcuguacgagaaccagaagcugaucgccaaccaguucaacagcgccaucggcaagauccaggacagccugagcagcacagcaagcgcccugggaaagcugcaggacguggucaaccagaaugcccaggcacugaacacccuggucaagcagcuguccuccaacuucggcgccaucagcucugugcugaacgauauccugagcagacuggacaaggucgaggccgaggugcagaucgacagacugaucacaggcagacugcagagccuccagacauacgugacccagcagcugaucagagccgccgagauuagagccucugccaaucuggccgccaccaagaugucugagugugugcugggccagagcaagagaguggacuuuugcggcaagggcuaccaccugaugagcuucccucagucugccccucacggcgugguguuucugcacgugacauaugugcccgcucaagagaagaauuucaccaccgcuccagccaucugccacgacggcaaagcccacuuuccuagagaaggcguguucguguccaacggcacccauugguucgugacacagcggaacuucuacgagccccagaucaucaccaccgacaacaccuucgugucuggcaacugcgacgucgugaucggcauugugaacaauaccguguacgacccucugcagcccgagcuggacagcuucaaagaggaacuggacaaguacuuuaagaaccacacaagccccgacguggaccugggcgauaucagcggaaucaaugccagcgucgugaacauccagaaagagaucgaccggcugaacgagguggccaagaaucugaacgagagccugaucgaccugcaagaacuggggaaguacgagcaguacaucaaguggcccugguacaucuggcugggcuuuaucgccggacugauugccaucgugauggucacaaucaugcuguguugcaugaccagcugcuguagcugccugaagggcuguuguagcuguggcagcugcugcaaguucgacgaggacgauucugagcccgugcugaagggcgugaaacugcacuacacaugaggacuagucccuguucccagagcccacuuuuuuuucuuuuuuugaaauaaaauagccugucuuucagaucucaaaggcucuuuucagagccaccaaaaaaaaaaaaaaaaaaaaaaaaaaaaaaaaaaaaaaaaaaaaaaaaaaaaaaaaaaaaaaaaaaaaaaaaaaaaaaaaaaaaaaaaaaaaaaaaaaaaa

SEQ ID NO: 23501 - RNA, 4094 nt, Artificial Sequence
  SARS-CoV-2/Wuhan/WIV05/2019__EPI_ISL_402128 spike protein mRNA gc mod (1-1273)(A222V_D614G)
aggagagucccgcagucggcguccagcggcucugcuuguucgugugugugucguugcaggccuuauucaagcuuaccauguucguguuccuggugcugcugccucugguguccagccagugugugaaccugaccaccagaacacagcugccuccagccuacaccaacagcuuuaccagaggcguguacuaccccgacaagguguucagauccagcgugcugcacucuacccaggaccuguuccugccuuucuucagcaacgugaccugguuccacgccauccacguguccggcaccaauggcaccaagagauucgacaaccccgugcugcccuucaacgacgggguguacuuugccagcaccgagaaguccaacaucaucagaggcuggaucuucggcaccacacuggacagcaagacccagagccugcugaucgugaacaacgccaccaacguggucaucaaagugugcgaguuccaguucugcaacgaccccuuccugggcgucuacuaccacaagaacaacaagagcuggauggaaagcgaguuccggguguacagcagcgccaacaacugcaccuucgaguacgugucccagccuuuccugauggaccuggaaggcaagcagggcaacuucaagaaccugcgcgaguucguguuuaagaacaucgacggcuacuucaagaucuacagcaagcacaccccuaucaaccucgugcgggaucugccucagggcuucucugugcuggaaccccugguggaucugcccaucggcaucaacaucacccgguuucagacacugcuggcccugcacagaagcuaccugacaccuggcgauagcagcagcggauggacagcuggugccgccgcuuacuaugugggcuaccugcagccuagaaccuuccugcugaaguacaacgagaacggcaccaucaccgacgccguggauugugcucuggauccucugagcgagacaaagugcacccugaaguccuucaccguggaaaagggcaucuaccagaccagcaacuuccgggugcagcccaccgaauccaucgugcgguuccccaauaucaccaaucugugccccuucggcgagguguucaaugccaccagauucgccucuguguacgccuggaaccggaagcggaucagcaauugcguggccgacuacuccgugcuguacaacuccgccagcuucagcaccuucaagugcuacggcguguccccuaccaagcugaacgaccugugcuucacaaacguguacgccgacagcuucgugauccggggagaugaagugcggcagauugccccuggacagacaggcaagaucgccgacuacaacuacaagcugcccgacgacuucaccggcugugugauugccuggaacagcaacaaccuggacuccaaagucggcggcaacuacaauuaccuguaccggcuguuccggaaguccaaucugaagcccuucgagcgggacaucuccaccgagaucuaucaggccggcagcaccccuuguaacggcguggaaggcuucaacugcuacuucccacugcaguccuacggcuuucagcccacaaauggcgugggcuaucagcccuacagagugguggugcugagcuucgaacugcugcaugccccugccacagugugcggcccuaagaaaagcaccaaucucgugaagaacaaaugcgugaacuucaacuucaacggccugaccggcaccggcgugcugacagagagcaacaagaaguuccugccauuccagcaguuuggccgggauaucgccgauaccacagacgccguuagagauccccagacacuggaaauccuggacaucaccccuugcagcuucggcggagugucugugaucaccccuggcaccaacaccagcaaucagguggcagugcuguaccagggcgugaacuguaccgaagugcccguggccauucacgccgaucagcugacaccuacauggcggguguacuccaccggcagcaauguguuucagaccagagccggcugucugaucggagccgagcacgugaacaauagcuacgagugcgacauccccaucggcgcuggaaucugcgccagcuaccagacacagacaaacagcccucggagagccagaagcguggccagccagagcaucauugccuacacaaugucucugggcgccgagaacagcguggccuacuccaacaacucuaucgcuauccccaccaacuucaccaucagcgugaccacagagauccugccuguguccaugaccaagaccagcguggacugcaccauguacaucugcggcgauuccaccgagugcuccaaccugcugcugcaguacggcagcuucugcacccagcugaauagagcccugacagggaucgccguggaacaggacaagaacacccaagagguguucgcccaagugaagcagaucuacaagaccccuccuaucaaggacuucggcggcuucaauuucagccagauucugcccgauccuagcaagcccagcaagcggagcuucaucgaggaccugcuguucaacaaagugacacuggccgacgccggcuucaucaagcaguauggcgauugucugggcgacauugccgccagggaucugauuugcgcccagaaguuuaacggacugacagugcugccuccucugcugaccgaugagaugaucgcccaguacacaucugcccugcuggccggcacaaucacaagcggcuggacauuuggagcaggcgccgcucugcagauccccuuugcuaugcagauggccuaccgguucaacggcaucggagugacccagaaugugcuguacgagaaccagaagcugaucgccaaccaguucaacagcgccaucggcaagauccaggacagccugagcagcacagcaagcgcccugggaaagcugcaggacguggucaaccagaaugcccaggcacugaacacccuggucaagcagcuguccuccaacuucggcgccaucagcucugugcugaacgauauccugagcagacuggacaaggucgaggccgaggugcagaucgacagacugaucacaggcagacugcagagccuccagacauacgugacccagcagcugaucagagccgccgagauuagagccucugccaaucuggccgccaccaagaugucugagugugugcugggccagagcaagagaguggacuuuugcggcaagggcuaccaccugaugagcuucccucagucugccccucacggcgugguguuucugcacgugacauaugugcccgcucaagagaagaauuucaccaccgcuccagccaucugccacgacggcaaagcccacuuuccuagagaaggcguguucguguccaacggcacccauugguucgugacacagcggaacuucuacgagccccagaucaucaccaccgacaacaccuucgugucuggcaacugcgacgucgugaucggcauugugaacaauaccguguacgacccucugcagcccgagcuggacagcuucaaagaggaacuggacaaguacuuuaagaaccacacaagccccgacguggaccugggcgauaucagcggaaucaaugccagcgucgugaacauccagaaagagaucgaccggcugaacgagguggccaagaaucugaacgagagccugaucgaccugcaagaacuggggaaguacgagcaguacaucaaguggcccugguacaucuggcugggcuuuaucgccggacugauugccaucgugauggucacaaucaugcuguguugcaugaccagcugcuguagcugccugaagggcuguuguagcuguggcagcugcugcaaguucgacgaggacgauucugagcccgugcugaagggcgugaaacugcacuacacaugaggacuagucccuguucccagagcccacuuuuuuuucuuuuuuugaaauaaaauagccugucuuucagaucucaaaggcucuuuucagagccaccaaaaaaaaaaaaaaaaaaaaaaaaaaaaaaaaaaaaaaaaaaaaaaaaaaaaaaaaaaaaaaaaaaaaaaaaaaaaaaaaaaaaaaaaaaaaaaaaaaaaa

SEQ ID NO: 23502 - RNA, 4094 nt, Artificial Sequence
  SARS-CoV-2/Wuhan/WIV05/2019__EPI_ISL_402128 spike protein mRNA gc mod (1-1273)(N439K_D614G)
aggagagucccgcagucggcguccagcggcucugcuuguucgugugugugucguugcaggccuuauucaagcuuaccauguucguguuccuggugcugcugccucugguguccagccagugugugaaccugaccaccagaacacagcugccuccagccuacaccaacagcuuuaccagaggcguguacuaccccgacaagguguucagauccagcgugcugcacucuacccaggaccuguuccugccuuucuucagcaacgugaccugguuccacgccauccacguguccggcaccaauggcaccaagagauucgacaaccccgugcugcccuucaacgacgggguguacuuugccagcaccgagaaguccaacaucaucagaggcuggaucuucggcaccacacuggacagcaagacccagagccugcugaucgugaacaacgccaccaacguggucaucaaagugugcgaguuccaguucugcaacgaccccuuccugggcgucuacuaccacaagaacaacaagagcuggauggaaagcgaguuccggguguacagcagcgccaacaacugcaccuucgaguacgugucccagccuuuccugauggaccuggaaggcaagcagggcaacuucaagaaccugcgcgaguucguguuuaagaacaucgacggcuacuucaagaucuacagcaagcacaccccuaucaaccucgugcgggaucugccucagggcuucucugcucuggaaccccugguggaucugcccaucggcaucaacaucacccgguuucagacacugcuggcccugcacagaagcuaccugacaccuggcgauagcagcagcggauggacagcuggugccgccgcuuacuaugugggcuaccugcagccuagaaccuuccugcugaaguacaacgagaacggcaccaucaccgacgccguggauugugcucuggauccucugagcgagacaaagugcacccugaaguccuucaccguggaaaagggcaucuaccagaccagcaacuuccgggugcagcccaccgaauccaucgugcgguuccccaauaucaccaaucugugccccuucggcgagguguucaaugccaccagauucgccucuguguacgccuggaaccggaagcggaucagcaauugcguggccgacuacuccgugcuguacaacuccgccagcuucagcaccuucaagugcuacggcguguccccuaccaagcugaacgaccugugcuucacaaacguguacgccgacagcuucgugauccggggagaugaagugcggcagauugccccuggacagacaggcaagaucgccgacuacaacuacaagcugcccgacgacuucaccggcugugugauugccuggaacagcaagaaccuggacuccaaagucggcggcaacuacaauuaccuguaccggcuguuccggaaguccaaucugaagcccuucgagcgggacaucuccaccgagaucuaucaggccggcagcaccccuuguaacggcguggaaggcuucaacugcuacuucccacugcaguccuacggcuuucagcccacaaauggcgugggcuaucagcccuacagagugguggugcugagcuucgaacugcugcaugccccugccacagugugcggcccuaagaaaagcaccaaucucgugaagaacaaaugcgugaacuucaacuucaacggccugaccggcaccggcgugcugacagagagcaacaagaaguuccugccauuccagcaguuuggccgggauaucgccgauaccacagacgccguuagagauccccagacacuggaaauccuggacaucaccccuugcagcuucggcggagugucugugaucaccccuggcaccaacaccagcaaucagguggcagugcuguaccagggcgugaacuguaccgaagugcccguggccauucacgccgaucagcugacaccuacauggcggguguacuccaccggcagcaauguguuucagaccagagccggcugucugaucggagccgagcacgugaacaauagcuacgagugcgacauccccaucggcgcuggaaucugcgccagcuaccagacacagacaaacagcccucggagagccagaagcguggccagccagagcaucauugccuacacaaugucucugggcgccgagaacagcguggccuacuccaacaacucuaucgcuauccccaccaacuucaccaucagcgugaccacagagauccugccuguguccaugaccaagaccagcguggacugcaccauguacaucugcggcgauuccaccgagugcuccaaccugcugcugcaguacggcagcuucugcacccagcugaauagagcccugacagggaucgccguggaacaggacaagaacacccaagagguguucgcccaagugaagcagaucuacaagaccccuccuaucaaggacuucggcggcuucaauuucagccagauucugcccgauccuagcaagcccagcaagcggagcuucaucgaggaccugcuguucaacaaagugacacuggccgacgccggcuucaucaagcaguauggcgauugucugggcgacauugccgccagggaucugauuugcgcccagaaguuuaacggacugacagugcugccuccucugcugaccgaugagaugaucgcccaguacacaucugcccugcuggccggcacaaucacaagcggcuggacauuuggagcaggcgccgcucugcagauccccuuugcuaugcagauggccuaccgguucaacggcaucggagugacccagaaugugcuguacgagaaccagaagcugaucgccaaccaguucaacagcgccaucggcaagauccaggacagccugagcagcacagcaagcgcccugggaaagcugcaggacguggucaaccagaaugcccaggcacugaacacccuggucaagcagcuguccuccaacuucggcgccaucagcucugugcugaacgauauccugagcagacuggacaaggucgaggccgaggugcagaucgacagacugaucacaggcagacugcagagccuccagacauacgugacccagcagcugaucagagccgccgagauuagagccucugccaaucuggccgccaccaagaugucugagugugugcugggccagagcaagagaguggacuuuugcggcaagggcuaccaccugaugagcuucccucagucugccccucacggcgugguguuucugcacgugacauaugugcccgcucaagagaagaauuucaccaccgcuccagccaucugccacgacggcaaagcccacuuuccuagagaaggcguguucguguccaacggcacccauugguucgugacacagcggaacuucuacgagccccagaucaucaccaccgacaacaccuucgugucuggcaacugcgacgucgugaucggcauugugaacaauaccguguacgacccucugcagcccgagcuggacagcuucaaagaggaacuggacaaguacuuuaagaaccacacaagccccgacguggaccugggcgauaucagcggaaucaaugccagcgucgugaacauccagaaagagaucgaccggcugaacgagguggccaagaaucugaacgagagccugaucgaccugcaagaacuggggaaguacgagcaguacaucaaguggcccugguacaucuggcugggcuuuaucgccggacugauugccaucgugauggucacaaucaugcuguguugcaugaccagcugcuguagcugccugaagggcuguuguagcuguggcagcugcugcaaguucgacgaggacgauucugagcccgugcugaagggcgugaaacugcacuacacaugaggacuagucccuguucccagagcccacuuuuuuuucuuuuuuugaaauaaaauagccugucuuucagaucucaaaggcucuuuucagagccaccaaaaaaaaaaaaaaaaaaaaaaaaaaaaaaaaaaaaaaaaaaaaaaaaaaaaaaaaaaaaaaaaaaaaaaaaaaaaaaaaaaaaaaaaaaaaaaaaaaaaa

SEQ ID NO: 23503 - RNA, 4094 nt, Artificial Sequence
  SARS-CoV-2/Wuhan/WIV05/2019__EPI_ISL_402128 spike protein mRNA gc mod (1-1273)(S477N_D614G)
aggagagucccgcagucggcguccagcggcucugcuuguucgugugugugucguugcaggccuuauucaagcuuaccauguucguguuccuggugcugcugccucugguguccagccagugugugaaccugaccaccagaacacagcugccuccagccuacaccaacagcuuuaccagaggcguguacuaccccgacaagguguucagauccagcgugcugcacucuacccaggaccuguuccugccuuucuucagcaacgugaccugguuccacgccauccacguguccggcaccaauggcaccaagagauucgacaaccccgugcugcccuucaacgacgggguguacuuugccagcaccgagaaguccaacaucaucagaggcuggaucuucggcaccacacuggacagcaagacccagagccugcugaucgugaacaacgccaccaacguggucaucaaagugugcgaguuccaguucugcaacgaccccuuccugggcgucuacuaccacaagaacaacaagagcuggauggaaagcgaguuccggguguacagcagcgccaacaacugcaccuucgaguacgugucccagccuuuccugauggaccuggaaggcaagcagggcaacuucaagaaccugcgcgaguucguguuuaagaacaucgacggcuacuucaagaucuacagcaagcacaccccuaucaaccucgugcgggaucugccucagggcuucucugcucuggaaccccugguggaucugcccaucggcaucaacaucacccgguuucagacacugcuggcccugcacagaagcuaccugacaccuggcgauagcagcagcggauggacagcuggugccgccgcuuacuaugugggcuaccugcagccuagaaccuuccugcugaaguacaacgagaacggcaccaucaccgacgccguggauugugcucuggauccucugagcgagacaaagugcacccugaaguccuucaccguggaaaagggcaucuaccagaccagcaacuuccgggugcagcccaccgaauccaucgugcgguuccccaauaucaccaaucugugccccuucggcgagguguucaaugccaccagauucgccucuguguacgccuggaaccggaagcggaucagcaauugcguggccgacuacuccgugcuguacaacuccgccagcuucagcaccuucaagugcuacggcguguccccuaccaagcugaacgaccugugcuucacaaacguguacgccgacagcuucgugauccggggagaugaagugcggcagauugccccuggacagacaggcaagaucgccgacuacaacuacaagcugcccgacgacuucaccggcugugugauugccuggaacagcaacaaccuggacuccaaagucggcggcaacuacaauuaccuguaccggcuguuccggaaguccaaucugaagcccuucgagcgggacaucuccaccgagaucuaucaggccggcaacaccccuuguaacggcguggaaggcuucaacugcuacuucccacugcaguccuacggcuuucagcccacaaauggcgugggcuaucagcccuacagagugguggugcugagcuucgaacugcugcaugccccugccacagugugcggcccuaagaaaagcaccaaucucgugaagaacaaaugcgugaacuucaacuucaacggccugaccggcaccggcgugcugacagagagcaacaagaaguuccugccauuccagcaguuuggccgggauaucgccgauaccacagacgccguuagagauccccagacacuggaaauccuggacaucaccccuugcagcuucggcggagugucugugaucaccccuggcaccaacaccagcaaucagguggcagugcuguaccagggcgugaacuguaccgaagugcccguggccauucacgccgaucagcugacaccuacauggcggguguacuccaccggcagcaauguguuucagaccagagccggcugucugaucggagccgagcacgugaacaauagcuacgagugcgacauccccaucggcgcuggaaucugcgccagcuaccagacacagacaaacagcccucggagagccagaagcguggccagccagagcaucauugccuacacaaugucucugggcgccgagaacagcguggccuacuccaacaacucuaucgcuauccccaccaacuucaccaucagcgugaccacagagauccugccuguguccaugaccaagaccagcguggacugcaccauguacaucugcggcgauuccaccgagugcuccaaccugcugcugcaguacggcagcuucugcacccagcugaauagagcccugacagggaucgccguggaacaggacaagaacacccaagagguguucgcccaagugaagcagaucuacaagaccccuccuaucaaggacuucggcggcuucaauuucagccagauucugcccgauccuagcaagcccagcaagcggagcuucaucgaggaccugcuguucaacaaagugacacuggccgacgccggcuucaucaagcaguauggcgauugucugggcgacauugccgccagggaucugauuugcgcccagaaguuuaacggacugacagugcugccuccucugcugaccgaugagaugaucgcccaguacacaucugcccugcuggccggcacaaucacaagcggcuggacauuuggagcaggcgccgcucugcagauccccuuugcuaugcagauggccuaccgguucaacggcaucggagugacccagaaugugcuguacgagaaccagaagcugaucgccaaccaguucaacagcgccaucggcaagauccaggacagccugagcagcacagcaagcgcccugggaaagcugcaggacguggucaaccagaaugcccaggcacugaacacccuggucaagcagcuguccuccaacuucggcgccaucagcucugugcugaacgauauccugagcagacuggacaaggucgaggccgaggugcagaucgacagacugaucacaggcagacugcagagccuccagacauacgugacccagcagcugaucagagccgccgagauuagagccucugccaaucuggccgccaccaagaugucugagugugugcugggccagagcaagagaguggacuuuugcggcaagggcuaccaccugaugagcuucccucagucugccccucacggcgugguguuucugcacgugacauaugugcccgcucaagagaagaauuucaccaccgcuccagccaucugccacgacggcaaagcccacuuuccuagagaaggcguguucguguccaacggcacccauugguucgugacacagcggaacuucuacgagccccagaucaucaccaccgacaacaccuucgugucuggcaacugcgacgucgugaucggcauugugaacaauaccguguacgacccucugcagcccgagcuggacagcuucaaagaggaacuggacaaguacuuuaagaaccacacaagccccgacguggaccugggcgauaucagcggaaucaaugccagcgucgugaacauccagaaagagaucgaccggcugaacgagguggccaagaaucugaacgagagccugaucgaccugcaagaacuggggaaguacgagcaguacaucaaguggcccugguacaucuggcugggcuuuaucgccggacugauugccaucgugauggucacaaucaugcuguguugcaugaccagcugcuguagcugccugaagggcuguuguagcuguggcagcugcugcaaguucgacgaggacgauucugagcccgugcugaagggcgugaaacugcacuacacaugaggacuagucccuguucccagagcccacuuuuuuuucuuuuuuugaaauaaaauagccugucuuucagaucucaaaggcucuuuucagagccaccaaaaaaaaaaaaaaaaaaaaaaaaaaaaaaaaaaaaaaaaaaaaaaaaaaaaaaaaaaaaaaaaaaaaaaaaaaaaaaaaaaaaaaaaaaaaaaaaaaaaa

SEQ ID NO: 23504 - RNA, 4094 nt, Artificial Sequence
  SARS-CoV-2/Wuhan/WIV05/2019__EPI_ISL_402128 spike protein mRNA gc mod (1-1273)(N501Y_D614G)
aggagagucccgcagucggcguccagcggcucugcuuguucgugugugugucguugcaggccuuauucaagcuuaccauguucguguuccuggugcugcugccucugguguccagccagugugugaaccugaccaccagaacacagcugccuccagccuacaccaacagcuuuaccagaggcguguacuaccccgacaagguguucagauccagcgugcugcacucuacccaggaccuguuccugccuuucuucagcaacgugaccugguuccacgccauccacguguccggcaccaauggcaccaagagauucgacaaccccgugcugcccuucaacgacgggguguacuuugccagcaccgagaaguccaacaucaucagaggcuggaucuucggcaccacacuggacagcaagacccagagccugcugaucgugaacaacgccaccaacguggucaucaaagugugcgaguuccaguucugcaacgaccccuuccugggcgucuacuaccacaagaacaacaagagcuggauggaaagcgaguuccggguguacagcagcgccaacaacugcaccuucgaguacgugucccagccuuuccugauggaccuggaaggcaagcagggcaacuucaagaaccugcgcgaguucguguuuaagaacaucgacggcuacuucaagaucuacagcaagcacaccccuaucaaccucgugcgggaucugccucagggcuucucugcucuggaaccccugguggaucugcccaucggcaucaacaucacccgguuucagacacugcuggcccugcacagaagcuaccugacaccuggcgauagcagcagcggauggacagcuggugccgccgcuuacuaugugggcuaccugcagccuagaaccuuccugcugaaguacaacgagaacggcaccaucaccgacgccguggauugugcucuggauccucugagcgagacaaagugcacccugaaguccuucaccguggaaaagggcaucuaccagaccagcaacuuccgggugcagcccaccgaauccaucgugcgguuccccaauaucaccaaucugugccccuucggcgagguguucaaugccaccagauucgccucuguguacgccuggaaccggaagcggaucagcaauugcguggccgacuacuccgugcuguacaacuccgccagcuucagcaccuucaagugcuacggcguguccccuaccaagcugaacgaccugugcuucacaaacguguacgccgacagcuucgugauccggggagaugaagugcggcagauugccccuggacagacaggcaagaucgccgacuacaacuacaagcugcccgacgacuucaccggcugugugauugccuggaacagcaacaaccuggacuccaaagucggcggcaacuacaauuaccuguaccggcuguuccggaaguccaaucugaagcccuucgagcgggacaucuccaccgagaucuaucaggccggcagcaccccuuguaacggcguggaaggcuucaacugcuacuucccacugcaguccuacggcuuucagcccacauacggcgugggcuaucagcccuacagagugguggugcugagcuucgaacugcugcaugccccugccacagugugcggcccuaagaaaagcaccaaucucgugaagaacaaaugcgugaacuucaacuucaacggccugaccggcaccggcgugcugacagagagcaacaagaaguuccugccauuccagcaguuuggccgggauaucgccgauaccacagacgccguuagagauccccagacacuggaaauccuggacaucaccccuugcagcuucggcggagugucugugaucaccccuggcaccaacaccagcaaucagguggcagugcuguaccagggcgugaacuguaccgaagugcccguggccauucacgccgaucagcugacaccuacauggcggguguacuccaccggcagcaauguguuucagaccagagccggcugucugaucggagccgagcacgugaacaauagcuacgagugcgacauccccaucggcgcuggaaucugcgccagcuaccagacacagacaaacagcccucggagagccagaagcguggccagccagagcaucauugccuacacaaugucucugggcgccgagaacagcguggccuacuccaacaacucuaucgcuauccccaccaacuucaccaucagcgugaccacagagauccugccuguguccaugaccaagaccagcguggacugcaccauguacaucugcggcgauuccaccgagugcuccaaccugcugcugcaguacggcagcuucugcacccagcugaauagagcccugacagggaucgccguggaacaggacaagaacacccaagagguguucgcccaagugaagcagaucuacaagaccccuccuaucaaggacuucggcggcuucaauuucagccagauucugcccgauccuagcaagcccagcaagcggagcuucaucgaggaccugcuguucaacaaagugacacuggccgacgccggcuucaucaagcaguauggcgauugucugggcgacauugccgccagggaucugauuugcgcccagaaguuuaacggacugacagugcugccuccucugcugaccgaugagaugaucgcccaguacacaucugcccugcuggccggcacaaucacaagcggcuggacauuuggagcaggcgccgcucugcagauccccuuugcuaugcagauggccuaccgguucaacggcaucggagugacccagaaugugcuguacgagaaccagaagcugaucgccaaccaguucaacagcgccaucggcaagauccaggacagccugagcagcacagcaagcgcccugggaaagcugcaggacguggucaaccagaaugcccaggcacugaacacccuggucaagcagcuguccuccaacuucggcgccaucagcucugugcugaacgauauccugagcagacuggacaaggucgaggccgaggugcagaucgacagacugaucacaggcagacugcagagccuccagacauacgugacccagcagcugaucagagccgccgagauuagagccucugccaaucuggccgccaccaagaugucugagugugugcugggccagagcaagagaguggacuuuugcggcaagggcuaccaccugaugagcuucccucagucugccccucacggcgugguguuucugcacgugacauaugugcccgcucaagagaagaauuucaccaccgcuccagccaucugccacgacggcaaagcccacuuuccuagagaaggcguguucguguccaacggcacccauugguucgugacacagcggaacuucuacgagccccagaucaucaccaccgacaacaccuucgugucuggcaacugcgacgucgugaucggcauugugaacaauaccguguacgacccucugcagcccgagcuggacagcuucaaagaggaacuggacaaguacuuuaagaaccacacaagccccgacguggaccugggcgauaucagcggaaucaaugccagcgucgugaacauccagaaagagaucgaccggcugaacgagguggccaagaaucugaacgagagccugaucgaccugcaagaacuggggaaguacgagcaguacaucaaguggcccugguacaucuggcugggcuuuaucgccggacugauugccaucgugauggucacaaucaugcuguguugcaugaccagcugcuguagcugccugaagggcuguuguagcuguggcagcugcugcaaguucgacgaggacgauucugagcccgugcugaagggcgugaaacugcacuacacaugaggacuagucccuguucccagagcccacuuuuuuuucuuuuuuugaaauaaaauagccugucuuucagaucucaaaggcucuuuucagagccaccaaaaaaaaaaaaaaaaaaaaaaaaaaaaaaaaaaaaaaaaaaaaaaaaaaaaaaaaaaaaaaaaaaaaaaaaaaaaaaaaaaaaaaaaaaaaaaaaaaaaa

SEQ ID NO: 23505 - RNA, 4088 nt, Artificial Sequence
  SARS-CoV-2/Wuhan/WIV05/2019__EPI_ISL_402128 spike protein mRNA gc mod (1-1273)(H69del_V70del_D614G)
aggagagucccgcagucggcguccagcggcucugcuuguucgugugugugucguugcaggccuuauucaagcuuaccauguucguguuccuggugcugcugccucugguguccagccagugugugaaccugaccaccagaacacagcugccuccagccuacaccaacagcuuuaccagaggcguguacuaccccgacaagguguucagauccagcgugcugcacucuacccaggaccuguuccugccuuucuucagcaacgugaccugguuccacgccaucuccggcaccaauggcaccaagagauucgacaaccccgugcugcccuucaacgacgggguguacuuugccagcaccgagaaguccaacaucaucagaggcuggaucuucggcaccacacuggacagcaagacccagagccugcugaucgugaacaacgccaccaacguggucaucaaagugugcgaguuccaguucugcaacgaccccuuccugggcgucuacuaccacaagaacaacaagagcuggauggaaagcgaguuccggguguacagcagcgccaacaacugcaccuucgaguacgugucccagccuuuccugauggaccuggaaggcaagcagggcaacuucaagaaccugcgcgaguucguguuuaagaacaucgacggcuacuucaagaucuacagcaagcacaccccuaucaaccucgugcgggaucugccucagggcuucucugcucuggaaccccugguggaucugcccaucggcaucaacaucacccgguuucagacacugcuggcccugcacagaagcuaccugacaccuggcgauagcagcagcggauggacagcuggugccgccgcuuacuaugugggcuaccugcagccuagaaccuuccugcugaaguacaacgagaacggcaccaucaccgacgccguggauugugcucuggauccucugagcgagacaaagugcacccugaaguccuucaccguggaaaagggcaucuaccagaccagcaacuuccgggugcagcccaccgaauccaucgugcgguuccccaauaucaccaaucugugccccuucggcgagguguucaaugccaccagauucgccucuguguacgccuggaaccggaagcggaucagcaauugcguggccgacuacuccgugcuguacaacuccgccagcuucagcaccuucaagugcuacggcguguccccuaccaagcugaacgaccugugcuucacaaacguguacgccgacagcuucgugauccggggagaugaagugcggcagauugccccuggacagacaggcaagaucgccgacuacaacuacaagcugcccgacgacuucaccggcugugugauugccuggaacagcaacaaccuggacuccaaagucggcggcaacuacaauuaccuguaccggcuguuccggaaguccaaucugaagcccuucgagcgggacaucuccaccgagaucuaucaggccggcagcaccccuuguaacggcguggaaggcuucaacugcuacuucccacugcaguccuacggcuuucagcccacaaauggcgugggcuaucagcccuacagagugguggugcugagcuucgaacugcugcaugccccugccacagugugcggcccuaagaaaagcaccaaucucgugaagaacaaaugcgugaacuucaacuucaacggccugaccggcaccggcgugcugacagagagcaacaagaaguuccugccauuccagcaguuuggccgggauaucgccgauaccacagacgccguuagagauccccagacacuggaaauccuggacaucaccccuugcagcuucggcggagugucugugaucaccccuggcaccaacaccagcaaucagguggcagugcuguaccagggcgugaacuguaccgaagugcccguggccauucacgccgaucagcugacaccuacauggcggguguacuccaccggcagcaauguguuucagaccagagccggcugucugaucggagccgagcacgugaacaauagcuacgagugcgacauccccaucggcgcuggaaucugcgccagcuaccagacacagacaaacagcccucggagagccagaagcguggccagccagagcaucauugccuacacaaugucucugggcgccgagaacagcguggccuacuccaacaacucuaucgcuauccccaccaacuucaccaucagcgugaccacagagauccugccuguguccaugaccaagaccagcguggacugcaccauguacaucugcggcgauuccaccgagugcuccaaccugcugcugcaguacggcagcuucugcacccagcugaauagagcccugacagggaucgccguggaacaggacaagaacacccaagagguguucgcccaagugaagcagaucuacaagaccccuccuaucaaggacuucggcggcuucaauuucagccagauucugcccgauccuagcaagcccagcaagcggagcuucaucgaggaccugcuguucaacaaagugacacuggccgacgccggcuucaucaagcaguauggcgauugucugggcgacauugccgccagggaucugauuugcgcccagaaguuuaacggacugacagugcugccuccucugcugaccgaugagaugaucgcccaguacacaucugcccugcuggccggcacaaucacaagcggcuggacauuuggagcaggcgccgcucugcagauccccuuugcuaugcagauggccuaccgguucaacggcaucggagugacccagaaugugcuguacgagaaccagaagcugaucgccaaccaguucaacagcgccaucggcaagauccaggacagccugagcagcacagcaagcgcccugggaaagcugcaggacguggucaaccagaaugcccaggcacugaacacccuggucaagcagcuguccuccaacuucggcgccaucagcucugugcugaacgauauccugagcagacuggacaaggucgaggccgaggugcagaucgacagacugaucacaggcagacugcagagccuccagacauacgugacccagcagcugaucagagccgccgagauuagagccucugccaaucuggccgccaccaagaugucugagugugugcugggccagagcaagagaguggacuuuugcggcaagggcuaccaccugaugagcuucccucagucugccccucacggcgugguguuucugcacgugacauaugugcccgcucaagagaagaauuucaccaccgcuccagccaucugccacgacggcaaagcccacuuuccuagagaaggcguguucguguccaacggcacccauugguucgugacacagcggaacuucuacgagccccagaucaucaccaccgacaacaccuucgugucuggcaacugcgacgucgugaucggcauugugaacaauaccguguacgacccucugcagcccgagcuggacagcuucaaagaggaacuggacaaguacuuuaagaaccacacaagccccgacguggaccugggcgauaucagcggaaucaaugccagcgucgugaacauccagaaagagaucgaccggcugaacgagguggccaagaaucugaacgagagccugaucgaccugcaagaacuggggaaguacgagcaguacaucaaguggcccugguacaucuggcugggcuuuaucgccggacugauugccaucgugauggucacaaucaugcuguguugcaugaccagcugcuguagcugccugaagggcuguuguagcuguggcagcugcugcaaguucgacgaggacgauucugagcccgugcugaagggcgugaaacugcacuacacaugaggacuagucccuguucccagagcccacuuuuuuuucuuuuuuugaaauaaaauagccugucuuucagaucucaaaggcucuuuucagagccaccaaaaaaaaaaaaaaaaaaaaaaaaaaaaaaaaaaaaaaaaaaaaaaaaaaaaaaaaaaaaaaaaaaaaaaaaaaaaaaaaaaaaaaaaaaaaaaaaaaaaa

SEQ ID NO: 23506 - RNA, 4094 nt, Artificial Sequence
  SARS-CoV-2/Wuhan/WIV05/2019__EPI_ISL_402128 spike protein mRNA gc mod (1-1273)(Y453F_D614G)
aggagagucccgcagucggcguccagcggcucugcuuguucgugugugugucguugcaggccuuauucaagcuuaccauguucguguuccuggugcugcugccucugguguccagccagugugugaaccugaccaccagaacacagcugccuccagccuacaccaacagcuuuaccagaggcguguacuaccccgacaagguguucagauccagcgugcugcacucuacccaggaccuguuccugccuuucuucagcaacgugaccugguuccacgccauccacguguccggcaccaauggcaccaagagauucgacaaccccgugcugcccuucaacgacgggguguacuuugccagcaccgagaaguccaacaucaucagaggcuggaucuucggcaccacacuggacagcaagacccagagccugcugaucgugaacaacgccaccaacguggucaucaaagugugcgaguuccaguucugcaacgaccccuuccugggcgucuacuaccacaagaacaacaagagcuggauggaaagcgaguuccggguguacagcagcgccaacaacugcaccuucgaguacgugucccagccuuuccugauggaccuggaaggcaagcagggcaacuucaagaaccugcgcgaguucguguuuaagaacaucgacggcuacuucaagaucuacagcaagcacaccccuaucaaccucgugcgggaucugccucagggcuucucugcucuggaaccccugguggaucugcccaucggcaucaacaucacccgguuucagacacugcuggcccugcacagaagcuaccugacaccuggcgauagcagcagcggauggacagcuggugccgccgcuuacuaugugggcuaccugcagccuagaaccuuccugcugaaguacaacgagaacggcaccaucaccgacgccguggauugugcucuggauccucugagcgagacaaagugcacccugaaguccuucaccguggaaaagggcaucuaccagaccagcaacuuccgggugcagcccaccgaauccaucgugcgguuccccaauaucaccaaucugugccccuucggcgagguguucaaugccaccagauucgccucuguguacgccuggaaccggaagcggaucagcaauugcguggccgacuacuccgugcuguacaacuccgccagcuucagcaccuucaagugcuacggcguguccccuaccaagcugaacgaccugugcuucacaaacguguacgccgacagcuucgugauccggggagaugaagugcggcagauugccccuggacagacaggcaagaucgccgacuacaacuacaagcugcccgacgacuucaccggcugugugauugccuggaacagcaacaaccuggacuccaaagucggcggcaacuacaauuaccuguuccggcuguuccggaaguccaaucugaagcccuucgagcgggacaucuccaccgagaucuaucaggccggcagcaccccuuguaacggcguggaaggcuucaacugcuacuucccacugcaguccuacggcuuucagcccacaaauggcgugggcuaucagcccuacagagugguggugcugagcuucgaacugcugcaugccccugccacagugugcggcccuaagaaaagcaccaaucucgugaagaacaaaugcgugaacuucaacuucaacggccugaccggcaccggcgugcugacagagagcaacaagaaguuccugccauuccagcaguuuggccgggauaucgccgauaccacagacgccguuagagauccccagacacuggaaauccuggacaucaccccuugcagcuucggcggagugucugugaucaccccuggcaccaacaccagcaaucagguggcagugcuguaccagggcgugaacuguaccgaagugcccguggccauucacgccgaucagcugacaccuacauggcggguguacuccaccggcagcaauguguuucagaccagagccggcugucugaucggagccgagcacgugaacaauagcuacgagugcgacauccccaucggcgcuggaaucugcgccagcuaccagacacagacaaacagcccucggagagccagaagcguggccagccagagcaucauugccuacacaaugucucugggcgccgagaacagcguggccuacuccaacaacucuaucgcuauccccaccaacuucaccaucagcgugaccacagagauccugccuguguccaugaccaagaccagcguggacugcaccauguacaucugcggcgauuccaccgagugcuccaaccugcugcugcaguacggcagcuucugcacccagcugaauagagcccugacagggaucgccguggaacaggacaagaacacccaagagguguucgcccaagugaagcagaucuacaagaccccuccuaucaaggacuucggcggcuucaauuucagccagauucugcccgauccuagcaagcccagcaagcggagcuucaucgaggaccugcuguucaacaaagugacacuggccgacgccggcuucaucaagcaguauggcgauugucugggcgacauugccgccagggaucugauuugcgcccagaaguuuaacggacugacagugcugccuccucugcugaccgaugagaugaucgcccaguacacaucugcccugcuggccggcacaaucacaagcggcuggacauuuggagcaggcgccgcucugcagauccccuuugcuaugcagauggccuaccgguucaacggcaucggagugacccagaaugugcuguacgagaaccagaagcugaucgccaaccaguucaacagcgccaucggcaagauccaggacagccugagcagcacagcaagcgcccugggaaagcugcaggacguggucaaccagaaugcccaggcacugaacacccuggucaagcagcuguccuccaacuucggcgccaucagcucugugcugaacgauauccugagcagacuggacaaggucgaggccgaggugcagaucgacagacugaucacaggcagacugcagagccuccagacauacgugacccagcagcugaucagagccgccgagauuagagccucugccaaucuggccgccaccaagaugucugagugugugcugggccagagcaagagaguggacuuuugcggcaagggcuaccaccugaugagcuucccucagucugccccucacggcgugguguuucugcacgugacauaugugcccgcucaagagaagaauuucaccaccgcuccagccaucugccacgacggcaaagcccacuuuccuagagaaggcguguucguguccaacggcacccauugguucgugacacagcggaacuucuacgagccccagaucaucaccaccgacaacaccuucgugucuggcaacugcgacgucgugaucggcauugugaacaauaccguguacgacccucugcagcccgagcuggacagcuucaaagaggaacuggacaaguacuuuaagaaccacacaagccccgacguggaccugggcgauaucagcggaaucaaugccagcgucgugaacauccagaaagagaucgaccggcugaacgagguggccaagaaucugaacgagagccugaucgaccugcaagaacuggggaaguacgagcaguacaucaaguggcccugguacaucuggcugggcuuuaucgccggacugauugccaucgugauggucacaaucaugcuguguugcaugaccagcugcuguagcugccugaagggcuguuguagcuguggcagcugcugcaaguucgacgaggacgauucugagcccgugcugaagggcgugaaacugcacuacacaugaggacuagucccuguucccagagcccacuuuuuuuucuuuuuuugaaauaaaauagccugucuuucagaucucaaaggcucuuuucagagccaccaaaaaaaaaaaaaaaaaaaaaaaaaaaaaaaaaaaaaaaaaaaaaaaaaaaaaaaaaaaaaaaaaaaaaaaaaaaaaaaaaaaaaaaaaaaaaaaaaaaaa

SEQ ID NO: 23507 - RNA, 4094 nt, Artificial Sequence
  SARS-CoV-2/Wuhan/WIV05/2019__EPI_ISL_402128 spike protein mRNA gc mod (1-1273)(D614G_I692V)
aggagagucccgcagucggcguccagcggcucugcuuguucgugugugugucguugcaggccuuauucaagcuuaccauguucguguuccuggugcugcugccucugguguccagccagugugugaaccugaccaccagaacacagcugccuccagccuacaccaacagcuuuaccagaggcguguacuaccccgacaagguguucagauccagcgugcugcacucuacccaggaccuguuccugccuuucuucagcaacgugaccugguuccacgccauccacguguccggcaccaauggcaccaagagauucgacaaccccgugcugcccuucaacgacgggguguacuuugccagcaccgagaaguccaacaucaucagaggcuggaucuucggcaccacacuggacagcaagacccagagccugcugaucgugaacaacgccaccaacguggucaucaaagugugcgaguuccaguucugcaacgaccccuuccugggcgucuacuaccacaagaacaacaagagcuggauggaaagcgaguuccggguguacagcagcgccaacaacugcaccuucgaguacgugucccagccuuuccugauggaccuggaaggcaagcagggcaacuucaagaaccugcgcgaguucguguuuaagaacaucgacggcuacuucaagaucuacagcaagcacaccccuaucaaccucgugcgggaucugccucagggcuucucugcucuggaaccccugguggaucugcccaucggcaucaacaucacccgguuucagacacugcuggcccugcacagaagcuaccugacaccuggcgauagcagcagcggauggacagcuggugccgccgcuuacuaugugggcuaccugcagccuagaaccuuccugcugaaguacaacgagaacggcaccaucaccgacgccguggauugugcucuggauccucugagcgagacaaagugcacccugaaguccuucaccguggaaaagggcaucuaccagaccagcaacuuccgggugcagcccaccgaauccaucgugcgguuccccaauaucaccaaucugugccccuucggcgagguguucaaugccaccagauucgccucuguguacgccuggaaccggaagcggaucagcaauugcguggccgacuacuccgugcuguacaacuccgccagcuucagcaccuucaagugcuacggcguguccccuaccaagcugaacgaccugugcuucacaaacguguacgccgacagcuucgugauccggggagaugaagugcggcagauugccccuggacagacaggcaagaucgccgacuacaacuacaagcugcccgacgacuucaccggcugugugauugccuggaacagcaacaaccuggacuccaaagucggcggcaacuacaauuaccuguaccggcuguuccggaaguccaaucugaagcccuucgagcgggacaucuccaccgagaucuaucaggccggcagcaccccuuguaacggcguggaaggcuucaacugcuacuucccacugcaguccuacggcuuucagcccacaaauggcgugggcuaucagcccuacagagugguggugcugagcuucgaacugcugcaugccccugccacagugugcggcccuaagaaaagcaccaaucucgugaagaacaaaugcgugaacuucaacuucaacggccugaccggcaccggcgugcugacagagagcaacaagaaguuccugccauuccagcaguuuggccgggauaucgccgauaccacagacgccguuagagauccccagacacuggaaauccuggacaucaccccuugcagcuucggcggagugucugugaucaccccuggcaccaacaccagcaaucagguggcagugcuguaccagggcgugaacuguaccgaagugcccguggccauucacgccgaucagcugacaccuacauggcggguguacuccaccggcagcaauguguuucagaccagagccggcugucugaucggagccgagcacgugaacaauagcuacgagugcgacauccccaucggcgcuggaaucugcgccagcuaccagacacagacaaacagcccucggagagccagaagcguggccagccagagcgugauugccuacacaaugucucugggcgccgagaacagcguggccuacuccaacaacucuaucgcuauccccaccaacuucaccaucagcgugaccacagagauccugccuguguccaugaccaagaccagcguggacugcaccauguacaucugcggcgauuccaccgagugcuccaaccugcugcugcaguacggcagcuucugcacccagcugaauagagcccugacagggaucgccguggaacaggacaagaacacccaagagguguucgcccaagugaagcagaucuacaagaccccuccuaucaaggacuucggcggcuucaauuucagccagauucugcccgauccuagcaagcccagcaagcggagcuucaucgaggaccugcuguucaacaaagugacacuggccgacgccggcuucaucaagcaguauggcgauugucugggcgacauugccgccagggaucugauuugcgcccagaaguuuaacggacugacagugcugccuccucugcugaccgaugagaugaucgcccaguacacaucugcccugcuggccggcacaaucacaagcggcuggacauuuggagcaggcgccgcucugcagauccccuuugcuaugcagauggccuaccgguucaacggcaucggagugacccagaaugugcuguacgagaaccagaagcugaucgccaaccaguucaacagcgccaucggcaagauccaggacagccugagcagcacagcaagcgcccugggaaagcugcaggacguggucaaccagaaugcccaggcacugaacacccuggucaagcagcuguccuccaacuucggcgccaucagcucugugcugaacgauauccugagcagacuggacaaggucgaggccgaggugcagaucgacagacugaucacaggcagacugcagagccuccagacauacgugacccagcagcugaucagagccgccgagauuagagccucugccaaucuggccgccaccaagaugucugagugugugcugggccagagcaagagaguggacuuuugcggcaagggcuaccaccugaugagcuucccucagucugccccucacggcgugguguuucugcacgugacauaugugcccgcucaagagaagaauuucaccaccgcuccagccaucugccacgacggcaaagcccacuuuccuagagaaggcguguucguguccaacggcacccauugguucgugacacagcggaacuucuacgagccccagaucaucaccaccgacaacaccuucgugucuggcaacugcgacgucgugaucggcauugugaacaauaccguguacgacccucugcagcccgagcuggacagcuucaaagaggaacuggacaaguacuuuaagaaccacacaagccccgacguggaccugggcgauaucagcggaaucaaugccagcgucgugaacauccagaaagagaucgaccggcugaacgagguggccaagaaucugaacgagagccugaucgaccugcaagaacuggggaaguacgagcaguacaucaaguggcccugguacaucuggcugggcuuuaucgccggacugauugccaucgugauggucacaaucaugcuguguugcaugaccagcugcuguagcugccugaagggcuguuguagcuguggcagcugcugcaaguucgacgaggacgauucugagcccgugcugaagggcgugaaacugcacuacacaugaggacuagucccuguucccagagcccacuuuuuuuucuuuuuuugaaauaaaauagccugucuuucagaucucaaaggcucuuuucagagccaccaaaaaaaaaaaaaaaaaaaaaaaaaaaaaaaaaaaaaaaaaaaaaaaaaaaaaaaaaaaaaaaaaaaaaaaaaaaaaaaaaaaaaaaaaaaaaaaaaaaaa

SEQ ID NO: 23508 - RNA, 4094 nt, Artificial Sequence
  SARS-CoV-2/Wuhan/WIV05/2019__EPI_ISL_402128 spike protein mRNA gc mod (1-1273)(D614G_M1229I)
aggagagucccgcagucggcguccagcggcucugcuuguucgugugugugucguugcaggccuuauucaagcuuaccauguucguguuccuggugcugcugccucugguguccagccagugugugaaccugaccaccagaacacagcugccuccagccuacaccaacagcuuuaccagaggcguguacuaccccgacaagguguucagauccagcgugcugcacucuacccaggaccuguuccugccuuucuucagcaacgugaccugguuccacgccauccacguguccggcaccaauggcaccaagagauucgacaaccccgugcugcccuucaacgacgggguguacuuugccagcaccgagaaguccaacaucaucagaggcuggaucuucggcaccacacuggacagcaagacccagagccugcugaucgugaacaacgccaccaacguggucaucaaagugugcgaguuccaguucugcaacgaccccuuccugggcgucuacuaccacaagaacaacaagagcuggauggaaagcgaguuccggguguacagcagcgccaacaacugcaccuucgaguacgugucccagccuuuccugauggaccuggaaggcaagcagggcaacuucaagaaccugcgcgaguucguguuuaagaacaucgacggcuacuucaagaucuacagcaagcacaccccuaucaaccucgugcgggaucugccucagggcuucucugcucuggaaccccugguggaucugcccaucggcaucaacaucacccgguuucagacacugcuggcccugcacagaagcuaccugacaccuggcgauagcagcagcggauggacagcuggugccgccgcuuacuaugugggcuaccugcagccuagaaccuuccugcugaaguacaacgagaacggcaccaucaccgacgccguggauugugcucuggauccucugagcgagacaaagugcacccugaaguccuucaccguggaaaagggcaucuaccagaccagcaacuuccgggugcagcccaccgaauccaucgugcgguuccccaauaucaccaaucugugccccuucggcgagguguucaaugccaccagauucgccucuguguacgccuggaaccggaagcggaucagcaauugcguggccgacuacuccgugcuguacaacuccgccagcuucagcaccuucaagugcuacggcguguccccuaccaagcugaacgaccugugcuucacaaacguguacgccgacagcuucgugauccggggagaugaagugcggcagauugccccuggacagacaggcaagaucgccgacuacaacuacaagcugcccgacgacuucaccggcugugugauugccuggaacagcaacaaccuggacuccaaagucggcggcaacuacaauuaccuguaccggcuguuccggaaguccaaucugaagcccuucgagcgggacaucuccaccgagaucuaucaggccggcagcaccccuuguaacggcguggaaggcuucaacugcuacuucccacugcaguccuacggcuuucagcccacaaauggcgugggcuaucagcccuacagagugguggugcugagcuucgaacugcugcaugccccugccacagugugcggcccuaagaaaagcaccaaucucgugaagaacaaaugcgugaacuucaacuucaacggccugaccggcaccggcgugcugacagagagcaacaagaaguuccugccauuccagcaguuuggccgggauaucgccgauaccacagacgccguuagagauccccagacacuggaaauccuggacaucaccccuugcagcuucggcggagugucugugaucaccccuggcaccaacaccagcaaucagguggcagugcuguaccagggcgugaacuguaccgaagugcccguggccauucacgccgaucagcugacaccuacauggcggguguacuccaccggcagcaauguguuucagaccagagccggcugucugaucggagccgagcacgugaacaauagcuacgagugcgacauccccaucggcgcuggaaucugcgccagcuaccagacacagacaaacagcccucggagagccagaagcguggccagccagagcaucauugccuacacaaugucucugggcgccgagaacagcguggccuacuccaacaacucuaucgcuauccccaccaacuucaccaucagcgugaccacagagauccugccuguguccaugaccaagaccagcguggacugcaccauguacaucugcggcgauuccaccgagugcuccaaccugcugcugcaguacggcagcuucugcacccagcugaauagagcccugacagggaucgccguggaacaggacaagaacacccaagagguguucgcccaagugaagcagaucuacaagaccccuccuaucaaggacuucggcggcuucaauuucagccagauucugcccgauccuagcaagcccagcaagcggagcuucaucgaggaccugcuguucaacaaagugacacuggccgacgccggcuucaucaagcaguauggcgauugucugggcgacauugccgccagggaucugauuugcgcccagaaguuuaacggacugacagugcugccuccucugcugaccgaugagaugaucgcccaguacacaucugcccugcuggccggcacaaucacaagcggcuggacauuuggagcaggcgccgcucugcagauccccuuugcuaugcagauggccuaccgguucaacggcaucggagugacccagaaugugcuguacgagaaccagaagcugaucgccaaccaguucaacagcgccaucggcaagauccaggacagccugagcagcacagcaagcgcccugggaaagcugcaggacguggucaaccagaaugcccaggcacugaacacccuggucaagcagcuguccuccaacuucggcgccaucagcucugugcugaacgauauccugagcagacuggacaaggucgaggccgaggugcagaucgacagacugaucacaggcagacugcagagccuccagacauacgugacccagcagcugaucagagccgccgagauuagagccucugccaaucuggccgccaccaagaugucugagugugugcugggccagagcaagagaguggacuuuugcggcaagggcuaccaccugaugagcuucccucagucugccccucacggcgugguguuucugcacgugacauaugugcccgcucaagagaagaauuucaccaccgcuccagccaucugccacgacggcaaagcccacuuuccuagagaaggcguguucguguccaacggcacccauugguucgugacacagcggaacuucuacgagccccagaucaucaccaccgacaacaccuucgugucuggcaacugcgacgucgugaucggcauugugaacaauaccguguacgacccucugcagcccgagcuggacagcuucaaagaggaacuggacaaguacuuuaagaaccacacaagccccgacguggaccugggcgauaucagcggaaucaaugccagcgucgugaacauccagaaagagaucgaccggcugaacgagguggccaagaaucugaacgagagccugaucgaccugcaagaacuggggaaguacgagcaguacaucaaguggcccugguacaucuggcugggcuuuaucgccggacugauugccaucgugaucgucacaaucaugcuguguugcaugaccagcugcuguagcugccugaagggcuguuguagcuguggcagcugcugcaaguucgacgaggacgauucugagcccgugcugaagggcgugaaacugcacuacacaugaggacuagucccuguucccagagcccacuuuuuuuucuuuuuuugaaauaaaauagccugucuuucagaucucaaaggcucuuuucagagccaccaaaaaaaaaaaaaaaaaaaaaaaaaaaaaaaaaaaaaaaaaaaaaaaaaaaaaaaaaaaaaaaaaaaaaaaaaaaaaaaaaaaaaaaaaaaaaaaaaaaaa

SEQ ID NO: 23509 - RNA, 4088 nt, Artificial Sequence
  SARS-CoV-2/Wuhan/WIV05/2019__EPI_ISL_402128 spike protein mRNA gc mod (1-1273)(H69del_V70del_A222V_Y453F_S477N_D614G_I692V)
aggagagucccgcagucggcguccagcggcucugcuuguucgugugugugucguugcaggccuuauucaagcuuaccauguucguguuccuggugcugcugccucugguguccagccagugugugaaccugaccaccagaacacagcugccuccagccuacaccaacagcuuuaccagaggcguguacuaccccgacaagguguucagauccagcgugcugcacucuacccaggaccuguuccugccuuucuucagcaacgugaccugguuccacgccaucuccggcaccaauggcaccaagagauucgacaaccccgugcugcccuucaacgacgggguguacuuugccagcaccgagaaguccaacaucaucagaggcuggaucuucggcaccacacuggacagcaagacccagagccugcugaucgugaacaacgccaccaacguggucaucaaagugugcgaguuccaguucugcaacgaccccuuccugggcgucuacuaccacaagaacaacaagagcuggauggaaagcgaguuccggguguacagcagcgccaacaacugcaccuucgaguacgugucccagccuuuccugauggaccuggaaggcaagcagggcaacuucaagaaccugcgcgaguucguguuuaagaacaucgacggcuacuucaagaucuacagcaagcacaccccuaucaaccucgugcgggaucugccucagggcuucucugugcuggaaccccugguggaucugcccaucggcaucaacaucacccgguuucagacacugcuggcccugcacagaagcuaccugacaccuggcgauagcagcagcggauggacagcuggugccgccgcuuacuaugugggcuaccugcagccuagaaccuuccugcugaaguacaacgagaacggcaccaucaccgacgccguggauugugcucuggauccucugagcgagacaaagugcacccugaaguccuucaccguggaaaagggcaucuaccagaccagcaacuuccgggugcagcccaccgaauccaucgugcgguuccccaauaucaccaaucugugccccuucggcgagguguucaaugccaccagauucgccucuguguacgccuggaaccggaagcggaucagcaauugcguggccgacuacuccgugcuguacaacuccgccagcuucagcaccuucaagugcuacggcguguccccuaccaagcugaacgaccugugcuucacaaacguguacgccgacagcuucgugauccggggagaugaagugcggcagauugccccuggacagacaggcaagaucgccgacuacaacuacaagcugcccgacgacuucaccggcugugugauugccuggaacagcaacaaccuggacuccaaagucggcggcaacuacaauuaccuguuccggcuguuccggaaguccaaucugaagcccuucgagcgggacaucuccaccgagaucuaucaggccggcaacaccccuuguaacggcguggaaggcuucaacugcuacuucccacugcaguccuacggcuuucagcccacaaauggcgugggcuaucagcccuacagagugguggugcugagcuucgaacugcugcaugccccugccacagugugcggcccuaagaaaagcaccaaucucgugaagaacaaaugcgugaacuucaacuucaacggccugaccggcaccggcgugcugacagagagcaacaagaaguuccugccauuccagcaguuuggccgggauaucgccgauaccacagacgccguuagagauccccagacacuggaaauccuggacaucaccccuugcagcuucggcggagugucugugaucaccccuggcaccaacaccagcaaucagguggcagugcuguaccagggcgugaacuguaccgaagugcccguggccauucacgccgaucagcugacaccuacauggcggguguacuccaccggcagcaauguguuucagaccagagccggcugucugaucggagccgagcacgugaacaauagcuacgagugcgacauccccaucggcgcuggaaucugcgccagcuaccagacacagacaaacagcccucggagagccagaagcguggccagccagagcgugauugccuacacaaugucucugggcgccgagaacagcguggccuacuccaacaacucuaucgcuauccccaccaacuucaccaucagcgugaccacagagauccugccuguguccaugaccaagaccagcguggacugcaccauguacaucugcggcgauuccaccgagugcuccaaccugcugcugcaguacggcagcuucugcacccagcugaauagagcccugacagggaucgccguggaacaggacaagaacacccaagagguguucgcccaagugaagcagaucuacaagaccccuccuaucaaggacuucggcggcuucaauuucagccagauucugcccgauccuagcaagcccagcaagcggagcuucaucgaggaccugcuguucaacaaagugacacuggccgacgccggcuucaucaagcaguauggcgauugucugggcgacauugccgccagggaucugauuugcgcccagaaguuuaacggacugacagugcugccuccucugcugaccgaugagaugaucgcccaguacacaucugcccugcuggccggcacaaucacaagcggcuggacauuuggagcaggcgccgcucugcagauccccuuugcuaugcagauggccuaccgguucaacggcaucggagugacccagaaugugcuguacgagaaccagaagcugaucgccaaccaguucaacagcgccaucggcaagauccaggacagccugagcagcacagcaagcgcccugggaaagcugcaggacguggucaaccagaaugcccaggcacugaacacccuggucaagcagcuguccuccaacuucggcgccaucagcucugugcugaacgauauccugagcagacuggacaaggucgaggccgaggugcagaucgacagacugaucacaggcagacugcagagccuccagacauacgugacccagcagcugaucagagccgccgagauuagagccucugccaaucuggccgccaccaagaugucugagugugugcugggccagagcaagagaguggacuuuugcggcaagggcuaccaccugaugagcuucccucagucugccccucacggcgugguguuucugcacgugacauaugugcccgcucaagagaagaauuucaccaccgcuccagccaucugccacgacggcaaagcccacuuuccuagagaaggcguguucguguccaacggcacccauugguucgugacacagcggaacuucuacgagccccagaucaucaccaccgacaacaccuucgugucuggcaacugcgacgucgugaucggcauugugaacaauaccguguacgacccucugcagcccgagcuggacagcuucaaagaggaacuggacaaguacuuuaagaaccacacaagccccgacguggaccugggcgauaucagcggaaucaaugccagcgucgugaacauccagaaagagaucgaccggcugaacgagguggccaagaaucugaacgagagccugaucgaccugcaagaacuggggaaguacgagcaguacaucaaguggcccugguacaucuggcugggcuuuaucgccggacugauugccaucgugauggucacaaucaugcuguguugcaugaccagcugcuguagcugccugaagggcuguuguagcuguggcagcugcugcaaguucgacgaggacgauucugagcccgugcugaagggcgugaaacugcacuacacaugaggacuagucccuguucccagagcccacuuuuuuuucuuuuuuugaaauaaaauagccugucuuucagaucucaaaggcucuuuucagagccaccaaaaaaaaaaaaaaaaaaaaaaaaaaaaaaaaaaaaaaaaaaaaaaaaaaaaaaaaaaaaaaaaaaaaaaaaaaaaaaaaaaaaaaaaaaaaaaaaaaaaa

SEQ ID NO: 23510 - RNA, 4088 nt, Artificial Sequence
  SARS-CoV-2/Wuhan/WIV05/2019__EPI_ISL_402128 spike protein mRNA gc mod (1-1273)(H69del_V70del_Y453F_D614G_I692V_M1229I)
aggagagucccgcagucggcguccagcggcucugcuuguucgugugugugucguugcaggccuuauucaagcuuaccauguucguguuccuggugcugcugccucugguguccagccagugugugaaccugaccaccagaacacagcugccuccagccuacaccaacagcuuuaccagaggcguguacuaccccgacaagguguucagauccagcgugcugcacucuacccaggaccuguuccugccuuucuucagcaacgugaccugguuccacgccaucuccggcaccaauggcaccaagagauucgacaaccccgugcugcccuucaacgacgggguguacuuugccagcaccgagaaguccaacaucaucagaggcuggaucuucggcaccacacuggacagcaagacccagagccugcugaucgugaacaacgccaccaacguggucaucaaagugugcgaguuccaguucugcaacgaccccuuccugggcgucuacuaccacaagaacaacaagagcuggauggaaagcgaguuccggguguacagcagcgccaacaacugcaccuucgaguacgugucccagccuuuccugauggaccuggaaggcaagcagggcaacuucaagaaccugcgcgaguucguguuuaagaacaucgacggcuacuucaagaucuacagcaagcacaccccuaucaaccucgugcgggaucugccucagggcuucucugcucuggaaccccugguggaucugcccaucggcaucaacaucacccgguuucagacacugcuggcccugcacagaagcuaccugacaccuggcgauagcagcagcggauggacagcuggugccgccgcuuacuaugugggcuaccugcagccuagaaccuuccugcugaaguacaacgagaacggcaccaucaccgacgccguggauugugcucuggauccucugagcgagacaaagugcacccugaaguccuucaccguggaaaagggcaucuaccagaccagcaacuuccgggugcagcccaccgaauccaucgugcgguuccccaauaucaccaaucugugccccuucggcgagguguucaaugccaccagauucgccucuguguacgccuggaaccggaagcggaucagcaauugcguggccgacuacuccgugcuguacaacuccgccagcuucagcaccuucaagugcuacggcguguccccuaccaagcugaacgaccugugcuucacaaacguguacgccgacagcuucgugauccggggagaugaagugcggcagauugccccuggacagacaggcaagaucgccgacuacaacuacaagcugcccgacgacuucaccggcugugugauugccuggaacagcaacaaccuggacuccaaagucggcggcaacuacaauuaccuguuccggcuguuccggaaguccaaucugaagcccuucgagcgggacaucuccaccgagaucuaucaggccggcagcaccccuuguaacggcguggaaggcuucaacugcuacuucccacugcaguccuacggcuuucagcccacaaauggcgugggcuaucagcccuacagagugguggugcugagcuucgaacugcugcaugccccugccacagugugcggcccuaagaaaagcaccaaucucgugaagaacaaaugcgugaacuucaacuucaacggccugaccggcaccggcgugcugacagagagcaacaagaaguuccugccauuccagcaguuuggccgggauaucgccgauaccacagacgccguuagagauccccagacacuggaaauccuggacaucaccccuugcagcuucggcggagugucugugaucaccccuggcaccaacaccagcaaucagguggcagugcuguaccagggcgugaacuguaccgaagugcccguggccauucacgccgaucagcugacaccuacauggcggguguacuccaccggcagcaauguguuucagaccagagccggcugucugaucggagccgagcacgugaacaauagcuacgagugcgacauccccaucggcgcuggaaucugcgccagcuaccagacacagacaaacagcccucggagagccagaagcguggccagccagagcgugauugccuacacaaugucucugggcgccgagaacagcguggccuacuccaacaacucuaucgcuauccccaccaacuucaccaucagcgugaccacagagauccugccuguguccaugaccaagaccagcguggacugcaccauguacaucugcggcgauuccaccgagugcuccaaccugcugcugcaguacggcagcuucugcacccagcugaauagagcccugacagggaucgccguggaacaggacaagaacacccaagagguguucgcccaagugaagcagaucuacaagaccccuccuaucaaggacuucggcggcuucaauuucagccagauucugcccgauccuagcaagcccagcaagcggagcuucaucgaggaccugcuguucaacaaagugacacuggccgacgccggcuucaucaagcaguauggcgauugucugggcgacauugccgccagggaucugauuugcgcccagaaguuuaacggacugacagugcugccuccucugcugaccgaugagaugaucgcccaguacacaucugcccugcuggccggcacaaucacaagcggcuggacauuuggagcaggcgccgcucugcagauccccuuugcuaugcagauggccuaccgguucaacggcaucggagugacccagaaugugcuguacgagaaccagaagcugaucgccaaccaguucaacagcgccaucggcaagauccaggacagccugagcagcacagcaagcgcccugggaaagcugcaggacguggucaaccagaaugcccaggcacugaacacccuggucaagcagcuguccuccaacuucggcgccaucagcucugugcugaacgauauccugagcagacuggacaaggucgaggccgaggugcagaucgacagacugaucacaggcagacugcagagccuccagacauacgugacccagcagcugaucagagccgccgagauuagagccucugccaaucuggccgccaccaagaugucugagugugugcugggccagagcaagagaguggacuuuugcggcaagggcuaccaccugaugagcuucccucagucugccccucacggcgugguguuucugcacgugacauaugugcccgcucaagagaagaauuucaccaccgcuccagccaucugccacgacggcaaagcccacuuuccuagagaaggcguguucguguccaacggcacccauugguucgugacacagcggaacuucuacgagccccagaucaucaccaccgacaacaccuucgugucuggcaacugcgacgucgugaucggcauugugaacaauaccguguacgacccucugcagcccgagcuggacagcuucaaagaggaacuggacaaguacuuuaagaaccacacaagccccgacguggaccugggcgauaucagcggaaucaaugccagcgucgugaacauccagaaagagaucgaccggcugaacgagguggccaagaaucugaacgagagccugaucgaccugcaagaacuggggaaguacgagcaguacaucaaguggcccugguacaucuggcugggcuuuaucgccggacugauugccaucgugaucgucacaaucaugcuguguugcaugaccagcugcuguagcugccugaagggcuguuguagcuguggcagcugcugcaaguucgacgaggacgauucugagcccgugcugaagggcgugaaacugcacuacacaugaggacuagucccuguucccagagcccacuuuuuuuucuuuuuuugaaauaaaauagccugucuuucagaucucaaaggcucuuuucagagccaccaaaaaaaaaaaaaaaaaaaaaaaaaaaaaaaaaaaaaaaaaaaaaaaaaaaaaaaaaaaaaaaaaaaaaaaaaaaaaaaaaaaaaaaaaaaaaaaaaaaaa

SEQ ID NO: 23511 - RNA, 4085 nt, Artificial Sequence
  SARS-CoV-2/Wuhan/WIV05/2019__EPI_ISL_402128 spike protein mRNA gc mod (1-1273)(H69del_V70del_Y144del_N501Y_A570D_D614G_P681H_T716I_S982 A_D1118H)
aggagagucccgcagucggcguccagcggcucugcuuguucgugugugugucguugcaggccuuauucaagcuuaccauguucguguuccuggugcugcugccucugguguccagccagugugugaaccugaccaccagaacacagcugccuccagccuacaccaacagcuuuaccagaggcguguacuaccccgacaagguguucagauccagcgugcugcacucuacccaggaccuguuccugccuuucuucagcaacgugaccugguuccacgccaucuccggcaccaauggcaccaagagauucgacaaccccgugcugcccuucaacgacgggguguacuuugccagcaccgagaaguccaacaucaucagaggcuggaucuucggcaccacacuggacagcaagacccagagccugcugaucgugaacaacgccaccaacguggucaucaaagugugcgaguuccaguucugcaacgaccccuuccugggcgucuaccacaagaacaacaagagcuggauggaaagcgaguuccggguguacagcagcgccaacaacugcaccuucgaguacgugucccagccuuuccugauggaccuggaaggcaagcagggcaacuucaagaaccugcgcgaguucguguuuaagaacaucgacggcuacuucaagaucuacagcaagcacaccccuaucaaccucgugcgggaucugccucagggcuucucugcucuggaaccccugguggaucugcccaucggcaucaacaucacccgguuucagacacugcuggcccugcacagaagcuaccugacaccuggcgauagcagcagcggauggacagcuggugccgccgcuuacuaugugggcuaccugcagccuagaaccuuccugcugaaguacaacgagaacggcaccaucaccgacgccguggauugugcucuggauccucugagcgagacaaagugcacccugaaguccuucaccguggaaaagggcaucuaccagaccagcaacuuccgggugcagcccaccgaauccaucgugcgguuccccaauaucaccaaucugugccccuucggcgagguguucaaugccaccagauucgccucuguguacgccuggaaccggaagcggaucagcaauugcguggccgacuacuccgugcuguacaacuccgccagcuucagcaccuucaagugcuacggcguguccccuaccaagcugaacgaccugugcuucacaaacguguacgccgacagcuucgugauccggggagaugaagugcggcagauugccccuggacagacaggcaagaucgccgacuacaacuacaagcugcccgacgacuucaccggcugugugauugccuggaacagcaacaaccuggacuccaaagucggcggcaacuacaauuaccuguaccggcuguuccggaaguccaaucugaagcccuucgagcgggacaucuccaccgagaucuaucaggccggcagcaccccuuguaacggcguggaaggcuucaacugcuacuucccacugcaguccuacggcuuucagcccacauacggcgugggcuaucagcccuacagagugguggugcugagcuucgaacugcugcaugccccugccacagugugcggcccuaagaaaagcaccaaucucgugaagaacaaaugcgugaacuucaacuucaacggccugaccggcaccggcgugcugacagagagcaacaagaaguuccugccauuccagcaguuuggccgggauaucgacgauaccacagacgccguuagagauccccagacacuggaaauccuggacaucaccccuugcagcuucggcggagugucugugaucaccccuggcaccaacaccagcaaucagguggcagugcuguaccagggcgugaacuguaccgaagugcccguggccauucacgccgaucagcugacaccuacauggcggguguacuccaccggcagcaauguguuucagaccagagccggcugucugaucggagccgagcacgugaacaauagcuacgagugcgacauccccaucggcgcuggaaucugcgccagcuaccagacacagacaaacagccaccggagagccagaagcguggccagccagagcaucauugccuacacaaugucucugggcgccgagaacagcguggccuacuccaacaacucuaucgcuauccccaucaacuucaccaucagcgugaccacagagauccugccuguguccaugaccaagaccagcguggacugcaccauguacaucugcggcgauuccaccgagugcuccaaccugcugcugcaguacggcagcuucugcacccagcugaauagagcccugacagggaucgccguggaacaggacaagaacacccaagagguguucgcccaagugaagcagaucuacaagaccccuccuaucaaggacuucggcggcuucaauuucagccagauucugcccgauccuagcaagcccagcaagcggagcuucaucgaggaccugcuguucaacaaagugacacuggccgacgccggcuucaucaagcaguauggcgauugucugggcgacauugccgccagggaucugauuugcgcccagaaguuuaacggacugacagugcugccuccucugcugaccgaugagaugaucgcccaguacacaucugcccugcuggccggcacaaucacaagcggcuggacauuuggagcaggcgccgcucugcagauccccuuugcuaugcagauggccuaccgguucaacggcaucggagugacccagaaugugcuguacgagaaccagaagcugaucgccaaccaguucaacagcgccaucggcaagauccaggacagccugagcagcacagcaagcgcccugggaaagcugcaggacguggucaaccagaaugcccaggcacugaacacccuggucaagcagcuguccuccaacuucggcgccaucagcucugugcugaacgauauccuggccagacuggacaaggucgaggccgaggugcagaucgacagacugaucacaggcagacugcagagccuccagacauacgugacccagcagcugaucagagccgccgagauuagagccucugccaaucuggccgccaccaagaugucugagugugugcugggccagagcaagagaguggacuuuugcggcaagggcuaccaccugaugagcuucccucagucugccccucacggcgugguguuucugcacgugacauaugugcccgcucaagagaagaauuucaccaccgcuccagccaucugccacgacggcaaagcccacuuuccuagagaaggcguguucguguccaacggcacccauugguucgugacacagcggaacuucuacgagccccagaucaucaccacccacaacaccuucgugucuggcaacugcgacgucgugaucggcauugugaacaauaccguguacgacccucugcagcccgagcuggacagcuucaaagaggaacuggacaaguacuuuaagaaccacacaagccccgacguggaccugggcgauaucagcggaaucaaugccagcgucgugaacauccagaaagagaucgaccggcugaacgagguggccaagaaucugaacgagagccugaucgaccugcaagaacuggggaaguacgagcaguacaucaaguggcccugguacaucuggcugggcuuuaucgccggacugauugccaucgugauggucacaaucaugcuguguugcaugaccagcugcuguagcugccugaagggcuguuguagcuguggcagcugcugcaaguucgacgaggacgauucugagcccgugcugaagggcgugaaacugcacuacacaugaggacuagucccuguucccagagcccacuuuuuuuucuuuuuuugaaauaaaauagccugucuuucagaucucaaaggcucuuuucagagccaccaaaaaaaaaaaaaaaaaaaaaaaaaaaaaaaaaaaaaaaaaaaaaaaaaaaaaaaaaaaaaaaaaaaaaaaaaaaaaaaaaaaaaaaaaaaaaaaaaaaaa

SEQ ID NO: 23512 - RNA, 4094 nt, Artificial Sequence
  SARS-CoV-2/Wuhan/WIV05/2019__EPI_ISL_402128 spike protein mRNA gc mod (1-1273)(K417N_E484K_N501Y_D614G)
aggagagucccgcagucggcguccagcggcucugcuuguucgugugugugucguugcaggccuuauucaagcuuaccauguucguguuccuggugcugcugccucugguguccagccagugugugaaccugaccaccagaacacagcugccuccagccuacaccaacagcuuuaccagaggcguguacuaccccgacaagguguucagauccagcgugcugcacucuacccaggaccuguuccugccuuucuucagcaacgugaccugguuccacgccauccacguguccggcaccaauggcaccaagagauucgacaaccccgugcugcccuucaacgacgggguguacuuugccagcaccgagaaguccaacaucaucagaggcuggaucuucggcaccacacuggacagcaagacccagagccugcugaucgugaacaacgccaccaacguggucaucaaagugugcgaguuccaguucugcaacgaccccuuccugggcgucuacuaccacaagaacaacaagagcuggauggaaagcgaguuccggguguacagcagcgccaacaacugcaccuucgaguacgugucccagccuuuccugauggaccuggaaggcaagcagggcaacuucaagaaccugcgcgaguucguguuuaagaacaucgacggcuacuucaagaucuacagcaagcacaccccuaucaaccucgugcgggaucugccucagggcuucucugcucuggaaccccugguggaucugcccaucggcaucaacaucacccgguuucagacacugcuggcccugcacagaagcuaccugacaccuggcgauagcagcagcggauggacagcuggugccgccgcuuacuaugugggcuaccugcagccuagaaccuuccugcugaaguacaacgagaacggcaccaucaccgacgccguggauugugcucuggauccucugagcgagacaaagugcacccugaaguccuucaccguggaaaagggcaucuaccagaccagcaacuuccgggugcagcccaccgaauccaucgugcgguuccccaauaucaccaaucugugccccuucggcgagguguucaaugccaccagauucgccucuguguacgccuggaaccggaagcggaucagcaauugcguggccgacuacuccgugcuguacaacuccgccagcuucagcaccuucaagugcuacggcguguccccuaccaagcugaacgaccugugcuucacaaacguguacgccgacagcuucgugauccggggagaugaagugcggcagauugccccuggacagacaggcaacaucgccgacuacaacuacaagcugcccgacgacuucaccggcugugugauugccuggaacagcaacaaccuggacuccaaagucggcggcaacuacaauuaccuguaccggcuguuccggaaguccaaucugaagcccuucgagcgggacaucuccaccgagaucuaucaggccggcagcaccccuuguaacggcgugaagggcuucaacugcuacuucccacugcaguccuacggcuuucagcccacauacggcgugggcuaucagcccuacagagugguggugcugagcuucgaacugcugcaugccccugccacagugugcggcccuaagaaaagcaccaaucucgugaagaacaaaugcgugaacuucaacuucaacggccugaccggcaccggcgugcugacagagagcaacaagaaguuccugccauuccagcaguuuggccgggauaucgccgauaccacagacgccguuagagauccccagacacuggaaauccuggacaucaccccuugcagcuucggcggagugucugugaucaccccuggcaccaacaccagcaaucagguggcagugcuguaccagggcgugaacuguaccgaagugcccguggccauucacgccgaucagcugacaccuacauggcggguguacuccaccggcagcaauguguuucagaccagagccggcugucugaucggagccgagcacgugaacaauagcuacgagugcgacauccccaucggcgcuggaaucugcgccagcuaccagacacagacaaacagcccucggagagccagaagcguggccagccagagcaucauugccuacacaaugucucugggcgccgagaacagcguggccuacuccaacaacucuaucgcuauccccaccaacuucaccaucagcgugaccacagagauccugccuguguccaugaccaagaccagcguggacugcaccauguacaucugcggcgauuccaccgagugcuccaaccugcugcugcaguacggcagcuucugcacccagcugaauagagcccugacagggaucgccguggaacaggacaagaacacccaagagguguucgcccaagugaagcagaucuacaagaccccuccuaucaaggacuucggcggcuucaauuucagccagauucugcccgauccuagcaagcccagcaagcggagcuucaucgaggaccugcuguucaacaaagugacacuggccgacgccggcuucaucaagcaguauggcgauugucugggcgacauugccgccagggaucugauuugcgcccagaaguuuaacggacugacagugcugccuccucugcugaccgaugagaugaucgcccaguacacaucugcccugcuggccggcacaaucacaagcggcuggacauuuggagcaggcgccgcucugcagauccccuuugcuaugcagauggccuaccgguucaacggcaucggagugacccagaaugugcuguacgagaaccagaagcugaucgccaaccaguucaacagcgccaucggcaagauccaggacagccugagcagcacagcaagcgcccugggaaagcugcaggacguggucaaccagaaugcccaggcacugaacacccuggucaagcagcuguccuccaacuucggcgccaucagcucugugcugaacgauauccugagcagacuggacaaggucgaggccgaggugcagaucgacagacugaucacaggcagacugcagagccuccagacauacgugacccagcagcugaucagagccgccgagauuagagccucugccaaucuggccgccaccaagaugucugagugugugcugggccagagcaagagaguggacuuuugcggcaagggcuaccaccugaugagcuucccucagucugccccucacggcgugguguuucugcacgugacauaugugcccgcucaagagaagaauuucaccaccgcuccagccaucugccacgacggcaaagcccacuuuccuagagaaggcguguucguguccaacggcacccauugguucgugacacagcggaacuucuacgagccccagaucaucaccaccgacaacaccuucgugucuggcaacugcgacgucgugaucggcauugugaacaauaccguguacgacccucugcagcccgagcuggacagcuucaaagaggaacuggacaaguacuuuaagaaccacacaagccccgacguggaccugggcgauaucagcggaaucaaugccagcgucgugaacauccagaaagagaucgaccggcugaacgagguggccaagaaucugaacgagagccugaucgaccugcaagaacuggggaaguacgagcaguacaucaaguggcccugguacaucuggcugggcuuuaucgccggacugauugccaucgugauggucacaaucaugcuguguugcaugaccagcugcuguagcugccugaagggcuguuguagcuguggcagcugcugcaaguucgacgaggacgauucugagcccgugcugaagggcgugaaacugcacuacacaugaggacuagucccuguucccagagcccacuuuuuuuucuuuuuuugaaauaaaauagccugucuuucagaucucaaaggcucuuuucagagccaccaaaaaaaaaaaaaaaaaaaaaaaaaaaaaaaaaaaaaaaaaaaaaaaaaaaaaaaaaaaaaaaaaaaaaaaaaaaaaaaaaaaaaaaaaaaaaaaaaaaaa

SEQ ID NO: 23513 - RNA, 4085 nt, Artificial Sequence
  SARS-CoV-2/Wuhan/WIV05/2019__EPI_ISL_402128 spike protein mRNA gc mod (1-1273)(L18F_D80A_D215G_L242del_A243del_L244del_R246I_K417N_E484 K_N501Y_D614G_A701V)
aggagagucccgcagucggcguccagcggcucugcuuguucgugugugugucguugcaggccuuauucaagcuuaccauguucguguuccuggugcugcugccucugguguccagccagugugugaacuucaccaccagaacacagcugccuccagccuacaccaacagcuuuaccagaggcguguacuaccccgacaagguguucagauccagcgugcugcacucuacccaggaccuguuccugccuuucuucagcaacgugaccugguuccacgccauccacguguccggcaccaauggcaccaagagauucgccaaccccgugcugcccuucaacgacgggguguacuuugccagcaccgagaaguccaacaucaucagaggcuggaucuucggcaccacacuggacagcaagacccagagccugcugaucgugaacaacgccaccaacguggucaucaaagugugcgaguuccaguucugcaacgaccccuuccugggcgucuacuaccacaagaacaacaagagcuggauggaaagcgaguuccggguguacagcagcgccaacaacugcaccuucgaguacgugucccagccuuuccugauggaccuggaaggcaagcagggcaacuucaagaaccugcgcgaguucguguuuaagaacaucgacggcuacuucaagaucuacagcaagcacaccccuaucaaccucgugcggggccugccucagggcuucucugcucuggaaccccugguggaucugcccaucggcaucaacaucacccgguuucagacacugcacaucagcuaccugacaccuggcgauagcagcagcggauggacagcuggugccgccgcuuacuaugugggcuaccugcagccuagaaccuuccugcugaaguacaacgagaacggcaccaucaccgacgccguggauugugcucuggauccucugagcgagacaaagugcacccugaaguccuucaccguggaaaagggcaucuaccagaccagcaacuuccgggugcagcccaccgaauccaucgugcgguuccccaauaucaccaaucugugccccuucggcgagguguucaaugccaccagauucgccucuguguacgccuggaaccggaagcggaucagcaauugcguggccgacuacuccgugcuguacaacuccgccagcuucagcaccuucaagugcuacggcguguccccuaccaagcugaacgaccugugcuucacaaacguguacgccgacagcuucgugauccggggagaugaagugcggcagauugccccuggacagacaggcaacaucgccgacuacaacuacaagcugcccgacgacuucaccggcugugugauugccuggaacagcaacaaccuggacuccaaagucggcggcaacuacaauuaccuguaccggcuguuccggaaguccaaucugaagcccuucgagcgggacaucuccaccgagaucuaucaggccggcagcaccccuuguaacggcgugaagggcuucaacugcuacuucccacugcaguccuacggcuuucagcccacauacggcgugggcuaucagcccuacagagugguggugcugagcuucgaacugcugcaugccccugccacagugugcggcccuaagaaaagcaccaaucucgugaagaacaaaugcgugaacuucaacuucaacggccugaccggcaccggcgugcugacagagagcaacaagaaguuccugccauuccagcaguuuggccgggauaucgccgauaccacagacgccguuagagauccccagacacuggaaauccuggacaucaccccuugcagcuucggcggagugucugugaucaccccuggcaccaacaccagcaaucagguggcagugcuguaccagggcgugaacuguaccgaagugcccguggccauucacgccgaucagcugacaccuacauggcggguguacuccaccggcagcaauguguuucagaccagagccggcugucugaucggagccgagcacgugaacaauagcuacgagugcgacauccccaucggcgcuggaaucugcgccagcuaccagacacagacaaacagcccucggagagccagaagcguggccagccagagcaucauugccuacacaaugucucugggcguggagaacagcguggccuacuccaacaacucuaucgcuauccccaccaacuucaccaucagcgugaccacagagauccugccuguguccaugaccaagaccagcguggacugcaccauguacaucugcggcgauuccaccgagugcuccaaccugcugcugcaguacggcagcuucugcacccagcugaauagagcccugacagggaucgccguggaacaggacaagaacacccaagagguguucgcccaagugaagcagaucuacaagaccccuccuaucaaggacuucggcggcuucaauuucagccagauucugcccgauccuagcaagcccagcaagcggagcuucaucgaggaccugcuguucaacaaagugacacuggccgacgccggcuucaucaagcaguauggcgauugucugggcgacauugccgccagggaucugauuugcgcccagaaguuuaacggacugacagugcugccuccucugcugaccgaugagaugaucgcccaguacacaucugcccugcuggccggcacaaucacaagcggcuggacauuuggagcaggcgccgcucugcagauccccuuugcuaugcagauggccuaccgguucaacggcaucggagugacccagaaugugcuguacgagaaccagaagcugaucgccaaccaguucaacagcgccaucggcaagauccaggacagccugagcagcacagcaagcgcccugggaaagcugcaggacguggucaaccagaaugcccaggcacugaacacccuggucaagcagcuguccuccaacuucggcgccaucagcucugugcugaacgauauccugagcagacuggacaaggucgaggccgaggugcagaucgacagacugaucacaggcagacugcagagccuccagacauacgugacccagcagcugaucagagccgccgagauuagagccucugccaaucuggccgccaccaagaugucugagugugugcugggccagagcaagagaguggacuuuugcggcaagggcuaccaccugaugagcuucccucagucugccccucacggcgugguguuucugcacgugacauaugugcccgcucaagagaagaauuucaccaccgcuccagccaucugccacgacggcaaagcccacuuuccuagagaaggcguguucguguccaacggcacccauugguucgugacacagcggaacuucuacgagccccagaucaucaccaccgacaacaccuucgugucuggcaacugcgacgucgugaucggcauugugaacaauaccguguacgacccucugcagcccgagcuggacagcuucaaagaggaacuggacaaguacuuuaagaaccacacaagccccgacguggaccugggcgauaucagcggaaucaaugccagcgucgugaacauccagaaagagaucgaccggcugaacgagguggccaagaaucugaacgagagccugaucgaccugcaagaacuggggaaguacgagcaguacaucaaguggcccugguacaucuggcugggcuuuaucgccggacugauugccaucgugauggucacaaucaugcuguguugcaugaccagcugcuguagcugccugaagggcuguuguagcuguggcagcugcugcaaguucgacgaggacgauucugagcccgugcugaagggcgugaaacugcacuacacaugaggacuagucccuguucccagagcccacuuuuuuuucuuuuuuugaaauaaaauagccugucuuucagaucucaaaggcucuuuucagagccaccaaaaaaaaaaaaaaaaaaaaaaaaaaaaaaaaaaaaaaaaaaaaaaaaaaaaaaaaaaaaaaaaaaaaaaaaaaaaaaaaaaaaaaaaaaaaaaaaaaaaa

SEQ ID NO: 23514 - RNA, 4094 nt, Artificial Sequence
  SARS-CoV-2/Wuhan/WIV05/2019__EPI_ISL_402128 spike protein mRNA gc mod (1-1273)(E484K_D614G)
aggagagucccgcagucggcguccagcggcucugcuuguucgugugugugucguugcaggccuuauucaagcuuaccauguucguguuccuggugcugcugccucugguguccagccagugugugaaccugaccaccagaacacagcugccuccagccuacaccaacagcuuuaccagaggcguguacuaccccgacaagguguucagauccagcgugcugcacucuacccaggaccuguuccugccuuucuucagcaacgugaccugguuccacgccauccacguguccggcaccaauggcaccaagagauucgacaaccccgugcugcccuucaacgacgggguguacuuugccagcaccgagaaguccaacaucaucagaggcuggaucuucggcaccacacuggacagcaagacccagagccugcugaucgugaacaacgccaccaacguggucaucaaagugugcgaguuccaguucugcaacgaccccuuccugggcgucuacuaccacaagaacaacaagagcuggauggaaagcgaguuccggguguacagcagcgccaacaacugcaccuucgaguacgugucccagccuuuccugauggaccuggaaggcaagcagggcaacuucaagaaccugcgcgaguucguguuuaagaacaucgacggcuacuucaagaucuacagcaagcacaccccuaucaaccucgugcgggaucugccucagggcuucucugcucuggaaccccugguggaucugcccaucggcaucaacaucacccgguuucagacacugcuggcccugcacagaagcuaccugacaccuggcgauagcagcagcggauggacagcuggugccgccgcuuacuaugugggcuaccugcagccuagaaccuuccugcugaaguacaacgagaacggcaccaucaccgacgccguggauugugcucuggauccucugagcgagacaaagugcacccugaaguccuucaccguggaaaagggcaucuaccagaccagcaacuuccgggugcagcccaccgaauccaucgugcgguuccccaauaucaccaaucugugccccuucggcgagguguucaaugccaccagauucgccucuguguacgccuggaaccggaagcggaucagcaauugcguggccgacuacuccgugcuguacaacuccgccagcuucagcaccuucaagugcuacggcguguccccuaccaagcugaacgaccugugcuucacaaacguguacgccgacagcuucgugauccggggagaugaagugcggcagauugccccuggacagacaggcaagaucgccgacuacaacuacaagcugcccgacgacuucaccggcugugugauugccuggaacagcaacaaccuggacuccaaagucggcggcaacuacaauuaccuguaccggcuguuccggaaguccaaucugaagcccuucgagcgggacaucuccaccgagaucuaucaggccggcagcaccccuuguaacggcgugaagggcuucaacugcuacuucccacugcaguccuacggcuuucagcccacaaauggcgugggcuaucagcccuacagagugguggugcugagcuucgaacugcugcaugccccugccacagugugcggcccuaagaaaagcaccaaucucgugaagaacaaaugcgugaacuucaacuucaacggccugaccggcaccggcgugcugacagagagcaacaagaaguuccugccauuccagcaguuuggccgggauaucgccgauaccacagacgccguuagagauccccagacacuggaaauccuggacaucaccccuugcagcuucggcggagugucugugaucaccccuggcaccaacaccagcaaucagguggcagugcuguaccagggcgugaacuguaccgaagugcccguggccauucacgccgaucagcugacaccuacauggcggguguacuccaccggcagcaauguguuucagaccagagccggcugucugaucggagccgagcacgugaacaauagcuacgagugcgacauccccaucggcgcuggaaucugcgccagcuaccagacacagacaaacagcccucggagagccagaagcguggccagccagagcaucauugccuacacaaugucucugggcgccgagaacagcguggccuacuccaacaacucuaucgcuauccccaccaacuucaccaucagcgugaccacagagauccugccuguguccaugaccaagaccagcguggacugcaccauguacaucugcggcgauuccaccgagugcuccaaccugcugcugcaguacggcagcuucugcacccagcugaauagagcccugacagggaucgccguggaacaggacaagaacacccaagagguguucgcccaagugaagcagaucuacaagaccccuccuaucaaggacuucggcggcuucaauuucagccagauucugcccgauccuagcaagcccagcaagcggagcuucaucgaggaccugcuguucaacaaagugacacuggccgacgccggcuucaucaagcaguauggcgauugucugggcgacauugccgccagggaucugauuugcgcccagaaguuuaacggacugacagugcugccuccucugcugaccgaugagaugaucgcccaguacacaucugcccugcuggccggcacaaucacaagcggcuggacauuuggagcaggcgccgcucugcagauccccuuugcuaugcagauggccuaccgguucaacggcaucggagugacccagaaugugcuguacgagaaccagaagcugaucgccaaccaguucaacagcgccaucggcaagauccaggacagccugagcagcacagcaagcgcccugggaaagcugcaggacguggucaaccagaaugcccaggcacugaacacccuggucaagcagcuguccuccaacuucggcgccaucagcucugugcugaacgauauccugagcagacuggacaaggucgaggccgaggugcagaucgacagacugaucacaggcagacugcagagccuccagacauacgugacccagcagcugaucagagccgccgagauuagagccucugccaaucuggccgccaccaagaugucugagugugugcugggccagagcaagagaguggacuuuugcggcaagggcuaccaccugaugagcuucccucagucugccccucacggcgugguguuucugcacgugacauaugugcccgcucaagagaagaauuucaccaccgcuccagccaucugccacgacggcaaagcccacuuuccuagagaaggcguguucguguccaacggcacccauugguucgugacacagcggaacuucuacgagccccagaucaucaccaccgacaacaccuucgugucuggcaacugcgacgucgugaucggcauugugaacaauaccguguacgacccucugcagcccgagcuggacagcuucaaagaggaacuggacaaguacuuuaagaaccacacaagccccgacguggaccugggcgauaucagcggaaucaaugccagcgucgugaacauccagaaagagaucgaccggcugaacgagguggccaagaaucugaacgagagccugaucgaccugcaagaacuggggaaguacgagcaguacaucaaguggcccugguacaucuggcugggcuuuaucgccggacugauugccaucgugauggucacaaucaugcuguguugcaugaccagcugcuguagcugccugaagggcuguuguagcuguggcagcugcugcaaguucgacgaggacgauucugagcccgugcugaagggcgugaaacugcacuacacaugaggacuagucccuguucccagagcccacuuuuuuuucuuuuuuugaaauaaaauagccugucuuucagaucucaaaggcucuuuucagagccaccaaaaaaaaaaaaaaaaaaaaaaaaaaaaaaaaaaaaaaaaaaaaaaaaaaaaaaaaaaaaaaaaaaaaaaaaaaaaaaaaaaaaaaaaaaaaaaaaaaaaa

SEQ ID NO: 23515 - RNA, 4094 nt, Artificial Sequence
  SARS-CoV-2/Wuhan/WIV05/2019__EPI_ISL_402128 spike protein mRNA gc mod (1-1273)(L18F_T20N_P26S_D138Y_R190S_K417T_E484K_N501Y_D614G_H655Y _T1027I)
aggagagucccgcagucggcguccagcggcucugcuuguucgugugugugucguugcaggccuuauucaagcuuaccauguucguguuccuggugcugcugccucugguguccagccagugugugaacuucaccaacagaacacagcugccuagcgccuacaccaacagcuuuaccagaggcguguacuaccccgacaagguguucagauccagcgugcugcacucuacccaggaccuguuccugccuuucuucagcaacgugaccugguuccacgccauccacguguccggcaccaauggcaccaagagauucgacaaccccgugcugcccuucaacgacgggguguacuuugccagcaccgagaaguccaacaucaucagaggcuggaucuucggcaccacacuggacagcaagacccagagccugcugaucgugaacaacgccaccaacguggucaucaaagugugcgaguuccaguucugcaacuaccccuuccugggcgucuacuaccacaagaacaacaagagcuggauggaaagcgaguuccggguguacagcagcgccaacaacugcaccuucgaguacgugucccagccuuuccugauggaccuggaaggcaagcagggcaacuucaagaaccugagcgaguucguguuuaagaacaucgacggcuacuucaagaucuacagcaagcacaccccuaucaaccucgugcgggaucugccucagggcuucucugcucuggaaccccugguggaucugcccaucggcaucaacaucacccgguuucagacacugcuggcccugcacagaagcuaccugacaccuggcgauagcagcagcggauggacagcuggugccgccgcuuacuaugugggcuaccugcagccuagaaccuuccugcugaaguacaacgagaacggcaccaucaccgacgccguggauugugcucuggauccucugagcgagacaaagugcacccugaaguccuucaccguggaaaagggcaucuaccagaccagcaacuuccgggugcagcccaccgaauccaucgugcgguuccccaauaucaccaaucugugccccuucggcgagguguucaaugccaccagauucgccucuguguacgccuggaaccggaagcggaucagcaauugcguggccgacuacuccgugcuguacaacuccgccagcuucagcaccuucaagugcuacggcguguccccuaccaagcugaacgaccugugcuucacaaacguguacgccgacagcuucgugauccggggagaugaagugcggcagauugccccuggacagacaggcaccaucgccgacuacaacuacaagcugcccgacgacuucaccggcugugugauugccuggaacagcaacaaccuggacuccaaagucggcggcaacuacaauuaccuguaccggcuguuccggaaguccaaucugaagcccuucgagcgggacaucuccaccgagaucuaucaggccggcagcaccccuuguaacggcgugaagggcuucaacugcuacuucccacugcaguccuacggcuuucagcccacauacggcgugggcuaucagcccuacagagugguggugcugagcuucgaacugcugcaugccccugccacagugugcggcccuaagaaaagcaccaaucucgugaagaacaaaugcgugaacuucaacuucaacggccugaccggcaccggcgugcugacagagagcaacaagaaguuccugccauuccagcaguuuggccgggauaucgccgauaccacagacgccguuagagauccccagacacuggaaauccuggacaucaccccuugcagcuucggcggagugucugugaucaccccuggcaccaacaccagcaaucagguggcagugcuguaccagggcgugaacuguaccgaagugcccguggccauucacgccgaucagcugacaccuacauggcggguguacuccaccggcagcaauguguuucagaccagagccggcugucugaucggagccgaguacgugaacaauagcuacgagugcgacauccccaucggcgcuggaaucugcgccagcuaccagacacagacaaacagcccucggagagccagaagcguggccagccagagcaucauugccuacacaaugucucugggcgccgagaacagcguggccuacuccaacaacucuaucgcuauccccaccaacuucaccaucagcgugaccacagagauccugccuguguccaugaccaagaccagcguggacugcaccauguacaucugcggcgauuccaccgagugcuccaaccugcugcugcaguacggcagcuucugcacccagcugaauagagcccugacagggaucgccguggaacaggacaagaacacccaagagguguucgcccaagugaagcagaucuacaagaccccuccuaucaaggacuucggcggcuucaauuucagccagauucugcccgauccuagcaagcccagcaagcggagcuucaucgaggaccugcuguucaacaaagugacacuggccgacgccggcuucaucaagcaguauggcgauugucugggcgacauugccgccagggaucugauuugcgcccagaaguuuaacggacugacagugcugccuccucugcugaccgaugagaugaucgcccaguacacaucugcccugcuggccggcacaaucacaagcggcuggacauuuggagcaggcgccgcucugcagauccccuuugcuaugcagauggccuaccgguucaacggcaucggagugacccagaaugugcuguacgagaaccagaagcugaucgccaaccaguucaacagcgccaucggcaagauccaggacagccugagcagcacagcaagcgcccugggaaagcugcaggacguggucaaccagaaugcccaggcacugaacacccuggucaagcagcuguccuccaacuucggcgccaucagcucugugcugaacgauauccugagcagacuggacaaggucgaggccgaggugcagaucgacagacugaucacaggcagacugcagagccuccagacauacgugacccagcagcugaucagagccgccgagauuagagccucugccaaucuggccgccaucaagaugucugagugugugcugggccagagcaagagaguggacuuuugcggcaagggcuaccaccugaugagcuucccucagucugccccucacggcgugguguuucugcacgugacauaugugcccgcucaagagaagaauuucaccaccgcuccagccaucugccacgacggcaaagcccacuuuccuagagaaggcguguucguguccaacggcacccauugguucgugacacagcggaacuucuacgagccccagaucaucaccaccgacaacaccuucgugucuggcaacugcgacgucgugaucggcauugugaacaauaccguguacgacccucugcagcccgagcuggacagcuucaaagaggaacuggacaaguacuuuaagaaccacacaagccccgacguggaccugggcgauaucagcggaaucaaugccagcgucgugaacauccagaaagagaucgaccggcugaacgagguggccaagaaucugaacgagagccugaucgaccugcaagaacuggggaaguacgagcaguacaucaaguggcccugguacaucuggcugggcuuuaucgccggacugauugccaucgugauggucacaaucaugcuguguugcaugaccagcugcuguagcugccugaagggcuguuguagcuguggcagcugcugcaaguucgacgaggacgauucugagcccgugcugaagggcgugaaacugcacuacacaugaggacuagucccuguucccagagcccacuuuuuuuucuuuuuuugaaauaaaauagccugucuuucagaucucaaaggcucuuuucagagccaccaaaaaaaaaaaaaaaaaaaaaaaaaaaaaaaaaaaaaaaaaaaaaaaaaaaaaaaaaaaaaaaaaaaaaaaaaaaaaaaaaaaaaaaaaaaaaaaaaaaaa

SEQ ID NO: 23516 - RNA, 4094 nt, Artificial Sequence
  SARS-CoV-2/Wuhan/WIV05/2019__EPI_ISL_402128 spike protein mRNA gc mod (1-1273)(S13I_W152C_L452R_D614G)
aggagagucccgcagucggcguccagcggcucugcuuguucgugugugugucguugcaggccuuauucaagcuuaccauguucguguuccuggugcugcugccucugguguccauccagugugugaaccugaccaccagaacacagcugccuccagccuacaccaacagcuuuaccagaggcguguacuaccccgacaagguguucagauccagcgugcugcacucuacccaggaccuguuccugccuuucuucagcaacgugaccugguuccacgccauccacguguccggcaccaauggcaccaagagauucgacaaccccgugcugcccuucaacgacgggguguacuuugccagcaccgagaaguccaacaucaucagaggcuggaucuucggcaccacacuggacagcaagacccagagccugcugaucgugaacaacgccaccaacguggucaucaaagugugcgaguuccaguucugcaacgaccccuuccugggcgucuacuaccacaagaacaacaagagcugcauggaaagcgaguuccggguguacagcagcgccaacaacugcaccuucgaguacgugucccagccuuuccugauggaccuggaaggcaagcagggcaacuucaagaaccugcgcgaguucguguuuaagaacaucgacggcuacuucaagaucuacagcaagcacaccccuaucaaccucgugcgggaucugccucagggcuucucugcucuggaaccccugguggaucugcccaucggcaucaacaucacccgguuucagacacugcuggcccugcacagaagcuaccugacaccuggcgauagcagcagcggauggacagcuggugccgccgcuuacuaugugggcuaccugcagccuagaaccuuccugcugaaguacaacgagaacggcaccaucaccgacgccguggauugugcucuggauccucugagcgagacaaagugcacccugaaguccuucaccguggaaaagggcaucuaccagaccagcaacuuccgggugcagcccaccgaauccaucgugcgguuccccaauaucaccaaucugugccccuucggcgagguguucaaugccaccagauucgccucuguguacgccuggaaccggaagcggaucagcaauugcguggccgacuacuccgugcuguacaacuccgccagcuucagcaccuucaagugcuacggcguguccccuaccaagcugaacgaccugugcuucacaaacguguacgccgacagcuucgugauccggggagaugaagugcggcagauugccccuggacagacaggcaagaucgccgacuacaacuacaagcugcccgacgacuucaccggcugugugauugccuggaacagcaacaaccuggacuccaaagucggcggcaacuacaauuaccgcuaccggcuguuccggaaguccaaucugaagcccuucgagcgggacaucuccaccgagaucuaucaggccggcagcaccccuuguaacggcguggaaggcuucaacugcuacuucccacugcaguccuacggcuuucagcccacaaauggcgugggcuaucagcccuacagagugguggugcugagcuucgaacugcugcaugccccugccacagugugcggcccuaagaaaagcaccaaucucgugaagaacaaaugcgugaacuucaacuucaacggccugaccggcaccggcgugcugacagagagcaacaagaaguuccugccauuccagcaguuuggccgggauaucgccgauaccacagacgccguuagagauccccagacacuggaaauccuggacaucaccccuugcagcuucggcggagugucugugaucaccccuggcaccaacaccagcaaucagguggcagugcuguaccagggcgugaacuguaccgaagugcccguggccauucacgccgaucagcugacaccuacauggcggguguacuccaccggcagcaauguguuucagaccagagccggcugucugaucggagccgagcacgugaacaauagcuacgagugcgacauccccaucggcgcuggaaucugcgccagcuaccagacacagacaaacagcccucggagagccagaagcguggccagccagagcaucauugccuacacaaugucucugggcgccgagaacagcguggccuacuccaacaacucuaucgcuauccccaccaacuucaccaucagcgugaccacagagauccugccuguguccaugaccaagaccagcguggacugcaccauguacaucugcggcgauuccaccgagugcuccaaccugcugcugcaguacggcagcuucugcacccagcugaauagagcccugacagggaucgccguggaacaggacaagaacacccaagagguguucgcccaagugaagcagaucuacaagaccccuccuaucaaggacuucggcggcuucaauuucagccagauucugcccgauccuagcaagcccagcaagcggagcuucaucgaggaccugcuguucaacaaagugacacuggccgacgccggcuucaucaagcaguauggcgauugucugggcgacauugccgccagggaucugauuugcgcccagaaguuuaacggacugacagugcugccuccucugcugaccgaugagaugaucgcccaguacacaucugcccugcuggccggcacaaucacaagcggcuggacauuuggagcaggcgccgcucugcagauccccuuugcuaugcagauggccuaccgguucaacggcaucggagugacccagaaugugcuguacgagaaccagaagcugaucgccaaccaguucaacagcgccaucggcaagauccaggacagccugagcagcacagcaagcgcccugggaaagcugcaggacguggucaaccagaaugcccaggcacugaacacccuggucaagcagcuguccuccaacuucggcgccaucagcucugugcugaacgauauccugagcagacuggacaaggucgaggccgaggugcagaucgacagacugaucacaggcagacugcagagccuccagacauacgugacccagcagcugaucagagccgccgagauuagagccucugccaaucuggccgccaccaagaugucugagugugugcugggccagagcaagagaguggacuuuugcggcaagggcuaccaccugaugagcuucccucagucugccccucacggcgugguguuucugcacgugacauaugugcccgcucaagagaagaauuucaccaccgcuccagccaucugccacgacggcaaagcccacuuuccuagagaaggcguguucguguccaacggcacccauugguucgugacacagcggaacuucuacgagccccagaucaucaccaccgacaacaccuucgugucuggcaacugcgacgucgugaucggcauugugaacaauaccguguacgacccucugcagcccgagcuggacagcuucaaagaggaacuggacaaguacuuuaagaaccacacaagccccgacguggaccugggcgauaucagcggaaucaaugccagcgucgugaacauccagaaagagaucgaccggcugaacgagguggccaagaaucugaacgagagccugaucgaccugcaagaacuggggaaguacgagcaguacaucaaguggcccugguacaucuggcugggcuuuaucgccggacugauugccaucgugauggucacaaucaugcuguguugcaugaccagcugcuguagcugccugaagggcuguuguagcuguggcagcugcugcaaguucgacgaggacgauucugagcccgugcugaagggcgugaaacugcacuacacaugaggacuagucccuguucccagagcccacuuuuuuuucuuuuuuugaaauaaaauagccugucuuucagaucucaaaggcucuuuucagagccaccaaaaaaaaaaaaaaaaaaaaaaaaaaaaaaaaaaaaaaaaaaaaaaaaaaaaaaaaaaaaaaaaaaaaaaaaaaaaaaaaaaaaaaaaaaaaaaaaaaaaa

SEQ ID NO: 23517 - RNA, 4094 nt, Artificial Sequence; identical to SEQ ID NO: 149
  SARS-CoV-2/Wuhan/WIV05/2019__EPI_ISL_402128 spike protein mRNA gc (1-1273)(K986P_V987P) R9487, R9491, R9709, R10159, R10160

SEQ ID NO: 23518 - RNA, 4094 nt, Artificial Sequence; identical to SEQ ID NO: 22792
  SARS-CoV-2/Wuhan/WIV05/2019__EPI_ISL_402128 spike protein mRNA gc (1-1273)(K986P_V987P_ D614G) R10166

SEQ ID NO: 23519 - RNA, 4094 nt, Artificial Sequence; identical to SEQ ID NO: 22794
  SARS-CoV-2/Wuhan/WIV05/2019__EPI_ISL_402128 spike protein mRNA gc (1-1273)(K986P_V987P_A222V_D614G) R10279

SEQ ID NO: 23520 - RNA, 4094 nt, Artificial Sequence; identical to SEQ ID NO: 22796
  SARS-CoV-2/Wuhan/WIV05/2019__EPI_ISL_402128 spike protein mRNA gc (1-1273)(K986P_V987P_N439K_D614G) R10299

SEQ ID NO: 23521 - RNA, 4094 nt, Artificial Sequence; identical to SEQ ID NO: 22798
  SARS-CoV-2/Wuhan/WIV05/2019__EPI_ISL_402128 spike protein mRNA gc (1-1273)(K986P_V987P_S477N_D614G) R10286

SEQ ID NO: 23522 - RNA, 4094 nt, Artificial Sequence; identical to SEQ ID NO: 22800
  SARS-CoV-2/Wuhan/WIV05/2019__EPI_ISL_402128 spike protein mRNA gc (1-1273)(K986P_V987P_N501Y_D614G)

SEQ ID NO: 23523 - RNA, 4088 nt, Artificial Sequence; identical to SEQ ID NO: 22802
  SARS-CoV-2/Wuhan/WIV05/2019__EPI_ISL_402128 spike protein mRNA gc (1-1273)(K986P_V987P_H69del_V70del_D614G) R10275

SEQ ID NO: 23524 - RNA, 4094 nt, Artificial Sequence; identical to SEQ ID NO: 22804
  SARS-CoV-2/Wuhan/WIV05/2019__EPI_ISL_402128 spike protein mRNA gc (1-1273)(K986P_V987P_Y453F_D614G) R10283

SEQ ID NO: 23525 - RNA, 4094 nt, Artificial Sequence; identical to SEQ ID NO: 22806
  SARS-CoV-2/Wuhan/WIV05/2019__EPI_ISL_402128 spike protein mRNA gc (1-1273)(K986P_V987P_D614G_I692V) R10291

SEQ ID NO: 23526 - RNA, 4094 nt, Artificial Sequence; identical to SEQ ID NO: 22808
  SARS-CoV-2/Wuhan/WIV05/2019__EPI_ISL_402128 spike protein mRNA gc (1-1273)(K986P_V987P_D614G_M1229I)

SEQ ID NO: 23527 - RNA, 4088 nt, Artificial Sequence; identical to SEQ ID NO: 22810
  SARS-CoV-2/Wuhan/WIV05/2019__EPI_ISL_402128 spike protein mRNA gc (1-1273)(K986P_V987P_H69del_V70del_A222V_Y453F_S477N_D614G_I692V) R10295

SEQ ID NO: 23528 - RNA, 4088 nt, Artificial Sequence; identical to SEQ ID NO: 22812
  SARS-CoV-2/Wuhan/WIV05/2019__EPI_ISL_402128 spike protein mRNA gc (1-1273)(K986P_V987P_H69del_V70del_Y453F_D614G_I692V_M1229I)

SEQ ID NO: 23529 - RNA, 4085 nt, Artificial Sequence
  SARS-CoV-2/Wuhan/WIV05/2019__EPI_ISL_402128 spike protein mRNA gc (1-1273)(K986P_V987P_K986P_V987P_H69del_V70del_Y144del_N501Y_A570 D_D614G_P681H_T716I_S982A_D1118H) R10357
aggagagucccgcagucggcguccagcggcucugcuuguucgugugugugucguugcaggccuuauucaagcuuaccauguucguguuccugguccuccugccccuggugagcucccagugcgugaaccucaccacccgcacgcagcugccgcccgccuacaccaacagcuucacccggggcgucuacuaccccgacaagguguuccgcuccagcgugcugcacuccacccaggaccucuuccugcccuucuucagcaacgucacgugguuccacgccaucuccgggaccaacggcaccaagcgguucgacaacccggugcugcccuucaacgacggggucuacuucgcgagcaccgagaaguccaacaucauccgcggcuggaucuucgggacgacccucgacagcaagacccagucccugcugaucgugaacaacgccaccaacguggucaucaaggugugcgaguuccaguucugcaacgaccccuuccucggcguguaccacaagaacaacaagagcuggauggaguccgaguuccgggucuacagcuccgccaacaacugcacguucgaguacgugagccagcccuuccugauggaccuggagggcaagcaggggaacuucaagaaccuccgcgaguucguguucaagaacaucgacggcuacuucaagaucuacuccaagcacaccccgaucaaccugguccgggaccugccccagggguucagcgcccucgagccccugguggaccugcccaucggcaucaacaucacccgcuuccagacccuccuggcccugcaccgguccuaccucacgccgggggacagcagcuccggcuggaccgcgggcgccgccgccuacuacgugggguaccugcagccccgcaccuuccugcucaaguacaacgagaacggcaccaucacggacgcggucgacugcgcccuggacccccugagcgagaccaagugcacccucaaguccuucaccguggagaaggggaucuaccagacgagcaacuuccgggugcagcccaccgaguccaucguccgcuucccgaacaucaccaaccugugccccuucggcgagguguucaacgccacccgguucgccagcgucuacgccuggaaccgcaagcggaucuccaacugcguggcggacuacagcgugcuguacaacuccgccagcuucuccacguucaagugcuacggcgucagccccaccaagcucaacgaccugugcuucaccaacguguacgccgacuccuucgugauccgcggggacgagguccggcagaucgcccccggccagaccgggaagaucgccgacuacaacuacaagcugccggacgacuucacgggcugcgugaucgcguggaacagcaacaaccucgacuccaaggucgggggcaacuacaacuaccuguaccgccuguuccgcaagagcaaccucaagcccuucgagcgggacaucuccaccgagaucuaccaggccggcagcacccccugcaacgggguggagggcuucaacugcuacuucccccugcaguccuacggguuccagccgaccuacggcgugggguaccagcccuaccggguggucgugcugagcuucgagcuccugcacgcccccgccacggugugcggccccaagaaguccaccaaccuggucaagaacaagugcgugaacuucaacuucaacggccucaccgggaccggcgugcugaccgagagcaacaagaaguuccugccguuccagcaguucgggcgcgacaucgacgacacgaccgacgcgguccgcgacccccagacccuggagauccucgacaucacccccugcagcuucggcgggguguccgugaucacgccgggcaccaacaccagcaaccaggucgccgugcuguaccagggcgugaacugcaccgagguccccguggccauccacgccgaccagcugacgcccaccuggcggguguacuccaccggcagcaacgucuuccagacccgcgccgggugccucaucggcgcggagcacgugaacaacuccuacgagugcgacauccccaucggggccggcaucugcgccagcuaccagacgcagaccaacucccaccggcgcgcccggagcguggcgucccagagcaucaucgccuacaccaugucccugggcgccgagaacagcgucgccuacuccaacaacagcaucgccauccccaucaacuucacgaucuccgugaccaccgagauccugcccgugagcaugaccaagacgagcgucgacugcaccauguacaucugcggggacuccaccgagugcagcaaccuccugcugcaguacggcuccuucugcacccagcucaaccgcgcgcugacggggaucgccguggagcaggacaagaacacccaggagguguucgcccaggucaagcagaucuacaagacgcccccgaucaaggacuucggcggguucaacuucagccagauccugcccgaccccuccaagcccagcaagcgguccuucaucgaggaccuccuguucaacaaggugacccuggccgacgccggcuucaucaagcaguacggcgacugccucggggacaucgcggcccgcgaccugaucugcgcccagaaguucaacggccugaccgugcucccgccccugcugaccgacgagaugaucgcccaguacaccagcgcccuccuggcggggaccaucacguccggcuggaccuucggggccggcgccgcccugcagauccccuucgcgaugcagauggccuaccgguucaacggcaucggggucacccagaacgugcucuacgagaaccagaagcugaucgccaaccaguucaacagcgccaucggcaagauccaggacucccugagcuccaccgccagcgcgcucgggaagcugcaggacguggucaaccagaacgcccaggcccugaacacgcucgugaagcagcuguccagcaacuucggcgccaucuccagcgugcugaacgacauccucgcccgccuggacccgcccgaggccgaggugcagaucgaccggcugaucaccgggcgccuccagagccugcagaccuacgugacccagcagcugauccgggcggccgagauccgcgccagcgccaaccucgccgcgaccaagauguccgagugcguccugggccagagcaagcggguggacuucugcggcaagggguaccaccugauguccuucccccagagcgccccgcacggcguggucuuccuccacgugacguacguccccgcccaggagaagaacuucaccaccgcccccgcgaucugccacgacgggaaggcccacuucccccgcgagggcguguucguguccaacgggacccacugguucgucacgcagcggaacuucuacgagccgcagaucaucaccacccacaacaccuucgugagcggcaacugcgacguggucaucggcaucgugaacaacacgguguacgacccccugcagcccgagcuggacuccuucaaggaggagcucgacaaguacuucaagaaccacaccagccccgacgucgaccugggggacaucuccggcaucaacgccagcguggugaacauccagaaggagaucgaccgccugaacgaggucgccaagaaccucaacgagucccugaucgaccugcaggagcucgggaaguacgagcaguacaucaaguggccgugguacaucuggcugggcuucaucgccggccugaucgcgaucgugauggugaccaucaugcucugcugcaugaccagcugcugcuccugccugaaggggugcugcagcugcggcuccugcugcaaguucgacgaggacgacagcgagcccguccugaagggggugaagcuccacuacacgugaggacuagucccuguucccagagcccacuuuuuuuucuuuuuuugaaauaaaauagccugucuuucagaucucaaaggcucuuuucagagccaccaaaaaaaaaaaaaaaaaaaaaaaaaaaaaaaaaaaaaaaaaaaaaaaaaaaaaaaaaaaaaaaaaaaaaaaaaaaaaaaaaaaaaaaaaaaaaaaaaaaaa

SEQ ID NO: 23530 - RNA, 4094 nt, Artificial Sequence
  SARS-CoV-2/Wuhan/WIV05/2019__EPI_ISL_402128 spike protein mRNA gc (1-1273)(K986P_V987P_K986P_V987P_K417N_E484K_N501Y_D614G) R10361
aggagagucccgcagucggcguccagcggcucugcuuguucgugugugugucguugcaggccuuauucaagcuuaccauguucguguuccugguccuccugccccuggugagcucccagugcgugaaccucaccacccgcacgcagcugccgcccgccuacaccaacagcuucacccggggcgucuacuaccccgacaagguguuccgcuccagcgugcugcacuccacccaggaccucuuccugcccuucuucagcaacgucacgugguuccacgccauccacguguccgggaccaacggcaccaagcgguucgacaacccggugcugcccuucaacgacggggucuacuucgcgagcaccgagaaguccaacaucauccgcggcuggaucuucgggacgacccucgacagcaagacccagucccugcugaucgugaacaacgccaccaacguggucaucaaggugugcgaguuccaguucugcaacgaccccuuccucggcguguacuaccacaagaacaacaagagcuggauggaguccgaguuccgggucuacagcuccgccaacaacugcacguucgaguacgugagccagcccuuccugauggaccuggagggcaagcaggggaacuucaagaaccuccgcgaguucguguucaagaacaucgacggcuacuucaagaucuacuccaagcacaccccgaucaaccugguccgggaccugccccagggguucagcgcccucgagccccugguggaccugcccaucggcaucaacaucacccgcuuccagacccuccuggcccugcaccgguccuaccucacgccgggggacagcagcuccggcuggaccgcgggcgccgccgccuacuacgugggguaccugcagccccgcaccuuccugcucaaguacaacgagaacggcaccaucacggacgcggucgacugcgcccuggacccccugagcgagaccaagugcacccucaaguccuucaccguggagaaggggaucuaccagacgagcaacuuccgggugcagcccaccgaguccaucguccgcuucccgaacaucaccaaccugugccccuucggcgagguguucaacgccacccgguucgccagcgucuacgccuggaaccgcaagcggaucuccaacugcguggcggacuacagcgugcuguacaacuccgccagcuucuccacguucaagugcuacggcgucagccccaccaagcucaacgaccugugcuucaccaacguguacgccgacuccuucgugauccgcggggacgagguccggcagaucgcccccggccagaccgggaacaucgccgacuacaacuacaagcugccggacgacuucacgggcugcgugaucgcguggaacagcaacaaccucgacuccaaggucgggggcaacuacaacuaccuguaccgccuguuccgcaagagcaaccucaagcccuucgagcgggacaucuccaccgagaucuaccaggccggcagcacccccugcaacggggugaagggcuucaacugcuacuucccccugcaguccuacggguuccagccgaccuacggcgugggguaccagcccuaccggguggucgugcugagcuucgagcuccugcacgcccccgccacggugugcggccccaagaaguccaccaaccuggucaagaacaagugcgugaacuucaacuucaacggccucaccgggaccggcgugcugaccgagagcaacaagaaguuccugccguuccagcaguucgggcgcgacaucgccgacacgaccgacgcgguccgcgacccccagacccuggagauccucgacaucacccccugcagcuucggcgggguguccgugaucacgccgggcaccaacaccagcaaccaggucgccgugcuguaccagggcgugaacugcaccgagguccccguggccauccacgccgaccagcugacgcccaccuggcggguguacuccaccggcagcaacgucuuccagacccgcgccgggugccucaucggcgcggagcacgugaacaacuccuacgagugcgacauccccaucggggccggcaucugcgccagcuaccagacgcagaccaacuccccgcggcgcgcccggagcguggcgucccagagcaucaucgccuacaccaugucccugggcgccgagaacagcgucgccuacuccaacaacagcaucgccauccccaccaacuucacgaucuccgugaccaccgagauccugcccgugagcaugaccaagacgagcgucgacugcaccauguacaucugcggggacuccaccgagugcagcaaccuccugcugcaguacggcuccuucugcacccagcucaaccgcgcgcugacggggaucgccguggagcaggacaagaacacccaggagguguucgcccaggucaagcagaucuacaagacgcccccgaucaaggacuucggcggguucaacuucagccagauccugcccgaccccuccaagcccagcaagcgguccuucaucgaggaccuccuguucaacaaggugacccuggccgacgccggcuucaucaagcaguacggcgacugccucggggacaucgcggcccgcgaccugaucugcgcccagaaguucaacggccugaccgugcucccgccccugcugaccgacgagaugaucgcccaguacaccagcgcccuccuggcggggaccaucacguccggcuggaccuucggggccggcgccgcccugcagauccccuucgcgaugcagauggccuaccgguucaacggcaucggggucacccagaacgugcucuacgagaaccagaagcugaucgccaaccaguucaacagcgccaucggcaagauccaggacucccugagcuccaccgccagcgcgcucgggaagcugcaggacguggucaaccagaacgcccaggcccugaacacgcucgugaagcagcuguccagcaacuucggcgccaucuccagcgugcugaacgacauccucucccgccuggacccgcccgaggccgaggugcagaucgaccggcugaucaccgggcgccuccagagccugcagaccuacgugacccagcagcugauccgggcggccgagauccgcgccagcgccaaccucgccgcgaccaagauguccgagugcguccugggccagagcaagcggguggacuucugcggcaagggguaccaccugauguccuucccccagagcgccccgcacggcguggucuuccuccacgugacguacguccccgcccaggagaagaacuucaccaccgcccccgcgaucugccacgacgggaaggcccacuucccccgcgagggcguguucguguccaacgggacccacugguucgucacgcagcggaacuucuacgagccgcagaucaucaccaccgacaacaccuucgugagcggcaacugcgacguggucaucggcaucgugaacaacacgguguacgacccccugcagcccgagcuggacuccuucaaggaggagcucgacaaguacuucaagaaccacaccagccccgacgucgaccugggggacaucuccggcaucaacgccagcguggugaacauccagaaggagaucgaccgccugaacgaggucgccaagaaccucaacgagucccugaucgaccugcaggagcucgggaaguacgagcaguacaucaaguggccgugguacaucuggcugggcuucaucgccggccugaucgcgaucgugauggugaccaucaugcucugcugcaugaccagcugcugcuccugccugaaggggugcugcagcugcggcuccugcugcaaguucgacgaggacgacagcgagcccguccugaagggggugaagcuccacuacacgugaggacuagucccuguucccagagcccacuuuuuuuucuuuuuuugaaauaaaauagccugucuuucagaucucaaaggcucuuuucagagccaccaaaaaaaaaaaaaaaaaaaaaaaaaaaaaaaaaaaaaaaaaaaaaaaaaaaaaaaaaaaaaaaaaaaaaaaaaaaaaaaaaaaaaaaaaaaaaaaaaaaaa

SEQ ID NO: 23531 - RNA, 4085 nt, Artificial Sequence
  SARS-CoV-2/Wuhan/WIV05/2019__EPI_ISL_402128 spike protein mRNA gc (1-1273)(K986P_V987P_K986P_V987P_L18F_D80A_D215G_L242del_A243del_ L244del_R246I_K417N_E484K_N501Y_D614G_A701V) R10384
aggagagucccgcagucggcguccagcggcucugcuuguucgugugugugucguugcaggccuuauucaagcuuaccauguucguguuccugguccuccugccccuggugagcucccagugcgugaacuucaccacccgcacgcagcugccgcccgccuacaccaacagcuucacccggggcgucuacuaccccgacaagguguuccgcuccagcgugcugcacuccacccaggaccucuuccugcccuucuucagcaacgucacgugguuccacgccauccacguguccgggaccaacggcaccaagcgguucgccaacccggugcugcccuucaacgacggggucuacuucgcgagcaccgagaaguccaacaucauccgcggcuggaucuucgggacgacccucgacagcaagacccagucccugcugaucgugaacaacgccaccaacguggucaucaaggugugcgaguuccaguucugcaacgaccccuuccucggcguguacuaccacaagaacaacaagagcuggauggaguccgaguuccgggucuacagcuccgccaacaacugcacguucgaguacgugagccagcccuuccugauggaccuggagggcaagcaggggaacuucaagaaccuccgcgaguucguguucaagaacaucgacggcuacuucaagaucuacuccaagcacaccccgaucaaccugguccggggccugccccagggguucagcgcccucgagccccugguggaccugcccaucggcaucaacaucacccgcuuccagacccuccacaucuccuaccucacgccgggggacagcagcuccggcuggaccgcgggcgccgccgccuacuacgugggguaccugcagccccgcaccuuccugcucaaguacaacgagaacggcaccaucacggacgcggucgacugcgcccuggacccccugagcgagaccaagugcacccucaaguccuucaccguggagaaggggaucuaccagacgagcaacuuccgggugcagcccaccgaguccaucguccgcuucccgaacaucaccaaccugugccccuucggcgagguguucaacgccacccgguucgccagcgucuacgccuggaaccgcaagcggaucuccaacugcguggcggacuacagcgugcuguacaacuccgccagcuucuccacguucaagugcuacggcgucagccccaccaagcucaacgaccugugcuucaccaacguguacgccgacuccuucgugauccgcggggacgagguccggcagaucgcccccggccagaccgggaacaucgccgacuacaacuacaagcugccggacgacuucacgggcugcgugaucgcguggaacagcaacaaccucgacuccaaggucgggggcaacuacaacuaccuguaccgccuguuccgcaagagcaaccucaagcccuucgagcgggacaucuccaccgagaucuaccaggccggcagcacccccugcaacggggugaagggcuucaacugcuacuucccccugcaguccuacggguuccagccgaccuacggcgugggguaccagcccuaccggguggucgugcugagcuucgagcuccugcacgcccccgccacggugugcggccccaagaaguccaccaaccuggucaagaacaagugcgugaacuucaacuucaacggccucaccgggaccggcgugcugaccgagagcaacaagaaguuccugccguuccagcaguucgggcgcgacaucgccgacacgaccgacgcgguccgcgacccccagacccuggagauccucgacaucacccccugcagcuucggcgggguguccgugaucacgccgggcaccaacaccagcaaccaggucgccgugcuguaccagggcgugaacugcaccgagguccccguggccauccacgccgaccagcugacgcccaccuggcggguguacuccaccggcagcaacgucuuccagacccgcgccgggugccucaucggcgcggagcacgugaacaacuccuacgagugcgacauccccaucggggccggcaucugcgccagcuaccagacgcagaccaacuccccgcggcgcgcccggagcguggcgucccagagcaucaucgccuacaccaugucccugggcguggagaacagcgucgccuacuccaacaacagcaucgccauccccaccaacuucacgaucuccgugaccaccgagauccugcccgugagcaugaccaagacgagcgucgacugcaccauguacaucugcggggacuccaccgagugcagcaaccuccugcugcaguacggcuccuucugcacccagcucaaccgcgcgcugacggggaucgccguggagcaggacaagaacacccaggagguguucgcccaggucaagcagaucuacaagacgcccccgaucaaggacuucggcggguucaacuucagccagauccugcccgaccccuccaagcccagcaagcgguccuucaucgaggaccuccuguucaacaaggugacccuggccgacgccggcuucaucaagcaguacggcgacugccucggggacaucgcggcccgcgaccugaucugcgcccagaaguucaacggccugaccgugcucccgccccugcugaccgacgagaugaucgcccaguacaccagcgcccuccuggcggggaccaucacguccggcuggaccuucggggccggcgccgcccugcagauccccuucgcgaugcagauggccuaccgguucaacggcaucggggucacccagaacgugcucuacgagaaccagaagcugaucgccaaccaguucaacagcgccaucggcaagauccaggacucccugagcuccaccgccagcgcgcucgggaagcugcaggacguggucaaccagaacgcccaggcccugaacacgcucgugaagcagcuguccagcaacuucggcgccaucuccagcgugcugaacgacauccucucccgccuggacccgcccgaggccgaggugcagaucgaccggcugaucaccgggcgccuccagagccugcagaccuacgugacccagcagcugauccgggcggccgagauccgcgccagcgccaaccucgccgcgaccaagauguccgagugcguccugggccagagcaagcggguggacuucugcggcaagggguaccaccugauguccuucccccagagcgccccgcacggcguggucuuccuccacgugacguacguccccgcccaggagaagaacuucaccaccgcccccgcgaucugccacgacgggaaggcccacuucccccgcgagggcguguucguguccaacgggacccacugguucgucacgcagcggaacuucuacgagccgcagaucaucaccaccgacaacaccuucgugagcggcaacugcgacguggucaucggcaucgugaacaacacgguguacgacccccugcagcccgagcuggacuccuucaaggaggagcucgacaaguacuucaagaaccacaccagccccgacgucgaccugggggacaucuccggcaucaacgccagcguggugaacauccagaaggagaucgaccgccugaacgaggucgccaagaaccucaacgagucccugaucgaccugcaggagcucgggaaguacgagcaguacaucaaguggccgugguacaucuggcugggcuucaucgccggccugaucgcgaucgugauggugaccaucaugcucugcugcaugaccagcugcugcuccugccugaaggggugcugcagcugcggcuccugcugcaaguucgacgaggacgacagcgagcccguccugaagggggugaagcuccacuacacgugaggacuagucccuguucccagagcccacuuuuuuuucuuuuuuugaaauaaaauagccugucuuucagaucucaaaggcucuuuucagagccaccaaaaaaaaaaaaaaaaaaaaaaaaaaaaaaaaaaaaaaaaaaaaaaaaaaaaaaaaaaaaaaaaaaaaaaaaaaaaaaaaaaaaaaaaaaaaaaaaaaaaa

SEQ ID NO: 23532 - RNA, 4094 nt, Artificial Sequence
  SARS-CoV-2/Wuhan/WIV05/2019__EPI_ISL_402128 spike protein mRNA gc (1-1273)(K986P_V987P_K986P_V987P_E484K_D614G)
aggagagucccgcagucggcguccagcggcucugcuuguucgugugugugucguugcaggccuuauucaagcuuaccauguucguguuccugguccuccugccccuggugagcucccagugcgugaaccucaccacccgcacgcagcugccgcccgccuacaccaacagcuucacccggggcgucuacuaccccgacaagguguuccgcuccagcgugcugcacuccacccaggaccucuuccugcccuucuucagcaacgucacgugguuccacgccauccacguguccgggaccaacggcaccaagcgguucgacaacccggugcugcccuucaacgacggggucuacuucgcgagcaccgagaaguccaacaucauccgcggcuggaucuucgggacgacccucgacagcaagacccagucccugcugaucgugaacaacgccaccaacguggucaucaaggugugcgaguuccaguucugcaacgaccccuuccucggcguguacuaccacaagaacaacaagagcuggauggaguccgaguuccgggucuacagcuccgccaacaacugcacguucgaguacgugagccagcccuuccugauggaccuggagggcaagcaggggaacuucaagaaccuccgcgaguucguguucaagaacaucgacggcuacuucaagaucuacuccaagcacaccccgaucaaccugguccgggaccugccccagggguucagcgcccucgagccccugguggaccugcccaucggcaucaacaucacccgcuuccagacccuccuggcccugcaccgguccuaccucacgccgggggacagcagcuccggcuggaccgcgggcgccgccgccuacuacgugggguaccugcagccccgcaccuuccugcucaaguacaacgagaacggcaccaucacggacgcggucgacugcgcccuggacccccugagcgagaccaagugcacccucaaguccuucaccguggagaaggggaucuaccagacgagcaacuuccgggugcagcccaccgaguccaucguccgcuucccgaacaucaccaaccugugccccuucggcgagguguucaacgccacccgguucgccagcgucuacgccuggaaccgcaagcggaucuccaacugcguggcggacuacagcgugcuguacaacuccgccagcuucuccacguucaagugcuacggcgucagccccaccaagcucaacgaccugugcuucaccaacguguacgccgacuccuucgugauccgcggggacgagguccggcagaucgcccccggccagaccgggaagaucgccgacuacaacuacaagcugccggacgacuucacgggcugcgugaucgcguggaacagcaacaaccucgacuccaaggucgggggcaacuacaacuaccuguaccgccuguuccgcaagagcaaccucaagcccuucgagcgggacaucuccaccgagaucuaccaggccggcagcacccccugcaacggggugaagggcuucaacugcuacuucccccugcaguccuacggguuccagccgaccaacggcgugggguaccagcccuaccggguggucgugcugagcuucgagcuccugcacgcccccgccacggugugcggccccaagaaguccaccaaccuggucaagaacaagugcgugaacuucaacuucaacggccucaccgggaccggcgugcugaccgagagcaacaagaaguuccugccguuccagcaguucgggcgcgacaucgccgacacgaccgacgcgguccgcgacccccagacccuggagauccucgacaucacccccugcagcuucggcgggguguccgugaucacgccgggcaccaacaccagcaaccaggucgccgugcuguaccagggcgugaacugcaccgagguccccguggccauccacgccgaccagcugacgcccaccuggcggguguacuccaccggcagcaacgucuuccagacccgcgccgggugccucaucggcgcggagcacgugaacaacuccuacgagugcgacauccccaucggggccggcaucugcgccagcuaccagacgcagaccaacuccccgcggcgcgcccggagcguggcgucccagagcaucaucgccuacaccaugucccugggcgccgagaacagcgucgccuacuccaacaacagcaucgccauccccaccaacuucacgaucuccgugaccaccgagauccugcccgugagcaugaccaagacgagcgucgacugcaccauguacaucugcggggacuccaccgagugcagcaaccuccugcugcaguacggcuccuucugcacccagcucaaccgcgcgcugacggggaucgccguggagcaggacaagaacacccaggagguguucgcccaggucaagcagaucuacaagacgcccccgaucaaggacuucggcggguucaacuucagccagauccugcccgaccccuccaagcccagcaagcgguccuucaucgaggaccuccuguucaacaaggugacccuggccgacgccggcuucaucaagcaguacggcgacugccucggggacaucgcggcccgcgaccugaucugcgcccagaaguucaacggccugaccgugcucccgccccugcugaccgacgagaugaucgcccaguacaccagcgcccuccuggcggggaccaucacguccggcuggaccuucggggccggcgccgcccugcagauccccuucgcgaugcagauggccuaccgguucaacggcaucggggucacccagaacgugcucuacgagaaccagaagcugaucgccaaccaguucaacagcgccaucggcaagauccaggacucccugagcuccaccgccagcgcgcucgggaagcugcaggacguggucaaccagaacgcccaggcccugaacacgcucgugaagcagcuguccagcaacuucggcgccaucuccagcgugcugaacgacauccucucccgccuggacccgcccgaggccgaggugcagaucgaccggcugaucaccgggcgccuccagagccugcagaccuacgugacccagcagcugauccgggcggccgagauccgcgccagcgccaaccucgccgcgaccaagauguccgagugcguccugggccagagcaagcggguggacuucugcggcaagggguaccaccugauguccuucccccagagcgccccgcacggcguggucuuccuccacgugacguacguccccgcccaggagaagaacuucaccaccgcccccgcgaucugccacgacgggaaggcccacuucccccgcgagggcguguucguguccaacgggacccacugguucgucacgcagcggaacuucuacgagccgcagaucaucaccaccgacaacaccuucgugagcggcaacugcgacguggucaucggcaucgugaacaacacgguguacgacccccugcagcccgagcuggacuccuucaaggaggagcucgacaaguacuucaagaaccacaccagccccgacgucgaccugggggacaucuccggcaucaacgccagcguggugaacauccagaaggagaucgaccgccugaacgaggucgccaagaaccucaacgagucccugaucgaccugcaggagcucgggaaguacgagcaguacaucaaguggccgugguacaucuggcugggcuucaucgccggccugaucgcgaucgugauggugaccaucaugcucugcugcaugaccagcugcugcuccugccugaaggggugcugcagcugcggcuccugcugcaaguucgacgaggacgacagcgagcccguccugaagggggugaagcuccacuacacgugaggacuagucccuguucccagagcccacuuuuuuuucuuuuuuugaaauaaaauagccugucuuucagaucucaaaggcucuuuucagagccaccaaaaaaaaaaaaaaaaaaaaaaaaaaaaaaaaaaaaaaaaaaaaaaaaaaaaaaaaaaaaaaaaaaaaaaaaaaaaaaaaaaaaaaaaaaaaaaaaaaaaa

SEQ ID NO: 23533 - RNA, 4094 nt, Artificial Sequence
  SARS-CoV-2/Wuhan/WIV05/2019__EPI_ISL_402128 spike protein mRNA gc (1-1273)(K986P_V987P_K986P_V987P_L18F_T20N_P26S_D138Y_R190S_K417T _E484K_N501Y_D614G_H655Y_T1027I) R10385
aggagagucccgcagucggcguccagcggcucugcuuguucgugugugugucguugcaggccuuauucaagcuuaccauguucguguuccugguccuccugccccuggugagcucccagugcgugaacuucaccaaccgcacgcagcugccgagcgccuacaccaacagcuucacccggggcgucuacuaccccgacaagguguuccgcuccagcgugcugcacuccacccaggaccucuuccugcccuucuucagcaacgucacgugguuccacgccauccacguguccgggaccaacggcaccaagcgguucgacaacccggugcugcccuucaacgacggggucuacuucgcgagcaccgagaaguccaacaucauccgcggcuggaucuucgggacgacccucgacagcaagacccagucccugcugaucgugaacaacgccaccaacguggucaucaaggugugcgaguuccaguucugcaacuaccccuuccucggcguguacuaccacaagaacaacaagagcuggauggaguccgaguuccgggucuacagcuccgccaacaacugcacguucgaguacgugagccagcccuuccugauggaccuggagggcaagcaggggaacuucaagaaccucagcgaguucguguucaagaacaucgacggcuacuucaagaucuacuccaagcacaccccgaucaaccugguccgggaccugccccagggguucagcgcccucgagccccugguggaccugcccaucggcaucaacaucacccgcuuccagacccuccuggcccugcaccgguccuaccucacgccgggggacagcagcuccggcuggaccgcgggcgccgccgccuacuacgugggguaccugcagccccgcaccuuccugcucaaguacaacgagaacggcaccaucacggacgcggucgacugcgcccuggacccccugagcgagaccaagugcacccucaaguccuucaccguggagaaggggaucuaccagacgagcaacuuccgggugcagcccaccgaguccaucguccgcuucccgaacaucaccaaccugugccccuucggcgagguguucaacgccacccgguucgccagcgucuacgccuggaaccgcaagcggaucuccaacugcguggcggacuacagcgugcuguacaacuccgccagcuucuccacguucaagugcuacggcgucagccccaccaagcucaacgaccugugcuucaccaacguguacgccgacuccuucgugauccgcggggacgagguccggcagaucgcccccggccagaccgggaccaucgccgacuacaacuacaagcugccggacgacuucacgggcugcgugaucgcguggaacagcaacaaccucgacuccaaggucgggggcaacuacaacuaccuguaccgccuguuccgcaagagcaaccucaagcccuucgagcgggacaucuccaccgagaucuaccaggccggcagcacccccugcaacggggugaagggcuucaacugcuacuucccccugcaguccuacggguuccagccgaccuacggcgugggguaccagcccuaccggguggucgugcugagcuucgagcuccugcacgcccccgccacggugugcggccccaagaaguccaccaaccuggucaagaacaagugcgugaacuucaacuucaacggccucaccgggaccggcgugcugaccgagagcaacaagaaguuccugccguuccagcaguucgggcgcgacaucgccgacacgaccgacgcgguccgcgacccccagacccuggagauccucgacaucacccccugcagcuucggcgggguguccgugaucacgccgggcaccaacaccagcaaccaggucgccgugcuguaccagggcgugaacugcaccgagguccccguggccauccacgccgaccagcugacgcccaccuggcggguguacuccaccggcagcaacgucuuccagacccgcgccgggugccucaucggcgcggaguacgugaacaacuccuacgagugcgacauccccaucggggccggcaucugcgccagcuaccagacgcagaccaacuccccgcggcgcgcccggagcguggcgucccagagcaucaucgccuacaccaugucccugggcgccgagaacagcgucgccuacuccaacaacagcaucgccauccccaccaacuucacgaucuccgugaccaccgagauccugcccgugagcaugaccaagacgagcgucgacugcaccauguacaucugcggggacuccaccgagugcagcaaccuccugcugcaguacggcuccuucugcacccagcucaaccgcgcgcugacggggaucgccguggagcaggacaagaacacccaggagguguucgcccaggucaagcagaucuacaagacgcccccgaucaaggacuucggcggguucaacuucagccagauccugcccgaccccuccaagcccagcaagcgguccuucaucgaggaccuccuguucaacaaggugacccuggccgacgccggcuucaucaagcaguacggcgacugccucggggacaucgcggcccgcgaccugaucugcgcccagaaguucaacggccugaccgugcucccgccccugcugaccgacgagaugaucgcccaguacaccagcgcccuccuggcggggaccaucacguccggcuggaccuucggggccggcgccgcccugcagauccccuucgcgaugcagauggccuaccgguucaacggcaucggggucacccagaacgugcucuacgagaaccagaagcugaucgccaaccaguucaacagcgccaucggcaagauccaggacucccugagcuccaccgccagcgcgcucgggaagcugcaggacguggucaaccagaacgcccaggcccugaacacgcucgugaagcagcuguccagcaacuucggcgccaucuccagcgugcugaacgacauccucucccgccuggacccgcccgaggccgaggugcagaucgaccggcugaucaccgggcgccuccagagccugcagaccuacgugacccagcagcugauccgggcggccgagauccgcgccagcgccaaccucgccgcgaucaagauguccgagugcguccugggccagagcaagcggguggacuucugcggcaagggguaccaccugauguccuucccccagagcgccccgcacggcguggucuuccuccacgugacguacguccccgcccaggagaagaacuucaccaccgcccccgcgaucugccacgacgggaaggcccacuucccccgcgagggcguguucguguccaacgggacccacugguucgucacgcagcggaacuucuacgagccgcagaucaucaccaccgacaacaccuucgugagcggcaacugcgacguggucaucggcaucgugaacaacacgguguacgacccccugcagcccgagcuggacuccuucaaggaggagcucgacaaguacuucaagaaccacaccagccccgacgucgaccugggggacaucuccggcaucaacgccagcguggugaacauccagaaggagaucgaccgccugaacgaggucgccaagaaccucaacgagucccugaucgaccugcaggagcucgggaaguacgagcaguacaucaaguggccgugguacaucuggcugggcuucaucgccggccugaucgcgaucgugauggugaccaucaugcucugcugcaugaccagcugcugcuccugccugaaggggugcugcagcugcggcuccugcugcaaguucgacgaggacgacagcgagcccguccugaagggggugaagcuccacuacacgugaggacuagucccuguucccagagcccacuuuuuuuucuuuuuuugaaauaaaauagccugucuuucagaucucaaaggcucuuuucagagccaccaaaaaaaaaaaaaaaaaaaaaaaaaaaaaaaaaaaaaaaaaaaaaaaaaaaaaaaaaaaaaaaaaaaaaaaaaaaaaaaaaaaaaaaaaaaaaaaaaaaaa

SEQ ID NO: 23534 - RNA, 4094 nt, Artificial Sequence
  SARS-CoV-2/Wuhan/WIV05/2019__EPI_ISL_402128 spike protein mRNA gc (1-1273)(K986P_V987P_K986P_V987P_S13I_W152C_L452R_D614G)
aggagagucccgcagucggcguccagcggcucugcuuguucgugugugugucguugcaggccuuauucaagcuuaccauguucguguuccugguccuccugccccuggugagcauccagugcgugaaccucaccacccgcacgcagcugccgcccgccuacaccaacagcuucacccggggcgucuacuaccccgacaagguguuccgcuccagcgugcugcacuccacccaggaccucuuccugcccuucuucagcaacgucacgugguuccacgccauccacguguccgggaccaacggcaccaagcgguucgacaacccggugcugcccuucaacgacggggucuacuucgcgagcaccgagaaguccaacaucauccgcggcuggaucuucgggacgacccucgacagcaagacccagucccugcugaucgugaacaacgccaccaacguggucaucaaggugugcgaguuccaguucugcaacgaccccuuccucggcguguacuaccacaagaacaacaagagcugcauggaguccgaguuccgggucuacagcuccgccaacaacugcacguucgaguacgugagccagcccuuccugauggaccuggagggcaagcaggggaacuucaagaaccuccgcgaguucguguucaagaacaucgacggcuacuucaagaucuacuccaagcacaccccgaucaaccugguccgggaccugccccagggguucagcgcccucgagccccugguggaccugcccaucggcaucaacaucacccgcuuccagacccuccuggcccugcaccgguccuaccucacgccgggggacagcagcuccggcuggaccgcgggcgccgccgccuacuacgugggguaccugcagccccgcaccuuccugcucaaguacaacgagaacggcaccaucacggacgcggucgacugcgcccuggacccccugagcgagaccaagugcacccucaaguccuucaccguggagaaggggaucuaccagacgagcaacuuccgggugcagcccaccgaguccaucguccgcuucccgaacaucaccaaccugugccccuucggcgagguguucaacgccacccgguucgccagcgucuacgccuggaaccgcaagcggaucuccaacugcguggcggacuacagcgugcuguacaacuccgccagcuucuccacguucaagugcuacggcgucagccccaccaagcucaacgaccugugcuucaccaacguguacgccgacuccuucgugauccgcggggacgagguccggcagaucgcccccggccagaccgggaagaucgccgacuacaacuacaagcugccggacgacuucacgggcugcgugaucgcguggaacagcaacaaccucgacuccaaggucgggggcaacuacaacuaccgcuaccgccuguuccgcaagagcaaccucaagcccuucgagcgggacaucuccaccgagaucuaccaggccggcagcacccccugcaacgggguggagggcuucaacugcuacuucccccugcaguccuacggguuccagccgaccaacggcgugggguaccagcccuaccggguggucgugcugagcuucgagcuccugcacgcccccgccacggugugcggccccaagaaguccaccaaccuggucaagaacaagugcgugaacuucaacuucaacggccucaccgggaccggcgugcugaccgagagcaacaagaaguuccugccguuccagcaguucgggcgcgacaucgccgacacgaccgacgcgguccgcgacccccagacccuggagauccucgacaucacccccugcagcuucggcgggguguccgugaucacgccgggcaccaacaccagcaaccaggucgccgugcuguaccagggcgugaacugcaccgagguccccguggccauccacgccgaccagcugacgcccaccuggcggguguacuccaccggcagcaacgucuuccagacccgcgccgggugccucaucggcgcggagcacgugaacaacuccuacgagugcgacauccccaucggggccggcaucugcgccagcuaccagacgcagaccaacuccccgcggcgcgcccggagcguggcgucccagagcaucaucgccuacaccaugucccugggcgccgagaacagcgucgccuacuccaacaacagcaucgccauccccaccaacuucacgaucuccgugaccaccgagauccugcccgugagcaugaccaagacgagcgucgacugcaccauguacaucugcggggacuccaccgagugcagcaaccuccugcugcaguacggcuccuucugcacccagcucaaccgcgcgcugacggggaucgccguggagcaggacaagaacacccaggagguguucgcccaggucaagcagaucuacaagacgcccccgaucaaggacuucggcggguucaacuucagccagauccugcccgaccccuccaagcccagcaagcgguccuucaucgaggaccuccuguucaacaaggugacccuggccgacgccggcuucaucaagcaguacggcgacugccucggggacaucgcggcccgcgaccugaucugcgcccagaaguucaacggccugaccgugcucccgccccugcugaccgacgagaugaucgcccaguacaccagcgcccuccuggcggggaccaucacguccggcuggaccuucggggccggcgccgcccugcagauccccuucgcgaugcagauggccuaccgguucaacggcaucggggucacccagaacgugcucuacgagaaccagaagcugaucgccaaccaguucaacagcgccaucggcaagauccaggacucccugagcuccaccgccagcgcgcucgggaagcugcaggacguggucaaccagaacgcccaggcccugaacacgcucgugaagcagcuguccagcaacuucggcgccaucuccagcgugcugaacgacauccucucccgccuggacccgcccgaggccgaggugcagaucgaccggcugaucaccgggcgccuccagagccugcagaccuacgugacccagcagcugauccgggcggccgagauccgcgccagcgccaaccucgccgcgaccaagauguccgagugcguccugggccagagcaagcggguggacuucugcggcaagggguaccaccugauguccuucccccagagcgccccgcacggcguggucuuccuccacgugacguacguccccgcccaggagaagaacuucaccaccgcccccgcgaucugccacgacgggaaggcccacuucccccgcgagggcguguucguguccaacgggacccacugguucgucacgcagcggaacuucuacgagccgcagaucaucaccaccgacaacaccuucgugagcggcaacugcgacguggucaucggcaucgugaacaacacgguguacgacccccugcagcccgagcuggacuccuucaaggaggagcucgacaaguacuucaagaaccacaccagccccgacgucgaccugggggacaucuccggcaucaacgccagcguggugaacauccagaaggagaucgaccgccugaacgaggucgccaagaaccucaacgagucccugaucgaccugcaggagcucgggaaguacgagcaguacaucaaguggccgugguacaucuggcugggcuucaucgccggccugaucgcgaucgugauggugaccaucaugcucugcugcaugaccagcugcugcuccugccugaaggggugcugcagcugcggcuccugcugcaaguucgacgaggacgacagcgagcccguccugaagggggugaagcuccacuacacgugaggacuagucccuguucccagagcccacuuuuuuuucuuuuuuugaaauaaaauagccugucuuucagaucucaaaggcucuuuucagagccaccaaaaaaaaaaaaaaaaaaaaaaaaaaaaaaaaaaaaaaaaaaaaaaaaaaaaaaaaaaaaaaaaaaaaaaaaaaaaaaaaaaaaaaaaaaaaaaaaaaaaa

SEQ ID NO: 23535 - RNA, 4094 nt, Artificial Sequence
  SARS-CoV-2/Wuhan/WIV05/2019__EPI_ISL_402128 spike protein mRNA gc (1-1273)(K986P_V987P)
aggagagucccgcagucggcguccagcggcucugcuuguucgugugugugucguugcaggccuuauucaagcuuaccauguucguguuccugguccuccugccccuggugagcucccagugcgugaaccucaccacccgcacgcagcugccgcccgccuacaccaacagcuucacccggggcgucuacuaccccgacaagguguuccgcuccagcgugcugcacuccacccaggaccucuuccugcccuucuucagcaacgucacgugguuccacgccauccacguguccgggaccaacggcaccaagcgguucgacaacccggugcugcccuucaacgacggggucuacuucgcgagcaccgagaaguccaacaucauccgcggcuggaucuucgggacgacccucgacagcaagacccagucccugcugaucgugaacaacgccaccaacguggucaucaaggugugcgaguuccaguucugcaacgaccccuuccucggcguguacuaccacaagaacaacaagagcuggauggaguccgaguuccgggucuacagcuccgccaacaacugcacguucgaguacgugagccagcccuuccugauggaccuggagggcaagcaggggaacuucaagaaccuccgcgaguucguguucaagaacaucgacggcuacuucaagaucuacuccaagcacaccccgaucaaccugguccgggaccugccccagggguucagcgcccucgagccccugguggaccugcccaucggcaucaacaucacccgcuuccagacccuccuggcccugcaccgguccuaccucacgccgggggacagcagcuccggcuggaccgcgggcgccgccgccuacuacgugggguaccugcagccccgcaccuuccugcucaaguacaacgagaacggcaccaucacggacgcggucgacugcgcccuggacccccugagcgagaccaagugcacccucaaguccuucaccguggagaaggggaucuaccagacgagcaacuuccgggugcagcccaccgaguccaucguccgcuucccgaacaucaccaaccugugccccuucggcgagguguucaacgccacccgguucgccagcgucuacgccuggaaccgcaagcggaucuccaacugcguggcggacuacagcgugcuguacaacuccgccagcuucuccacguucaagugcuacggcgucagccccaccaagcucaacgaccugugcuucaccaacguguacgccgacuccuucgugauccgcggggacgagguccggcagaucgcccccggccagaccgggaagaucgccgacuacaacuacaagcugccggacgacuucacgggcugcgugaucgcguggaacagcaacaaccucgacuccaaggucgggggcaacuacaacuaccuguaccgccuguuccgcaagagcaaccucaagcccuucgagcgggacaucuccaccgagaucuaccaggccggcagcacccccugcaacgggguggagggcuucaacugcuacuucccccugcaguccuacggguuccagccgaccaacggcgugggguaccagcccuaccggguggucgugcugagcuucgagcuccugcacgcccccgccacggugugcggccccaagaaguccaccaaccuggucaagaacaagugcgugaacuucaacuucaacggccucaccgggaccggcgugcugaccgagagcaacaagaaguuccugccguuccagcaguucgggcgcgacaucgccgacacgaccgacgcgguccgcgacccccagacccuggagauccucgacaucacccccugcagcuucggcgggguguccgugaucacgccgggcaccaacaccagcaaccaggucgccgugcuguaccaggacgugaacugcaccgagguccccguggccauccacgccgaccagcugacgcccaccuggcggguguacuccaccggcagcaacgucuuccagacccgcgccgggugccucaucggcgcggagcacgugaacaacuccuacgagugcgacauccccaucggggccggcaucugcgccagcuaccagacgcagaccaacuccccgcggcgcgcccggagcguggcgucccagagcaucaucgccuacaccaugucccugggcgccgagaacagcgucgccuacuccaacaacagcaucgccauccccaccaacuucacgaucuccgugaccaccgagauccugcccgugagcaugaccaagacgagcgucgacugcaccauguacaucugcggggacuccaccgagugcagcaaccuccugcugcaguacggcuccuucugcacccagcucaaccgcgcgcugacggggaucgccguggagcaggacaagaacacccaggagguguucgcccaggucaagcagaucuacaagacgcccccgaucaaggacuucggcggguucaacuucagccagauccugcccgaccccuccaagcccagcaagcgguccuucaucgaggaccuccuguucaacaaggugacccuggccgacgccggcuucaucaagcaguacggcgacugccucggggacaucgcggcccgcgaccugaucugcgcccagaaguucaacggccugaccgugcucccgccccugcugaccgacgagaugaucgcccaguacaccagcgcccuccuggcggggaccaucacguccggcuggaccuucggggccggcgccgcccugcagauccccuucgcgaugcagauggccuaccgguucaacggcaucggggucacccagaacgugcucuacgagaaccagaagcugaucgccaaccaguucaacagcgccaucggcaagauccaggacucccugagcuccaccgccagcgcgcucgggaagcugcaggacguggucaaccagaacgcccaggcccugaacacgcucgugaagcagcuguccagcaacuucggcgccaucuccagcgugcugaacgacauccucucccgccuggacccgcccgaggccgagguccagaucgaccggcugaucaccgggcgccuccagagccugcagaccuacgugacccagcagcugauccgggcggccgagauccgcgccagcgccaaccucgccgcgaccaagauguccgagugcgugcugggccagagcaagcgggucgacuucugcggcaagggguaccaccugauguccuucccccagagcgcgccccacggcgugguguuccuccacgucacguacgugcccgcccaggagaagaacuucaccaccgccccggccaucugccacgacgggaaggcccacuucccccgcgagggcgucuucguguccaacgggacccacugguucgugacgcagcggaacuucuacgagccccagaucaucaccaccgacaacaccuucgucagcggcaacugcgacguggugaucggcaucgucaacaacacgguguacgacccccugcagccggagcuggacuccuucaaggaggagcucgacaaguacuucaagaaccacaccagccccgacguggaccugggggacaucuccggcaucaacgccagcgucgugaacauccagaaggagaucgaccgccugaacgagguggccaagaaccucaacgagucccugaucgaccugcaggagcucgggaaguacgagcaguacaucaaguggcccugguacaucuggcugggcuucaucgccggccugaucgcgaucgucauggugaccaucaugcucugcugcaugaccagcugcugcuccugccugaaggggugcugcagcugcggcuccugcugcaaguucgacgaggacgacagcgagccggugcugaagggggucaagcuccacuacacgugaggacuagucccuguucccagagcccacuuuuuuuucuuuuuuugaaauaaaauagccugucuuucagaucucaaaggcucuuuucagagccaccaaaaaaaaaaaaaaaaaaaaaaaaaaaaaaaaaaaaaaaaaaaaaaaaaaaaaaaaaaaaaaaaaaaaaaaaaaaaaaaaaaaaaaaaaaaaaaaaaaaaa

SEQ ID NO: 23536 - RNA, 4094 nt, Artificial Sequence
  SARS-CoV-2/Wuhan/WIV05/2019__EPI_ISL_402128 spike protein mRNA gc (1-1273)(K986P_V987P_ D614G)
aggagagucccgcagucggcguccagcggcucugcuuguucgugugugugucguugcaggccuuauucaagcuuaccauguucguguuccugguccuccugccccuggugagcucccagugcgugaaccucaccacccgcacgcagcugccgcccgccuacaccaacagcuucacccggggcgucuacuaccccgacaagguguuccgcuccagcgugcugcacuccacccaggaccucuuccugcccuucuucagcaacgucacgugguuccacgccauccacguguccgggaccaacggcaccaagcgguucgacaacccggugcugcccuucaacgacggggucuacuucgcgagcaccgagaaguccaacaucauccgcggcuggaucuucgggacgacccucgacagcaagacccagucccugcugaucgugaacaacgccaccaacguggucaucaaggugugcgaguuccaguucugcaacgaccccuuccucggcguguacuaccacaagaacaacaagagcuggauggaguccgaguuccgggucuacagcuccgccaacaacugcacguucgaguacgugagccagcccuuccugauggaccuggagggcaagcaggggaacuucaagaaccuccgcgaguucguguucaagaacaucgacggcuacuucaagaucuacuccaagcacaccccgaucaaccugguccgggaccugccccagggguucagcgcccucgagccccugguggaccugcccaucggcaucaacaucacccgcuuccagacccuccuggcccugcaccgguccuaccucacgccgggggacagcagcuccggcuggaccgcgggcgccgccgccuacuacgugggguaccugcagccccgcaccuuccugcucaaguacaacgagaacggcaccaucacggacgcggucgacugcgcccuggacccccugagcgagaccaagugcacccucaaguccuucaccguggagaaggggaucuaccagacgagcaacuuccgggugcagcccaccgaguccaucguccgcuucccgaacaucaccaaccugugccccuucggcgagguguucaacgccacccgguucgccagcgucuacgccuggaaccgcaagcggaucuccaacugcguggcggacuacagcgugcuguacaacuccgccagcuucuccacguucaagugcuacggcgucagccccaccaagcucaacgaccugugcuucaccaacguguacgccgacuccuucgugauccgcggggacgagguccggcagaucgcccccggccagaccgggaagaucgccgacuacaacuacaagcugccggacgacuucacgggcugcgugaucgcguggaacagcaacaaccucgacuccaaggucgggggcaacuacaacuaccuguaccgccuguuccgcaagagcaaccucaagcccuucgagcgggacaucuccaccgagaucuaccaggccggcagcacccccugcaacgggguggagggcuucaacugcuacuucccccugcaguccuacggguuccagccgaccaacggcgugggguaccagcccuaccggguggucgugcugagcuucgagcuccugcacgcccccgccacggugugcggccccaagaaguccaccaaccuggucaagaacaagugcgugaacuucaacuucaacggccucaccgggaccggcgugcugaccgagagcaacaagaaguuccugccguuccagcaguucgggcgcgacaucgccgacacgaccgacgcgguccgcgacccccagacccuggagauccucgacaucacccccugcagcuucggcgggguguccgugaucacgccgggcaccaacaccagcaaccaggucgccgugcuguaccagggcgugaacugcaccgagguccccguggccauccacgccgaccagcugacgcccaccuggcggguguacuccaccgggagcaacgucuuccagacccgcgccggcugccucaucggggcggagcacgugaacaacuccuacgagugcgacauccccaucggcgccggcaucugcgccagcuaccagacgcagaccaacuccccgcggcgcgcccggagcguggcgucccagagcaucaucgccuacaccaugucccugggggccgagaacagcgucgccuacuccaacaacagcaucgccauccccaccaacuucacgaucuccgugaccaccgagauccugcccgugagcaugaccaagacgagcgucgacugcaccauguacaucugcggcgacuccaccgagugcagcaaccuccugcugcaguacggguccuucugcacccagcucaaccgcgcgcugacgggcaucgccguggagcaggacaagaacacccaggagguguucgcccaggucaagcagaucuacaagacgcccccgaucaaggacuucgggggcuucaacuucagccagauccugcccgaccccuccaagcccagcaagcgguccuucaucgaggaccuccuguucaacaaggugacccuggccgacgccggcuucaucaagcaguacggggacugccucggcgacaucgcggcccgcgaccugaucugcgcccagaaguucaacgggcugaccgugcucccgccccugcugaccgacgagaugaucgcccaguacaccagcgcccuccuggcgggcaccaucacguccggguggaccuucggcgccggcgccgcccugcagauccccuucgcgaugcagauggccuaccgguucaacgggaucggcgucacccagaacgugcucuacgagaaccagaagcugaucgccaaccaguucaacagcgccaucgggaagauccaggacucccugagcuccaccgccagcgcgcucggcaagcugcaggacguggucaaccagaacgcccaggcccugaacacgcucgugaagcagcuguccagcaacuucggggccaucuccagcgugcugaacgacauccucucccgccuggacccgcccgaggccgagguccagaucgaccggcugaucaccggccgccuccagagccugcagaccuacgugacccagcagcugauccgggcggccgagauccgcgccagcgccaaccucgccgcgaccaagauguccgagugcgugcugggccagagcaagcgggucgacuucugcgggaagggcuaccaccugauguccuucccccagagcgcgccccacggggugguguuccuccacgucacguacgugcccgcccaggagaagaacuucaccaccgccccggccaucugccacgacggcaaggcccacuucccccgcgagggggucuucguguccaacggcacccacugguucgugacgcagcggaacuucuacgagccccagaucaucaccaccgacaacaccuucgucagcggcaacugcgacguggugaucgggaucgucaacaacacgguguacgacccccugcagccggagcuggacuccuucaaggaggagcucgacaaguacuucaagaaccacaccagccccgacguggaccugggcgacaucuccgggaucaacgccagcgucgugaacauccagaaggagaucgaccgccugaacgagguggccaagaaccucaacgagucccugaucgaccugcaggagcucggcaaguacgagcaguacaucaaguggcccugguacaucuggcugggcuucaucgccgggcugaucgcgaucgucauggugaccaucaugcucugcugcaugaccagcugcugcuccugccugaagggcugcugcagcugcggguccugcugcaaguucgacgaggacgacagcgagccggugcugaagggcgucaagcuccacuacacgugaggacuagucccuguucccagagcccacuuuuuuuucuuuuuuugaaauaaaauagccugucuuucagaucucaaaggcucuuuucagagccaccaaaaaaaaaaaaaaaaaaaaaaaaaaaaaaaaaaaaaaaaaaaaaaaaaaaaaaaaaaaaaaaaaaaaaaaaaaaaaaaaaaaaaaaaaaaaaaaaaaaaa

SEQ ID NO: 23537 - RNA, 4094 nt, Artificial Sequence
  SARS-CoV-2/Wuhan/WIV05/2019__EPI_ISL_402128 spike protein mRNA gc (1-1273)(K986P_V987P_A222V_D614G)
aggagagucccgcagucggcguccagcggcucugcuuguucgugugugugucguugcaggccuuauucaagcuuaccauguucguguuccugguccuccugccccuggugagcucccagugcgugaaccucaccacccgcacgcagcugccgcccgccuacaccaacagcuucacccggggcgucuacuaccccgacaagguguuccgcuccagcgugcugcacuccacccaggaccucuuccugcccuucuucagcaacgucacgugguuccacgccauccacguguccgggaccaacggcaccaagcgguucgacaacccggugcugcccuucaacgacggggucuacuucgcgagcaccgagaaguccaacaucauccgcggcuggaucuucgggacgacccucgacagcaagacccagucccugcugaucgugaacaacgccaccaacguggucaucaaggugugcgaguuccaguucugcaacgaccccuuccucggcguguacuaccacaagaacaacaagagcuggauggaguccgaguuccgggucuacagcuccgccaacaacugcacguucgaguacgugagccagcccuuccugauggaccuggagggcaagcaggggaacuucaagaaccuccgcgaguucguguucaagaacaucgacggcuacuucaagaucuacuccaagcacaccccgaucaaccugguccgggaccugccccagggguucagcgugcucgagccccugguggaccugcccaucggcaucaacaucacccgcuuccagacccuccuggcccugcaccgguccuaccucacgccgggggacagcagcuccggcuggaccgccggcgcggccgccuacuacgucggguaccugcagccccgcaccuuccugcucaaguacaacgagaacggcaccaucacggacgccguggacugcgcgcuggacccccugagcgagaccaagugcacccucaaguccuucaccguggagaaggggaucuaccagacgagcaacuuccggguccagcccaccgaguccaucgugcgcuucccgaacaucaccaaccugugccccuucggcgaggucuucaacgccacccgguucgccagcguguacgccuggaaccgcaagcggaucuccaacugcguggccgacuacagcguccuguacaacuccgcgagcuucuccacguucaagugcuacggcgugagccccaccaagcucaacgaccugugcuucaccaacguguacgccgacuccuucgucauccgcggggacgaggugcggcagaucgcccccggccagaccgggaagaucgccgacuacaacuacaagcugccggacgacuucacgggcugcgugaucgccuggaacagcaacaaccucgacuccaaggucgggggcaacuacaacuaccuguaccgccuguuccgcaagagcaaccucaagcccuucgagcgggacaucuccaccgagaucuaccaggcgggcagcacccccugcaacgggguggagggcuucaacugcuacuucccccugcaguccuacggguuccagccgaccaacggcgugggguaccagcccuaccgggucguggugcugagcuucgagcuccugcacgcccccgccacggucugcggccccaagaaguccaccaaccuggugaagaacaagugcgugaacuucaacuucaacggccucaccgggaccggcguccugaccgagagcaacaagaaguuccugccguuccagcaguucgggcgcgacaucgccgacacgaccgacgccgugcgcgacccccagacccuggagauccucgacaucacccccugcagcuucggcgggguguccgucaucacgccgggcaccaacaccagcaaccagguggcggugcuguaccagggcgucaacugcaccgaggugcccguggccauccacgccgaccagcugacgcccaccuggcgggucuacuccaccgggagcaacguguuccagacccgcgccggcugccucaucggggccgagcacgugaacaacuccuacgagugcgacauccccaucggcgcgggcaucugcgccagcuaccagacgcagaccaacuccccgcggcgcgcccggagcgucgccucccagagcaucaucgcguacaccaugucccugggggccgagaacagcguggccuacuccaacaacagcaucgccauccccaccaacuucacgaucuccgugaccaccgagauccugcccgucagcaugaccaagacgagcguggacugcaccauguacaucugcggcgacuccaccgagugcagcaaccuccugcugcaguacggguccuucugcacccagcucaaccgcgcccugacgggcaucgcgguggagcaggacaagaacacccaggaggucuucgcccaggugaagcagaucuacaagacgcccccgaucaaggacuucgggggcuucaacuucagccagauccugcccgaccccuccaagcccagcaagcgguccuucaucgaggaccuccuguucaacaaggugacccuggccgacgccggcuucaucaagcaguacggggacugccucggcgacaucgccgcgcgcgaccugaucugcgcccagaaguucaacgggcugaccguccucccgccccugcugaccgacgagaugaucgcccaguacaccagcgcccuccuggccggcaccaucacguccggguggaccuucggcgcgggcgccgcccugcagauccccuucgccaugcagauggcguaccgguucaacgggaucggcgugacccagaacgugcucuacgagaaccagaagcugaucgccaaccaguucaacagcgccaucgggaagauccaggacucccugagcuccaccgccagcgcccucggcaagcugcaggacgucgugaaccagaacgcgcaggcccugaacacgcucgugaagcagcuguccagcaacuucggggccaucuccagcguccugaacgacauccucucccgccuggacccgcccgaggccgaggugcagaucgaccggcugaucaccggccgccuccagagccugcagaccuacgugacccagcagcugauccgggccgcggagauccgcgccagcgccaaccucgccgccaccaagauguccgagugcguccugggccagagcaagcggguggacuucugcgggaagggcuaccaccugauguccuucccccagagcgcgccccacgggguggucuuccuccacgugacguacguccccgcccaggagaagaacuucaccaccgccccggccaucugccacgacggcaaggcgcacuucccccgcgaggggguguucguguccaacggcacccacugguucgucacgcagcggaacuucuacgagccccagaucaucaccaccgacaacaccuucgugagcggcaacugcgacguggucaucgggaucgugaacaacacgguguacgacccccugcagccggagcuggacuccuucaaggaggagcucgacaaguacuucaagaaccacaccagccccgacgucgaccugggcgacaucuccgggaucaacgccagcguggugaacauccagaaggagaucgaccgccugaacgaggucgccaagaaccucaacgagucccugaucgaccugcaggagcucggcaaguacgagcaguacaucaaguggcccugguacaucuggcugggcuucaucgccgggcugaucgccaucgugauggugaccaucaugcucugcugcaugaccagcugcugcuccugccugaagggcugcugcagcugcggguccugcugcaaguucgacgaggacgacagcgagccgguccugaagggcgugaagcuccacuacacgugaggacuagucccuguucccagagcccacuuuuuuuucuuuuuuugaaauaaaauagccugucuuucagaucucaaaggcucuuuucagagccaccaaaaaaaaaaaaaaaaaaaaaaaaaaaaaaaaaaaaaaaaaaaaaaaaaaaaaaaaaaaaaaaaaaaaaaaaaaaaaaaaaaaaaaaaaaaaaaaaaaaaa

SEQ ID NO: 23538 - RNA, 4094 nt, Artificial Sequence
  SARS-CoV-2/Wuhan/WIV05/2019__EPI_ISL_402128 spike protein mRNA gc (1-1273)(K986P_V987P_N439K_D614G)
aggagagucccgcagucggcguccagcggcucugcuuguucgugugugugucguugcaggccuuauucaagcuuaccauguucguguuccugguccuccugccccuggugagcucccagugcgugaaccucaccacccgcacgcagcugccgcccgccuacaccaacagcuucacccggggcgucuacuaccccgacaagguguuccgcuccagcgugcugcacuccacccaggaccucuuccugcccuucuucagcaacgucacgugguuccacgccauccacguguccgggaccaacggcaccaagcgguucgacaacccggugcugcccuucaacgacggggucuacuucgcgagcaccgagaaguccaacaucauccgcggcuggaucuucgggacgacccucgacagcaagacccagucccugcugaucgugaacaacgccaccaacguggucaucaaggugugcgaguuccaguucugcaacgaccccuuccucggcguguacuaccacaagaacaacaagagcuggauggaguccgaguuccgggucuacagcuccgccaacaacugcacguucgaguacgugagccagcccuuccugauggaccuggagggcaagcaggggaacuucaagaaccuccgcgaguucguguucaagaacaucgacggcuacuucaagaucuacuccaagcacaccccgaucaaccugguccgggaccugccccagggguucagcgcccucgagccccugguggaccugcccaucggcaucaacaucacccgcuuccagacccuccuggcccugcaccgguccuaccucacgccgggggacagcagcuccggcuggaccgcgggcgccgccgccuacuacgugggguaccugcagccccgcaccuuccugcucaaguacaacgagaacggcaccaucacggacgcggucgacugcgcccuggacccccugagcgagaccaagugcacccucaaguccuucaccguggagaaggggaucuaccagacgagcaacuuccgggugcagcccaccgaguccaucguccgcuucccgaacaucaccaaccugugccccuucggcgagguguucaacgccacccgguucgccagcgucuacgccuggaaccgcaagcggaucuccaacugcguggcggacuacagcgugcuguacaacuccgccagcuucuccacguucaagugcuacggcgucagccccaccaagcucaacgaccugugcuucaccaacguguacgccgacuccuucgugauccgcggggacgagguccggcagaucgcccccggccagaccgggaagaucgccgacuacaacuacaagcugccggacgacuucacgggcugcgugaucgcguggaacagcaagaaccucgacuccaaggucgggggcaacuacaacuaccuguaccgccuguuccgcaagagcaaccucaagcccuucgagcgggacaucuccaccgagaucuaccaggccggcagcacccccugcaacgggguggagggcuucaacugcuacuucccccugcaguccuacggguuccagccgaccaacggcgugggguaccagcccuaccggguggucgugcugagcuucgagcuccugcacgcccccgccacggugugcggccccaagaaguccaccaaccuggucaagaacaagugcgugaacuucaacuucaacggccucaccgggaccggcgugcugaccgagagcaacaagaaguuccugccguuccagcaguucgggcgcgacaucgccgacacgaccgacgcgguccgcgacccccagacccuggagauccucgacaucacccccugcagcuucggcgggguguccgugaucacgccgggcaccaacaccagcaaccaggucgccgugcuguaccagggcgugaacugcaccgagguccccguggccauccacgccgaccagcugacgcccaccuggcggguguacuccaccgggagcaacgucuuccagacccgcgccggcugccucaucggggcggagcacgugaacaacuccuacgagugcgacauccccaucggcgccggcaucugcgccagcuaccagacgcagaccaacuccccgcggcgcgcccggagcguggcgucccagagcaucaucgccuacaccaugucccugggggccgagaacagcgucgccuacuccaacaacagcaucgccauccccaccaacuucacgaucuccgugaccaccgagauccugcccgugagcaugaccaagacgagcgucgacugcaccauguacaucugcggcgacuccaccgagugcagcaaccuccugcugcaguacggguccuucugcacccagcucaaccgcgcgcugacgggcaucgccguggagcaggacaagaacacccaggagguguucgcccaggucaagcagaucuacaagacgcccccgaucaaggacuucgggggcuucaacuucagccagauccugcccgaccccuccaagcccagcaagcgguccuucaucgaggaccuccuguucaacaaggugacccuggccgacgccggcuucaucaagcaguacggggacugccucggcgacaucgcggcccgcgaccugaucugcgcccagaaguucaacgggcugaccgugcucccgccccugcugaccgacgagaugaucgcccaguacaccagcgcccuccuggcgggcaccaucacguccggguggaccuucggcgccggcgccgcccugcagauccccuucgcgaugcagauggccuaccgguucaacgggaucggcgucacccagaacgugcucuacgagaaccagaagcugaucgccaaccaguucaacagcgccaucgggaagauccaggacucccugagcuccaccgccagcgcgcucggcaagcugcaggacguggucaaccagaacgcccaggcccugaacacgcucgugaagcagcuguccagcaacuucggggccaucuccagcgugcugaacgacauccucucccgccuggacccgcccgaggccgagguccagaucgaccggcugaucaccggccgccuccagagccugcagaccuacgugacccagcagcugauccgggcggccgagauccgcgccagcgccaaccucgccgcgaccaagauguccgagugcgugcugggccagagcaagcgggucgacuucugcgggaagggcuaccaccugauguccuucccccagagcgcgccccacggggugguguuccuccacgucacguacgugcccgcccaggagaagaacuucaccaccgccccggccaucugccacgacggcaaggcccacuucccccgcgagggggucuucguguccaacggcacccacugguucgugacgcagcggaacuucuacgagccccagaucaucaccaccgacaacaccuucgucagcggcaacugcgacguggugaucgggaucgucaacaacacgguguacgacccccugcagccggagcuggacuccuucaaggaggagcucgacaaguacuucaagaaccacaccagccccgacguggaccugggcgacaucuccgggaucaacgccagcgucgugaacauccagaaggagaucgaccgccugaacgagguggccaagaaccucaacgagucccugaucgaccugcaggagcucggcaaguacgagcaguacaucaaguggcccugguacaucuggcugggcuucaucgccgggcugaucgcgaucgucauggugaccaucaugcucugcugcaugaccagcugcugcuccugccugaagggcugcugcagcugcggguccugcugcaaguucgacgaggacgacagcgagccggugcugaagggcgucaagcuccacuacacgugaggacuagucccuguucccagagcccacuuuuuuuucuuuuuuugaaauaaaauagccugucuuucagaucucaaaggcucuuuucagagccaccaaaaaaaaaaaaaaaaaaaaaaaaaaaaaaaaaaaaaaaaaaaaaaaaaaaaaaaaaaaaaaaaaaaaaaaaaaaaaaaaaaaaaaaaaaaaaaaaaaaaa

SEQ ID NO: 23539 - RNA, 4094 nt, Artificial Sequence
  SARS-CoV-2/Wuhan/WIV05/2019__EPI_ISL_402128 spike protein mRNA gc (1-1273)(K986P_V987P_S477N_D614G)
aggagagucccgcagucggcguccagcggcucugcuuguucgugugugugucguugcaggccuuauucaagcuuaccauguucguguuccugguccuccugccccuggugagcucccagugcgugaaccucaccacccgcacgcagcugccgcccgccuacaccaacagcuucacccggggcgucuacuaccccgacaagguguuccgcuccagcgugcugcacuccacccaggaccucuuccugcccuucuucagcaacgucacgugguuccacgccauccacguguccgggaccaacggcaccaagcgguucgacaacccggugcugcccuucaacgacggggucuacuucgcgagcaccgagaaguccaacaucauccgcggcuggaucuucgggacgacccucgacagcaagacccagucccugcugaucgugaacaacgccaccaacguggucaucaaggugugcgaguuccaguucugcaacgaccccuuccucggcguguacuaccacaagaacaacaagagcuggauggaguccgaguuccgggucuacagcuccgccaacaacugcacguucgaguacgugagccagcccuuccugauggaccuggagggcaagcaggggaacuucaagaaccuccgcgaguucguguucaagaacaucgacggcuacuucaagaucuacuccaagcacaccccgaucaaccugguccgggaccugccccagggguucagcgcccucgagccccugguggaccugcccaucggcaucaacaucacccgcuuccagacccuccuggcccugcaccgguccuaccucacgccgggggacagcagcuccggcuggaccgcgggcgccgccgccuacuacgugggguaccugcagccccgcaccuuccugcucaaguacaacgagaacggcaccaucacggacgcggucgacugcgcccuggacccccugagcgagaccaagugcacccucaaguccuucaccguggagaaggggaucuaccagacgagcaacuuccgggugcagcccaccgaguccaucguccgcuucccgaacaucaccaaccugugccccuucggcgagguguucaacgccacccgguucgccagcgucuacgccuggaaccgcaagcggaucuccaacugcguggcggacuacagcgugcuguacaacuccgccagcuucuccacguucaagugcuacggcgucagccccaccaagcucaacgaccugugcuucaccaacguguacgccgacuccuucgugauccgcggggacgagguccggcagaucgcccccggccagaccgggaagaucgccgacuacaacuacaagcugccggacgacuucacgggcugcgugaucgcguggaacagcaacaaccucgacuccaaggucgggggcaacuacaacuaccuguaccgccuguuccgcaagagcaaccucaagcccuucgagcgggacaucuccaccgagaucuaccaggccggcaacacccccugcaacgggguggagggcuucaacugcuacuucccccugcagagcuacggguuccagccgaccaacggcgugggguaccagcccuaccggguggucgugcuguccuucgagcuccugcacgcccccgccacggugugcggccccaagaaguccaccaaccuggucaagaacaagugcgugaacuucaacuucaacggccucaccgggaccggcgugcugaccgagagcaacaagaaguuccugccguuccagcaguucgggcgcgacaucgccgacacgaccgacgcgguccgcgacccccagacccuggagauccucgacaucacccccugcagcuucggcggggugagcgugaucacgccgggcaccaacaccuccaaccaggucgccgugcuguaccagggcgugaacugcaccgagguccccguggccauccacgccgaccagcugacgcccaccuggcggguguacagcaccggguccaacgucuuccagacccgcgccggcugccucaucggggcggagcacgugaacaacagcuacgagugcgacauccccaucggcgccggcaucugcgccuccuaccagacgcagaccaacagcccgcggcgcgcccgguccguggcgagccaguccaucaucgccuacaccaugagccugggggccgagaacuccgucgccuacagcaacaacuccaucgccauccccaccaacuucacgaucagcgugaccaccgagauccugcccguguccaugaccaagacgagcgucgacugcaccauguacaucugcggcgacagcaccgagugcuccaaccuccugcugcaguacgggagcuucugcacccagcucaaccgcgcgcugacgggcaucgccguggagcaggacaagaacacccaggagguguucgcccaggucaagcagaucuacaagacgcccccgaucaaggacuucgggggcuucaacuucucccagauccugcccgaccccagcaagcccuccaagcggagcuucaucgaggaccuccuguucaacaaggugacccuggccgacgccggcuucaucaagcaguacggggacugccucggcgacaucgcggcccgcgaccugaucugcgcccagaaguucaacgggcugaccgugcucccgccccugcugaccgacgagaugaucgcccaguacaccuccgcccuccuggcgggcaccaucacgagcggguggaccuucggcgccggcgccgcccugcagauccccuucgcgaugcagauggccuaccgguucaacgggaucggcgucacccagaacgugcucuacgagaaccagaagcugaucgccaaccaguucaacuccgccaucgggaagauccaggacagccuguccagcaccgccuccgcgcucggcaagcugcaggacguggucaaccagaacgcccaggcccugaacacgcucgugaagcagcugagcuccaacuucggggccaucagcuccgugcugaacgacauccucagccgccuggacccgcccgaggccgagguccagaucgaccggcugaucaccggccgccuccagucccugcagaccuacgugacccagcagcugauccgggcggccgagauccgcgccagcgccaaccucgccgcgaccaagaugagcgagugcgugcugggccaguccaagcgggucgacuucugcgggaagggcuaccaccugaugagcuucccccaguccgcgccccacggggugguguuccuccacgucacguacgugcccgcccaggagaagaacuucaccaccgccccggccaucugccacgacggcaaggcccacuucccccgcgagggggucuucgugagcaacggcacccacugguucgugacgcagcggaacuucuacgagccccagaucaucaccaccgacaacaccuucgucuccggcaacugcgacguggugaucgggaucgucaacaacacgguguacgacccccugcagccggagcuggacagcuucaaggaggagcucgacaaguacuucaagaaccacaccucccccgacguggaccugggcgacaucagcgggaucaacgccuccgucgugaacauccagaaggagaucgaccgccugaacgagguggccaagaaccucaacgagagccugaucgaccugcaggagcucggcaaguacgagcaguacaucaaguggcccugguacaucuggcugggcuucaucgccgggcugaucgcgaucgucauggugaccaucaugcucugcugcaugaccuccugcugcagcugccugaagggcugcugcuccugcgggagcugcugcaaguucgacgaggacgacuccgagccggugcugaagggcgucaagcuccacuacacgugaggacuagucccuguucccagagcccacuuuuuuuucuuuuuuugaaauaaaauagccugucuuucagaucucaaaggcucuuuucagagccaccaaaaaaaaaaaaaaaaaaaaaaaaaaaaaaaaaaaaaaaaaaaaaaaaaaaaaaaaaaaaaaaaaaaaaaaaaaaaaaaaaaaaaaaaaaaaaaaaaaaaa

SEQ ID NO: 23540 - RNA, 4094 nt, Artificial Sequence
  SARS-CoV-2/Wuhan/WIV05/2019__EPI_ISL_402128 spike protein mRNA gc (1-1273)(K986P_V987P_N501Y_D614G)
aggagagucccgcagucggcguccagcggcucugcuuguucgugugugugucguugcaggccuuauucaagcuuaccauguucguguuccugguccuccugccccuggugagcucccagugcgugaaccucaccacccgcacgcagcugccgcccgccuacaccaacagcuucacccggggcgucuacuaccccgacaagguguuccgcuccagcgugcugcacuccacccaggaccucuuccugcccuucuucagcaacgucacgugguuccacgccauccacguguccgggaccaacggcaccaagcgguucgacaacccggugcugcccuucaacgacggggucuacuucgcgagcaccgagaaguccaacaucauccgcggcuggaucuucgggacgacccucgacagcaagacccagucccugcugaucgugaacaacgccaccaacguggucaucaaggugugcgaguuccaguucugcaacgaccccuuccucggcguguacuaccacaagaacaacaagagcuggauggaguccgaguuccgggucuacagcuccgccaacaacugcacguucgaguacgugagccagcccuuccugauggaccuggagggcaagcaggggaacuucaagaaccuccgcgaguucguguucaagaacaucgacggcuacuucaagaucuacuccaagcacaccccgaucaaccugguccgggaccugccccagggguucagcgcccucgagccccugguggaccugcccaucggcaucaacaucacccgcuuccagacccuccuggcccugcaccgguccuaccucacgccgggggacagcagcuccggcuggaccgcgggcgccgccgccuacuacgugggguaccugcagccccgcaccuuccugcucaaguacaacgagaacggcaccaucacggacgcggucgacugcgcccuggacccccugagcgagaccaagugcacccucaaguccuucaccguggagaaggggaucuaccagacgagcaacuuccgggugcagcccaccgaguccaucguccgcuucccgaacaucaccaaccugugccccuucggcgagguguucaacgccacccgguucgccagcgucuacgccuggaaccgcaagcggaucuccaacugcguggcggacuacagcgugcuguacaacuccgccagcuucuccacguucaagugcuacggcgucagccccaccaagcucaacgaccugugcuucaccaacguguacgccgacuccuucgugauccgcggggacgagguccggcagaucgcccccggccagaccgggaagaucgccgacuacaacuacaagcugccggacgacuucacgggcugcgugaucgcguggaacagcaacaaccucgacuccaaggucgggggcaacuacaacuaccuguaccgccuguuccgcaagagcaaccucaagcccuucgagcgggacaucuccaccgagaucuaccaggccggcagcacccccugcaacgggguggagggcuucaacugcuacuucccccugcaguccuacggguuccagccgaccuacggcgugggguaccagcccuaccggguggucgugcugagcuucgagcuccugcacgcccccgccacggugugcggccccaagaaguccaccaaccuggucaagaacaagugcgugaacuucaacuucaacggccucaccgggaccggcgugcugaccgagagcaacaagaaguuccugccguuccagcaguucgggcgcgacaucgccgacacgaccgacgcgguccgcgacccccagacccuggagauccucgacaucacccccugcagcuucggcgggguguccgugaucacgccgggcaccaacaccagcaaccaggucgccgugcuguaccagggcgugaacugcaccgagguccccguggccauccacgccgaccagcugacgcccaccuggcggguguacuccaccgggagcaacgucuuccagacccgcgccggcugccucaucggggcggagcacgugaacaacuccuacgagugcgacauccccaucggcgccggcaucugcgccagcuaccagacgcagaccaacuccccgcggcgcgcccggagcguggcgucccagagcaucaucgccuacaccaugucccugggggccgagaacagcgucgccuacuccaacaacagcaucgccauccccaccaacuucacgaucuccgugaccaccgagauccugcccgugagcaugaccaagacgagcgucgacugcaccauguacaucugcggcgacuccaccgagugcagcaaccuccugcugcaguacggguccuucugcacccagcucaaccgcgcgcugacgggcaucgccguggagcaggacaagaacacccaggagguguucgcccaggucaagcagaucuacaagacgcccccgaucaaggacuucgggggcuucaacuucagccagauccugcccgaccccuccaagcccagcaagcgguccuucaucgaggaccuccuguucaacaaggugacccuggccgacgccggcuucaucaagcaguacggggacugccucggcgacaucgcggcccgcgaccugaucugcgcccagaaguucaacgggcugaccgugcucccgccccugcugaccgacgagaugaucgcccaguacaccagcgcccuccuggcgggcaccaucacguccggguggaccuucggcgccggcgccgcccugcagauccccuucgcgaugcagauggccuaccgguucaacgggaucggcgucacccagaacgugcucuacgagaaccagaagcugaucgccaaccaguucaacagcgccaucgggaagauccaggacucccugagcuccaccgccagcgcgcucggcaagcugcaggacguggucaaccagaacgcccaggcccugaacacgcucgugaagcagcuguccagcaacuucggggccaucuccagcgugcugaacgacauccucucccgccuggacccgcccgaggccgagguccagaucgaccggcugaucaccggccgccuccagagccugcagaccuacgugacccagcagcugauccgggcggccgagauccgcgccagcgccaaccucgccgcgaccaagauguccgagugcgugcugggccagagcaagcgggucgacuucugcgggaagggcuaccaccugauguccuucccccagagcgcgccccacggggugguguuccuccacgucacguacgugcccgcccaggagaagaacuucaccaccgccccggccaucugccacgacggcaaggcccacuucccccgcgagggggucuucguguccaacggcacccacugguucgugacgcagcggaacuucuacgagccccagaucaucaccaccgacaacaccuucgucagcggcaacugcgacguggugaucgggaucgucaacaacacgguguacgacccccugcagccggagcuggacuccuucaaggaggagcucgacaaguacuucaagaaccacaccagccccgacguggaccugggcgacaucuccgggaucaacgccagcgucgugaacauccagaaggagaucgaccgccugaacgagguggccaagaaccucaacgagucccugaucgaccugcaggagcucggcaaguacgagcaguacaucaaguggcccugguacaucuggcugggcuucaucgccgggcugaucgcgaucgucauggugaccaucaugcucugcugcaugaccagcugcugcuccugccugaagggcugcugcagcugcggguccugcugcaaguucgacgaggacgacagcgagccggugcugaagggcgucaagcuccacuacacgugaggacuagucccuguucccagagcccacuuuuuuuucuuuuuuugaaauaaaauagccugucuuucagaucucaaaggcucuuuucagagccaccaaaaaaaaaaaaaaaaaaaaaaaaaaaaaaaaaaaaaaaaaaaaaaaaaaaaaaaaaaaaaaaaaaaaaaaaaaaaaaaaaaaaaaaaaaaaaaaaaaaaa

SEQ ID NO: 23541 - RNA, 4088 nt, Artificial Sequence
  SARS-CoV-2/Wuhan/WIV05/2019__EPI_ISL_402128 spike protein mRNA gc (1-1273)(K986P_V987P_H69del_V70del_D614G)
aggagagucccgcagucggcguccagcggcucugcuuguucgugugugugucguugcaggccuuauucaagcuuaccauguucguguuccugguccuccugccccuggugagcucccagugcgugaaccucaccacccgcacgcagcugccgcccgccuacaccaacagcuucacccggggcgucuacuaccccgacaagguguuccgcuccagcgugcugcacuccacccaggaccucuuccugcccuucuucagcaacgucacgugguuccacgccaucuccgggaccaacggcaccaagcgguucgacaacccggugcugcccuucaacgacgggguguacuucgcgagcaccgagaaguccaacaucauccgcggcuggaucuucgggacgacccucgacagcaagacccagucccugcugaucgucaacaacgccaccaacguggugaucaaggucugcgaguuccaguucugcaacgaccccuuccucggcguguacuaccacaagaacaacaagagcuggauggaguccgaguuccggguguacagcuccgccaacaacugcacguucgaguacgucagccagcccuuccugauggaccuggagggcaagcaggggaacuucaagaaccuccgcgaguucguguucaagaacaucgacggcuacuucaagaucuacuccaagcacaccccgaucaaccuggugcgggaccugccccagggguucagcgcccucgagccccuggucgaccugcccaucggcaucaacaucacccgcuuccagacccuccuggcccugcaccgguccuaccucacgccgggggacagcagcuccggcuggaccgcgggcgccgccgccuacuacgugggguaccugcagccccgcaccuuccugcucaaguacaacgagaacggcaccaucacggacgcgguggacugcgcccuggacccccugagcgagaccaagugcacccucaaguccuucaccgucgagaaggggaucuaccagacgagcaacuuccgggugcagcccaccgaguccaucgugcgcuucccgaacaucaccaaccugugccccuucggcgaggucuucaacgccacccgguucgccagcguguacgccuggaaccgcaagcggaucuccaacugcgucgcggacuacagcgugcuguacaacuccgccagcuucuccacguucaagugcuacggcgugagccccaccaagcucaacgaccugugcuucaccaacgucuacgccgacuccuucgugauccgcggggacgaggugcggcagaucgcccccggccagaccgggaagaucgccgacuacaacuacaagcugccggacgacuucacgggcugcgucaucgcguggaacagcaacaaccucgacuccaaggucgggggcaacuacaacuaccuguaccgccuguuccgcaagagcaaccucaagcccuucgagcgggacaucuccaccgagaucuaccaggccggcagcacccccugcaacgggguggagggcuucaacugcuacuucccccugcaguccuacggguuccagccgaccaacggcgugggguaccagcccuaccggguggugguccugagcuucgagcuccugcacgcccccgccacggugugcggccccaagaaguccaccaaccuggugaagaacaagugcgucaacuucaacuucaacggccucaccgggaccggcgugcugaccgagagcaacaagaaguuccugccguuccagcaguucgggcgcgacaucgccgacacgaccgacgcggugcgcgacccccagacccuggagauccucgacaucacccccugcagcuucggcggggucuccgugaucacgccgggcaccaacaccagcaaccagguggccguccuguaccagggcgugaacugcaccgaggugcccgucgccauccacgccgaccagcugacgcccaccuggcggguguacuccaccgggagcaacguguuccagacccgcgccggcugccucaucggggcggagcacgucaacaacuccuacgagugcgacauccccaucggcgccggcaucugcgccagcuaccagacgcagaccaacuccccgcggcgcgcccggagcguggcgucccagagcaucaucgccuacaccaugucccugggggccgagaacagcguggccuacuccaacaacagcaucgccauccccaccaacuucacgaucuccgucaccaccgagauccugcccgugagcaugaccaagacgagcguggacugcaccauguacaucugcggcgacuccaccgagugcagcaaccuccugcugcaguacggguccuucugcacccagcucaaccgcgcgcugacgggcaucgccgucgagcaggacaagaacacccaggagguguucgcccaggugaagcagaucuacaagacgcccccgaucaaggacuucgggggcuucaacuucagccagauccugcccgaccccuccaagcccagcaagcgguccuucaucgaggaccuccuguucaacaaggucacccuggccgacgccggcuucaucaagcaguacggggacugccucggcgacaucgcggcccgcgaccugaucugcgcccagaaguucaacgggcugaccgugcucccgccccugcugaccgacgagaugaucgcccaguacaccagcgcccuccuggcgggcaccaucacguccggguggaccuucggcgccggcgccgcccugcagauccccuucgcgaugcagauggccuaccgguucaacgggaucggcgugacccagaacguccucuacgagaaccagaagcugaucgccaaccaguucaacagcgccaucgggaagauccaggacucccugagcuccaccgccagcgcgcucggcaagcugcaggacguggugaaccagaacgcccaggcccugaacacgcucgucaagcagcuguccagcaacuucggggccaucuccagcgugcugaacgacauccucucccgccuggacccgcccgaggccgaggugcagaucgaccggcugaucaccggccgccuccagagccugcagaccuacgucacccagcagcugauccgggcggccgagauccgcgccagcgccaaccucgccgcgaccaagauguccgagugcgugcugggccagagcaagcggguggacuucugcgggaagggcuaccaccugauguccuucccccagagcgcgccccacggggucguguuccuccacgugacguacguccccgcccaggagaagaacuucaccaccgccccggccaucugccacgacggcaaggcccacuucccccgcgaggggguguucgucuccaacggcacccacugguucgugacgcagcggaacuucuacgagccccagaucaucaccaccgacaacaccuucgugagcggcaacugcgacgucgugaucgggaucgugaacaacacggucuacgacccccugcagccggagcuggacuccuucaaggaggagcucgacaaguacuucaagaaccacaccagccccgacguggaccugggcgacaucuccgggaucaacgccagcguggucaacauccagaaggagaucgaccgccugaacgagguggccaagaaccucaacgagucccugaucgaccugcaggagcucggcaaguacgagcaguacaucaaguggcccugguacaucuggcugggcuucaucgccgggcugaucgcgaucgugauggucaccaucaugcucugcugcaugaccagcugcugcuccugccugaagggcugcugcagcugcggguccugcugcaaguucgacgaggacgacagcgagccggugcugaagggcgugaagcuccacuacacgugaggacuagucccuguucccagagcccacuuuuuuuucuuuuuuugaaauaaaauagccugucuuucagaucucaaaggcucuuuucagagccaccaaaaaaaaaaaaaaaaaaaaaaaaaaaaaaaaaaaaaaaaaaaaaaaaaaaaaaaaaaaaaaaaaaaaaaaaaaaaaaaaaaaaaaaaaaaaaaaaaaaaa

SEQ ID NO: 23542 - RNA, 4094 nt, Artificial Sequence
  SARS-CoV-2/Wuhan/WIV05/2019__EPI_ISL_402128 spike protein mRNA gc (1-1273)(K986P_V987P_Y453F_D614G)
aggagagucccgcagucggcguccagcggcucugcuuguucgugugugugucguugcaggccuuauucaagcuuaccauguucguguuccugguccuccugccccuggugagcucccagugcgugaaccucaccacccgcacgcagcugccgcccgccuacaccaacagcuucacccggggcgucuacuaccccgacaagguguuccgcuccagcgugcugcacuccacccaggaccucuuccugcccuucuucagcaacgucacgugguuccacgccauccacguguccgggaccaacggcaccaagcgguucgacaacccggugcugcccuucaacgacggggucuacuucgcgagcaccgagaaguccaacaucauccgcggcuggaucuucgggacgacccucgacagcaagacccagucccugcugaucgugaacaacgccaccaacguggucaucaaggugugcgaguuccaguucugcaacgaccccuuccucggcguguacuaccacaagaacaacaagagcuggauggaguccgaguuccgggucuacagcuccgccaacaacugcacguucgaguacgugagccagcccuuccugauggaccuggagggcaagcaggggaacuucaagaaccuccgcgaguucguguucaagaacaucgacggcuacuucaagaucuacuccaagcacaccccgaucaaccugguccgggaccugccccagggguucagcgcccucgagccccugguggaccugcccaucggcaucaacaucacccgcuuccagacccuccuggcccugcaccgguccuaccucacgccgggggacagcagcuccggcuggaccgcgggcgccgccgccuacuacgugggguaccugcagccccgcaccuuccugcucaaguacaacgagaacggcaccaucacggacgcggucgacugcgcccuggacccccugagcgagaccaagugcacccucaaguccuucaccguggagaaggggaucuaccagacgagcaacuuccgggugcagcccaccgaguccaucguccgcuucccgaacaucaccaaccugugccccuucggcgagguguucaacgccacccgguucgccagcgucuacgccuggaaccgcaagcggaucuccaacugcguggcggacuacagcgugcuguacaacuccgccagcuucuccacguucaagugcuacggcgucagccccaccaagcucaacgaccugugcuucaccaacguguacgccgacuccuucgugauccgcggggacgagguccggcagaucgcccccggccagaccgggaagaucgccgacuacaacuacaagcugccggacgacuucacgggcugcgugaucgcguggaacagcaacaaccucgacuccaaggucgggggcaacuacaacuaccuguuccgccuguuccgcaagagcaaccucaagcccuucgagcgggacaucuccaccgagaucuaccaggccggcagcacccccugcaacgggguggagggcuucaacugcuacuucccccugcaguccuacggguuccagccgaccaacggcgugggguaccagcccuaccggguggucgugcugagcuucgagcuccugcacgcccccgccacggugugcggccccaagaaguccaccaaccuggucaagaacaagugcgugaacuucaacuucaacggccucaccgggaccggcgugcugaccgagagcaacaagaaguuccugccguuccagcaguucgggcgcgacaucgccgacacgaccgacgcgguccgcgacccccagacccuggagauccucgacaucacccccugcagcuucggcgggguguccgugaucacgccgggcaccaacaccagcaaccaggucgccgugcuguaccagggcgugaacugcaccgagguccccguggccauccacgccgaccagcugacgcccaccuggcggguguacuccaccgggagcaacgucuuccagacccgcgccggcugccucaucggggcggagcacgugaacaacuccuacgagugcgacauccccaucggcgccggcaucugcgccagcuaccagacgcagaccaacuccccgcggcgcgcccggagcguggcgucccagagcaucaucgccuacaccaugucccugggggccgagaacagcgucgccuacuccaacaacagcaucgccauccccaccaacuucacgaucuccgugaccaccgagauccugcccgugagcaugaccaagacgagcgucgacugcaccauguacaucugcggcgacuccaccgagugcagcaaccuccugcugcaguacggguccuucugcacccagcucaaccgcgcgcugacgggcaucgccguggagcaggacaagaacacccaggagguguucgcccaggucaagcagaucuacaagacgcccccgaucaaggacuucgggggcuucaacuucagccagauccugcccgaccccuccaagcccagcaagcgguccuucaucgaggaccuccuguucaacaaggugacccuggccgacgccggcuucaucaagcaguacggggacugccucggcgacaucgcggcccgcgaccugaucugcgcccagaaguucaacgggcugaccgugcucccgccccugcugaccgacgagaugaucgcccaguacaccagcgcccuccuggcgggcaccaucacguccggguggaccuucggcgccggcgccgcccugcagauccccuucgcgaugcagauggccuaccgguucaacgggaucggcgucacccagaacgugcucuacgagaaccagaagcugaucgccaaccaguucaacagcgccaucgggaagauccaggacucccugagcuccaccgccagcgcgcucggcaagcugcaggacguggucaaccagaacgcccaggcccugaacacgcucgugaagcagcuguccagcaacuucggggccaucuccagcgugcugaacgacauccucucccgccuggacccgcccgaggccgagguccagaucgaccggcugaucaccggccgccuccagagccugcagaccuacgugacccagcagcugauccgggcggccgagauccgcgccagcgccaaccucgccgcgaccaagauguccgagugcgugcugggccagagcaagcgggucgacuucugcgggaagggcuaccaccugauguccuucccccagagcgcgccccacggggugguguuccuccacgucacguacgugcccgcccaggagaagaacuucaccaccgccccggccaucugccacgacggcaaggcccacuucccccgcgagggggucuucguguccaacggcacccacugguucgugacgcagcggaacuucuacgagccccagaucaucaccaccgacaacaccuucgucagcggcaacugcgacguggugaucgggaucgucaacaacacgguguacgacccccugcagccggagcuggacuccuucaaggaggagcucgacaaguacuucaagaaccacaccagccccgacguggaccugggcgacaucuccgggaucaacgccagcgucgugaacauccagaaggagaucgaccgccugaacgagguggccaagaaccucaacgagucccugaucgaccugcaggagcucggcaaguacgagcaguacaucaaguggcccugguacaucuggcugggcuucaucgccgggcugaucgcgaucgucauggugaccaucaugcucugcugcaugaccagcugcugcuccugccugaagggcugcugcagcugcggguccugcugcaaguucgacgaggacgacagcgagccggugcugaagggcgucaagcuccacuacacgugaggacuagucccuguucccagagcccacuuuuuuuucuuuuuuugaaauaaaauagccugucuuucagaucucaaaggcucuuuucagagccaccaaaaaaaaaaaaaaaaaaaaaaaaaaaaaaaaaaaaaaaaaaaaaaaaaaaaaaaaaaaaaaaaaaaaaaaaaaaaaaaaaaaaaaaaaaaaaaaaaaaaa

SEQ ID NO: 23543 - RNA, 4094 nt, Artificial Sequence
  SARS-CoV-2/Wuhan/WIV05/2019__EPI_ISL_402128 spike protein mRNA gc (1-1273)(K986P_V987P_D614G_I692V)
aggagagucccgcagucggcguccagcggcucugcuuguucgugugugugucguugcaggccuuauucaagcuuaccauguucguguuccugguccuccugccccuggugagcucccagugcgugaaccucaccacccgcacgcagcugccgcccgccuacaccaacagcuucacccggggcgucuacuaccccgacaagguguuccgcuccagcgugcugcacuccacccaggaccucuuccugcccuucuucagcaacgucacgugguuccacgccauccacguguccgggaccaacggcaccaagcgguucgacaacccggugcugcccuucaacgacggggucuacuucgcgagcaccgagaaguccaacaucauccgcggcuggaucuucgggacgacccucgacagcaagacccagucccugcugaucgugaacaacgccaccaacguggucaucaaggugugcgaguuccaguucugcaacgaccccuuccucggcguguacuaccacaagaacaacaagagcuggauggaguccgaguuccgggucuacagcuccgccaacaacugcacguucgaguacgugagccagcccuuccugauggaccuggagggcaagcaggggaacuucaagaaccuccgcgaguucguguucaagaacaucgacggcuacuucaagaucuacuccaagcacaccccgaucaaccugguccgggaccugccccagggguucagcgcccucgagccccugguggaccugcccaucggcaucaacaucacccgcuuccagacccuccuggcccugcaccgguccuaccucacgccgggggacagcagcuccggcuggaccgcgggcgccgccgccuacuacgugggguaccugcagccccgcaccuuccugcucaaguacaacgagaacggcaccaucacggacgcggucgacugcgcccuggacccccugagcgagaccaagugcacccucaaguccuucaccguggagaaggggaucuaccagacgagcaacuuccgggugcagcccaccgaguccaucguccgcuucccgaacaucaccaaccugugccccuucggcgagguguucaacgccacccgguucgccagcgucuacgccuggaaccgcaagcggaucuccaacugcguggcggacuacagcgugcuguacaacuccgccagcuucuccacguucaagugcuacggcgucagccccaccaagcucaacgaccugugcuucaccaacguguacgccgacuccuucgugauccgcggggacgagguccggcagaucgcccccggccagaccgggaagaucgccgacuacaacuacaagcugccggacgacuucacgggcugcgugaucgcguggaacagcaacaaccucgacuccaaggucgggggcaacuacaacuaccuguaccgccuguuccgcaagagcaaccucaagcccuucgagcgggacaucuccaccgagaucuaccaggccggcagcacccccugcaacgggguggagggcuucaacugcuacuucccccugcaguccuacggguuccagccgaccaacggcgugggguaccagcccuaccggguggucgugcugagcuucgagcuccugcacgcccccgccacggugugcggccccaagaaguccaccaaccuggucaagaacaagugcgugaacuucaacuucaacggccucaccgggaccggcgugcugaccgagagcaacaagaaguuccugccguuccagcaguucgggcgcgacaucgccgacacgaccgacgcgguccgcgacccccagacccuggagauccucgacaucacccccugcagcuucggcgggguguccgugaucacgccgggcaccaacaccagcaaccaggucgccgugcuguaccagggcgugaacugcaccgagguccccguggccauccacgccgaccagcugacgcccaccuggcggguguacuccaccgggagcaacgucuuccagacccgcgccggcugccucaucggggcggagcacgugaacaacuccuacgagugcgacauccccaucggcgccggcaucugcgccagcuaccagacgcagaccaacuccccgcggcgcgcccggagcguggcgucccagagcgucaucgccuacaccaugucccugggggccgagaacagcguggccuacuccaacaacagcaucgccauccccaccaacuucacgaucuccgugaccaccgagauccugcccgucagcaugaccaagacgagcguggacugcaccauguacaucugcggcgacuccaccgagugcagcaaccuccugcugcaguacggguccuucugcacccagcucaaccgcgcgcugacgggcaucgccguggagcaggacaagaacacccaggaggucuucgcccaggugaagcagaucuacaagacgcccccgaucaaggacuucgggggcuucaacuucagccagauccugcccgaccccuccaagcccagcaagcgguccuucaucgaggaccuccuguucaacaaggugacccuggccgacgccggcuucaucaagcaguacggggacugccucggcgacaucgcggcccgcgaccugaucugcgcccagaaguucaacgggcugaccguccucccgccccugcugaccgacgagaugaucgcccaguacaccagcgcccuccuggcgggcaccaucacguccggguggaccuucggcgccggcgccgcccugcagauccccuucgcgaugcagauggccuaccgguucaacgggaucggcgugacccagaacgugcucuacgagaaccagaagcugaucgccaaccaguucaacagcgccaucgggaagauccaggacucccugagcuccaccgccagcgcgcucggcaagcugcaggacgucgugaaccagaacgcccaggcccugaacacgcucgugaagcagcuguccagcaacuucggggccaucuccagcguccugaacgacauccucucccgccuggacccgcccgaggccgaggugcagaucgaccggcugaucaccggccgccuccagagccugcagaccuacgugacccagcagcugauccgggcggccgagauccgcgccagcgccaaccucgccgcgaccaagauguccgagugcguccugggccagagcaagcggguggacuucugcgggaagggcuaccaccugauguccuucccccagagcgcgccccacgggguggucuuccuccacgugacguacguccccgcccaggagaagaacuucaccaccgccccggccaucugccacgacggcaaggcccacuucccccgcgaggggguguucguguccaacggcacccacugguucgucacgcagcggaacuucuacgagccccagaucaucaccaccgacaacaccuucgugagcggcaacugcgacguggucaucgggaucgugaacaacacgguguacgacccccugcagccggagcuggacuccuucaaggaggagcucgacaaguacuucaagaaccacaccagccccgacgucgaccugggcgacaucuccgggaucaacgccagcguggugaacauccagaaggagaucgaccgccugaacgaggucgccaagaaccucaacgagucccugaucgaccugcaggagcucggcaaguacgagcaguacaucaaguggcccugguacaucuggcugggcuucaucgccgggcugaucgcgaucgugauggugaccaucaugcucugcugcaugaccagcugcugcuccugccugaagggcugcugcagcugcggguccugcugcaaguucgacgaggacgacagcgagccgguccugaagggcgugaagcuccacuacacgugaggacuagucccuguucccagagcccacuuuuuuuucuuuuuuugaaauaaaauagccugucuuucagaucucaaaggcucuuuucagagccaccaaaaaaaaaaaaaaaaaaaaaaaaaaaaaaaaaaaaaaaaaaaaaaaaaaaaaaaaaaaaaaaaaaaaaaaaaaaaaaaaaaaaaaaaaaaaaaaaaaaaa

SEQ ID NO: 23544 - RNA, 4094 nt, Artificial Sequence
  SARS-CoV-2/Wuhan/WIV05/2019__EPI_ISL_402128 spike protein mRNA gc (1-1273)(K986P_V987P_D614G_M1229I)
aggagagucccgcagucggcguccagcggcucugcuuguucgugugugugucguugcaggccuuauucaagcuuaccauguucguguuccugguccuccugccccuggugagcucccagugcgugaaccucaccacccgcacgcagcugccgcccgccuacaccaacagcuucacccggggcgucuacuaccccgacaagguguuccgcuccagcgugcugcacuccacccaggaccucuuccugcccuucuucagcaacgucacgugguuccacgccauccacguguccgggaccaacggcaccaagcgguucgacaacccggugcugcccuucaacgacggggucuacuucgcgagcaccgagaaguccaacaucauccgcggcuggaucuucgggacgacccucgacagcaagacccagucccugcugaucgugaacaacgccaccaacguggucaucaaggugugcgaguuccaguucugcaacgaccccuuccucggcguguacuaccacaagaacaacaagagcuggauggaguccgaguuccgggucuacagcuccgccaacaacugcacguucgaguacgugagccagcccuuccugauggaccuggagggcaagcaggggaacuucaagaaccuccgcgaguucguguucaagaacaucgacggcuacuucaagaucuacuccaagcacaccccgaucaaccugguccgggaccugccccagggguucagcgcccucgagccccugguggaccugcccaucggcaucaacaucacccgcuuccagacccuccuggcccugcaccgguccuaccucacgccgggggacagcagcuccggcuggaccgcgggcgccgccgccuacuacgugggguaccugcagccccgcaccuuccugcucaaguacaacgagaacggcaccaucacggacgcggucgacugcgcccuggacccccugagcgagaccaagugcacccucaaguccuucaccguggagaaggggaucuaccagacgagcaacuuccgggugcagcccaccgaguccaucguccgcuucccgaacaucaccaaccugugccccuucggcgagguguucaacgccacccgguucgccagcgucuacgccuggaaccgcaagcggaucuccaacugcguggcggacuacagcgugcuguacaacuccgccagcuucuccacguucaagugcuacggcgucagccccaccaagcucaacgaccugugcuucaccaacguguacgccgacuccuucgugauccgcggggacgagguccggcagaucgcccccggccagaccgggaagaucgccgacuacaacuacaagcugccggacgacuucacgggcugcgugaucgcguggaacagcaacaaccucgacuccaaggucgggggcaacuacaacuaccuguaccgccuguuccgcaagagcaaccucaagcccuucgagcgggacaucuccaccgagaucuaccaggccggcagcacccccugcaacgggguggagggcuucaacugcuacuucccccugcaguccuacggguuccagccgaccaacggcgugggguaccagcccuaccggguggucgugcugagcuucgagcuccugcacgcccccgccacggugugcggccccaagaaguccaccaaccuggucaagaacaagugcgugaacuucaacuucaacggccucaccgggaccggcgugcugaccgagagcaacaagaaguuccugccguuccagcaguucgggcgcgacaucgccgacacgaccgacgcgguccgcgacccccagacccuggagauccucgacaucacccccugcagcuucggcgggguguccgugaucacgccgggcaccaacaccagcaaccaggucgccgugcuguaccagggcgugaacugcaccgagguccccguggccauccacgccgaccagcugacgcccaccuggcggguguacuccaccgggagcaacgucuuccagacccgcgccggcugccucaucggggcggagcacgugaacaacuccuacgagugcgacauccccaucggcgccggcaucugcgccagcuaccagacgcagaccaacuccccgcggcgcgcccggagcguggcgucccagagcaucaucgccuacaccaugucccugggggccgagaacagcgucgccuacuccaacaacagcaucgccauccccaccaacuucacgaucuccgugaccaccgagauccugcccgugagcaugaccaagacgagcgucgacugcaccauguacaucugcggcgacuccaccgagugcagcaaccuccugcugcaguacggguccuucugcacccagcucaaccgcgcgcugacgggcaucgccguggagcaggacaagaacacccaggagguguucgcccaggucaagcagaucuacaagacgcccccgaucaaggacuucgggggcuucaacuucagccagauccugcccgaccccuccaagcccagcaagcgguccuucaucgaggaccuccuguucaacaaggugacccuggccgacgccggcuucaucaagcaguacggggacugccucggcgacaucgcggcccgcgaccugaucugcgcccagaaguucaacgggcugaccgugcucccgccccugcugaccgacgagaugaucgcccaguacaccagcgcccuccuggcgggcaccaucacguccggguggaccuucggcgccggcgccgcccugcagauccccuucgcgaugcagauggccuaccgguucaacgggaucggcgucacccagaacgugcucuacgagaaccagaagcugaucgccaaccaguucaacagcgccaucgggaagauccaggacucccugagcuccaccgccagcgcgcucggcaagcugcaggacguggucaaccagaacgcccaggcccugaacacgcucgugaagcagcuguccagcaacuucggggccaucuccagcgugcugaacgacauccucucccgccuggacccgcccgaggccgagguccagaucgaccggcugaucaccggccgccuccagagccugcagaccuacgugacccagcagcugauccgggcggccgagauccgcgccagcgccaaccucgccgcgaccaagauguccgagugcgugcugggccagagcaagcgggucgacuucugcgggaagggcuaccaccugauguccuucccccagagcgcgccccacggggugguguuccuccacgucacguacgugcccgcccaggagaagaacuucaccaccgccccggccaucugccacgacggcaaggcccacuucccccgcgagggggucuucguguccaacggcacccacugguucgugacgcagcggaacuucuacgagccccagaucaucaccaccgacaacaccuucgucagcggcaacugcgacguggugaucgggaucgucaacaacacgguguacgacccccugcagccggagcuggacuccuucaaggaggagcucgacaaguacuucaagaaccacaccagccccgacguggaccugggcgacaucuccgggaucaacgccagcgucgugaacauccagaaggagaucgaccgccugaacgagguggccaagaaccucaacgagucccugaucgaccugcaggagcucggcaaguacgagcaguacaucaaguggcccugguacaucuggcugggcuucaucgccgggcugaucgcgaucgucaucgugaccaucaugcucugcugcaugaccagcugcugcuccugccugaagggcugcugcagcugcggguccugcugcaaguucgacgaggacgacagcgagccggugcugaagggcgucaagcuccacuacacgugaggacuagucccuguucccagagcccacuuuuuuuucuuuuuuugaaauaaaauagccugucuuucagaucucaaaggcucuuuucagagccaccaaaaaaaaaaaaaaaaaaaaaaaaaaaaaaaaaaaaaaaaaaaaaaaaaaaaaaaaaaaaaaaaaaaaaaaaaaaaaaaaaaaaaaaaaaaaaaaaaaaaa

SEQ ID NO: 23545 - RNA, 4088 nt, Artificial Sequence
  SARS-CoV-2/Wuhan/WIV05/2019__EPI_ISL_402128 spike protein mRNA gc (1-1273)(K986P_V987P_H69del_V70del_A222V_Y453F_S477N_D614G_I692V)
aggagagucccgcagucggcguccagcggcucugcuuguucgugugugugucguugcaggccuuauucaagcuuaccauguucguguuccugguccuccugccccuggugagcucccagugcgugaaccucaccacccgcacgcagcugccgcccgccuacaccaacagcuucacccggggcgucuacuaccccgacaagguguuccgcuccagcgugcugcacuccacccaggaccucuuccugcccuucuucagcaacgucacgugguuccacgccaucuccgggaccaacggcaccaagcgguucgacaacccggugcugcccuucaacgacgggguguacuucgcgagcaccgagaaguccaacaucauccgcggcuggaucuucgggacgacccucgacagcaagacccagucccugcugaucgucaacaacgccaccaacguggugaucaaggucugcgaguuccaguucugcaacgaccccuuccucggcguguacuaccacaagaacaacaagagcuggauggaguccgaguuccggguguacagcuccgccaacaacugcacguucgaguacgucagccagcccuuccugauggaccuggagggcaagcaggggaacuucaagaaccuccgcgaguucguguucaagaacaucgacggcuacuucaagaucuacuccaagcacaccccgaucaaccuggugcgggaccugccccagggguucagcguccucgagccccugguggaccugcccaucggcaucaacaucacccgcuuccagacccuccuggcccugcaccgguccuaccucacgccgggggacagcagcuccggcuggaccgccggcgcggccgccuacuacgugggguaccugcagccccgcaccuuccugcucaaguacaacgagaacggcaccaucacggacgccgucgacugcgcgcuggacccccugagcgagaccaagugcacccucaaguccuucaccguggagaaggggaucuaccagacgagcaacuuccgggugcagcccaccgaguccaucguccgcuucccgaacaucaccaaccugugccccuucggcgagguguucaacgccacccgguucgccagcgucuacgccuggaaccgcaagcggaucuccaacugcguggccgacuacagcgugcuguacaacuccgcgagcuucuccacguucaagugcuacggcgucagccccaccaagcucaacgaccugugcuucaccaacguguacgccgacuccuucgugauccgcggggacgagguccggcagaucgcccccggccagaccgggaagaucgccgacuacaacuacaagcugccggacgacuucacgggcugcgugaucgccuggaacagcaacaaccucgacuccaaggucgggggcaacuacaacuaccuguuccgccuguuccgcaagagcaaccucaagcccuucgagcgggacaucuccaccgagaucuaccaggcgggcaacacccccugcaacgggguggagggcuucaacugcuacuucccccugcagagcuacggguuccagccgaccaacggcgugggguaccagcccuaccggguggucgugcuguccuucgagcuccugcacgcccccgccacggugugcggccccaagaaguccaccaaccuggucaagaacaagugcgugaacuucaacuucaacggccucaccgggaccggcgugcugaccgagagcaacaagaaguuccugccguuccagcaguucgggcgcgacaucgccgacacgaccgacgccguccgcgacccccagacccuggagauccucgacaucacccccugcagcuucggcggggugagcgugaucacgccgggcaccaacaccuccaaccaggucgcggugcuguaccagggcgugaacugcaccgagguccccguggccauccacgccgaccagcugacgcccaccuggcggguguacagcaccggguccaacgucuuccagacccgcgccggcugccucaucggggccgagcacgugaacaacagcuacgagugcgacauccccaucggcgcgggcaucugcgccuccuaccagacgcagaccaacagcccgcggcgcgcccgguccguggccagccaguccgucaucgcguacaccaugagccugggggccgagaacuccguggccuacagcaacaacuccaucgccauccccaccaacuucacgaucagcgugaccaccgagauccugcccgucuccaugaccaagacgagcguggacugcaccauguacaucugcggcgacagcaccgagugcuccaaccuccugcugcaguacgggagcuucugcacccagcucaaccgcgcccugacgggcaucgcgguggagcaggacaagaacacccaggaggucuucgcccaggugaagcagaucuacaagacgcccccgaucaaggacuucgggggcuucaacuucucccagauccugcccgaccccagcaagcccuccaagcggagcuucaucgaggaccuccuguucaacaaggugacccuggccgacgccggcuucaucaagcaguacggggacugccucggcgacaucgccgcgcgcgaccugaucugcgcccagaaguucaacgggcugaccguccucccgccccugcugaccgacgagaugaucgcccaguacaccuccgcccuccuggccggcaccaucacgagcggguggaccuucggcgcgggcgccgcccugcagauccccuucgccaugcagauggcguaccgguucaacgggaucggcgugacccagaacgugcucuacgagaaccagaagcugaucgccaaccaguucaacuccgccaucgggaagauccaggacagccuguccagcaccgccuccgcccucggcaagcugcaggacgucgugaaccagaacgcgcaggcccugaacacgcucgugaagcagcugagcuccaacuucggggccaucagcuccguccugaacgacauccucagccgccuggacccgcccgaggccgaggugcagaucgaccggcugaucaccggccgccuccagucccugcagaccuacgugacccagcagcugauccgggccgcggagauccgcgccagcgccaaccucgccgccaccaagaugagcgagugcguccugggccaguccaagcggguggacuucugcgggaagggcuaccaccugaugagcuucccccaguccgcgccccacgggguggucuuccuccacgugacguacguccccgcccaggagaagaacuucaccaccgccccggccaucugccacgacggcaaggcgcacuucccccgcgaggggguguucgugagcaacggcacccacugguucgucacgcagcggaacuucuacgagccccagaucaucaccaccgacaacaccuucguguccggcaacugcgacguggucaucgggaucgugaacaacacgguguacgacccccugcagccggagcuggacagcuucaaggaggagcucgacaaguacuucaagaaccacaccucccccgacgucgaccugggcgacaucagcgggaucaacgccuccguggugaacauccagaaggagaucgaccgccugaacgaggucgccaagaaccucaacgagagccugaucgaccugcaggagcucggcaaguacgagcaguacaucaaguggcccugguacaucuggcugggcuucaucgccgggcugaucgccaucgugauggugaccaucaugcucugcugcaugaccuccugcugcagcugccugaagggcugcugcuccugcgggagcugcugcaaguucgacgaggacgacuccgagccgguccugaagggcgugaagcuccacuacacgugaggacuagucccuguucccagagcccacuuuuuuuucuuuuuuugaaauaaaauagccugucuuucagaucucaaaggcucuuuucagagccaccaaaaaaaaaaaaaaaaaaaaaaaaaaaaaaaaaaaaaaaaaaaaaaaaaaaaaaaaaaaaaaaaaaaaaaaaaaaaaaaaaaaaaaaaaaaaaaaaaaaaa

SEQ ID NO: 23546 - RNA, 4088 nt, Artificial Sequence
  SARS-CoV-2/Wuhan/WIV05/2019__EPI_ISL_402128 spike protein mRNA gc (1-1273)(K986P_V987P_H69del_V70del_Y453F_D614G_I692V_M1229I)
aggagagucccgcagucggcguccagcggcucugcuuguucgugugugugucguugcaggccuuauucaagcuuaccauguucguguuccugguccuccugccccuggugagcucccagugcgugaaccucaccacccgcacgcagcugccgcccgccuacaccaacagcuucacccggggcgucuacuaccccgacaagguguuccgcuccagcgugcugcacuccacccaggaccucuuccugcccuucuucagcaacgucacgugguuccacgccaucuccgggaccaacggcaccaagcgguucgacaacccggugcugcccuucaacgacgggguguacuucgcgagcaccgagaaguccaacaucauccgcggcuggaucuucgggacgacccucgacagcaagacccagucccugcugaucgucaacaacgccaccaacguggugaucaaggucugcgaguuccaguucugcaacgaccccuuccucggcguguacuaccacaagaacaacaagagcuggauggaguccgaguuccggguguacagcuccgccaacaacugcacguucgaguacgucagccagcccuuccugauggaccuggagggcaagcaggggaacuucaagaaccuccgcgaguucguguucaagaacaucgacggcuacuucaagaucuacuccaagcacaccccgaucaaccuggugcgggaccugccccagggguucagcgcccucgagccccuggucgaccugcccaucggcaucaacaucacccgcuuccagacccuccuggcccugcaccgguccuaccucacgccgggggacagcagcuccggcuggaccgcgggcgccgccgccuacuacgugggguaccugcagccccgcaccuuccugcucaaguacaacgagaacggcaccaucacggacgcgguggacugcgcccuggacccccugagcgagaccaagugcacccucaaguccuucaccgucgagaaggggaucuaccagacgagcaacuuccgggugcagcccaccgaguccaucgugcgcuucccgaacaucaccaaccugugccccuucggcgaggucuucaacgccacccgguucgccagcguguacgccuggaaccgcaagcggaucuccaacugcgucgcggacuacagcgugcuguacaacuccgccagcuucuccacguucaagugcuacggcgugagccccaccaagcucaacgaccugugcuucaccaacgucuacgccgacuccuucgugauccgcggggacgaggugcggcagaucgcccccggccagaccgggaagaucgccgacuacaacuacaagcugccggacgacuucacgggcugcgucaucgcguggaacagcaacaaccucgacuccaaggucgggggcaacuacaacuaccuguuccgccuguuccgcaagagcaaccucaagcccuucgagcgggacaucuccaccgagaucuaccaggccggcagcacccccugcaacgggguggagggcuucaacugcuacuucccccugcaguccuacggguuccagccgaccaacggcgugggguaccagcccuaccggguggugguccugagcuucgagcuccugcacgcccccgccacggugugcggccccaagaaguccaccaaccuggugaagaacaagugcgucaacuucaacuucaacggccucaccgggaccggcgugcugaccgagagcaacaagaaguuccugccguuccagcaguucgggcgcgacaucgccgacacgaccgacgcggugcgcgacccccagacccuggagauccucgacaucacccccugcagcuucggcggggucuccgugaucacgccgggcaccaacaccagcaaccagguggccguccuguaccagggcgugaacugcaccgaggugcccgucgccauccacgccgaccagcugacgcccaccuggcggguguacuccaccgggagcaacguguuccagacccgcgccggcugccucaucggggcggagcacgucaacaacuccuacgagugcgacauccccaucggcgccggcaucugcgccagcuaccagacgcagaccaacuccccgcggcgcgcccggagcguggcgucccagagcgugaucgccuacaccaugucccugggggccgagaacagcgucgccuacuccaacaacagcaucgccauccccaccaacuucacgaucuccgugaccaccgagauccugcccgugagcaugaccaagacgagcgucgacugcaccauguacaucugcggcgacuccaccgagugcagcaaccuccugcugcaguacggguccuucugcacccagcucaaccgcgcgcugacgggcaucgccguggagcaggacaagaacacccaggagguguucgcccaggucaagcagaucuacaagacgcccccgaucaaggacuucgggggcuucaacuucagccagauccugcccgaccccuccaagcccagcaagcgguccuucaucgaggaccuccuguucaacaaggugacccuggccgacgccggcuucaucaagcaguacggggacugccucggcgacaucgcggcccgcgaccugaucugcgcccagaaguucaacgggcugaccgugcucccgccccugcugaccgacgagaugaucgcccaguacaccagcgcccuccuggcgggcaccaucacguccggguggaccuucggcgccggcgccgcccugcagauccccuucgcgaugcagauggccuaccgguucaacgggaucggcgucacccagaacgugcucuacgagaaccagaagcugaucgccaaccaguucaacagcgccaucgggaagauccaggacucccugagcuccaccgccagcgcgcucggcaagcugcaggacguggucaaccagaacgcccaggcccugaacacgcucgugaagcagcuguccagcaacuucggggccaucuccagcgugcugaacgacauccucucccgccuggacccgcccgaggccgagguccagaucgaccggcugaucaccggccgccuccagagccugcagaccuacgugacccagcagcugauccgggcggccgagauccgcgccagcgccaaccucgccgcgaccaagauguccgagugcgugcugggccagagcaagcgggucgacuucugcgggaagggcuaccaccugauguccuucccccagagcgcgccccacggggugguguuccuccacgucacguacgugcccgcccaggagaagaacuucaccaccgccccggccaucugccacgacggcaaggcccacuucccccgcgagggggucuucguguccaacggcacccacugguucgugacgcagcggaacuucuacgagccccagaucaucaccaccgacaacaccuucgucagcggcaacugcgacguggugaucgggaucgucaacaacacgguguacgacccccugcagccggagcuggacuccuucaaggaggagcucgacaaguacuucaagaaccacaccagccccgacguggaccugggcgacaucuccgggaucaacgccagcgucgugaacauccagaaggagaucgaccgccugaacgagguggccaagaaccucaacgagucccugaucgaccugcaggagcucggcaaguacgagcaguacaucaaguggcccugguacaucuggcugggcuucaucgccgggcugaucgcgaucgucaucgugaccaucaugcucugcugcaugaccagcugcugcuccugccugaagggcugcugcagcugcggguccugcugcaaguucgacgaggacgacagcgagccggugcugaagggcgucaagcuccacuacacgugaggacuagucccuguucccagagcccacuuuuuuuucuuuuuuugaaauaaaauagccugucuuucagaucucaaaggcucuuuucagagccaccaaaaaaaaaaaaaaaaaaaaaaaaaaaaaaaaaaaaaaaaaaaaaaaaaaaaaaaaaaaaaaaaaaaaaaaaaaaaaaaaaaaaaaaaaaaaaaaaaaaaa

SEQ ID NO: 23547 - RNA, 4085 nt, Artificial Sequence
  SARS-CoV-2/Wuhan/WIV05/2019__EPI_ISL_402128 spike protein mRNA gc (1-1273)(K986P_V987P_K986P_V987P_H69del_V70del_Y144del_N501Y_A570 D_D614G_P681H_T716I_S982A_D1118H)
aggagagucccgcagucggcguccagcggcucugcuuguucgugugugugucguugcaggccuuauucaagcuuaccauguucguguuccugguccuccugccccuggugagcucccagugcgugaaccucaccacccgcacgcagcugccgcccgccuacaccaacagcuucacccggggcgucuacuaccccgacaagguguuccgcuccagcgugcugcacuccacccaggaccucuuccugcccuucuucagcaacgucacgugguuccacgccaucuccgggaccaacggcaccaagcgguucgacaacccggugcugcccuucaacgacgggguguacuucgcgagcaccgagaaguccaacaucauccgcggcuggaucuucgggacgacccucgacagcaagacccagucccugcugaucgucaacaacgccaccaacguggugaucaaggucugcgaguuccaguucugcaacgaccccuuccucggcguguaccacaagaacaacaagagcuggauggaguccgaguuccggguguacagcuccgccaacaacugcacguucgaguacgucagccagcccuuccugauggaccuggagggcaagcaggggaacuucaagaaccuccgcgaguucguguucaagaacaucgacggcuacuucaagaucuacuccaagcacaccccgaucaaccuggugcgggaccugccccagggguucagcgcccucgagccccuggucgaccugcccaucggcaucaacaucacccgcuuccagacccuccuggcccugcaccgguccuaccucacgccgggggacagcagcuccggcuggaccgcgggcgccgccgccuacuacgugggguaccugcagccccgcaccuuccugcucaaguacaacgagaacggcaccaucacggacgcgguggacugcgcccuggacccccugagcgagaccaagugcacccucaaguccuucaccgucgagaaggggaucuaccagacgagcaacuuccgggugcagcccaccgaguccaucgugcgcuucccgaacaucaccaaccugugccccuucggcgaggucuucaacgccacccgguucgccagcguguacgccuggaaccgcaagcggaucuccaacugcgucgcggacuacagcgugcuguacaacuccgccagcuucuccacguucaagugcuacggcgugagccccaccaagcucaacgaccugugcuucaccaacgucuacgccgacuccuucgugauccgcggggacgaggugcggcagaucgcccccggccagaccgggaagaucgccgacuacaacuacaagcugccggacgacuucacgggcugcgucaucgcguggaacagcaacaaccucgacuccaaggucgggggcaacuacaacuaccuguaccgccuguuccgcaagagcaaccucaagcccuucgagcgggacaucuccaccgagaucuaccaggccggcagcacccccugcaacgggguggagggcuucaacugcuacuucccccugcaguccuacggguuccagccgaccuacggcgugggguaccagcccuaccggguggugguccugagcuucgagcuccugcacgcccccgccacggugugcggccccaagaaguccaccaaccuggugaagaacaagugcgucaacuucaacuucaacggccucaccgggaccggcgugcugaccgagagcaacaagaaguuccugccguuccagcaguucgggcgcgacaucgacgacacgaccgacgccgugcgcgacccccagacccuggagauccucgacaucacccccugcagcuucggcggggucuccgugaucacgccgggcaccaacaccagcaaccagguggcgguccuguaccagggcgugaacugcaccgaggugcccgucgccauccacgccgaccagcugacgcccaccuggcggguguacuccaccgggagcaacguguuccagacccgcgccggcugccucaucggggccgagcacgucaacaacuccuacgagugcgacauccccaucggcgcgggcaucugcgccagcuaccagacgcagaccaacucccaccggcgcgcccggagcguggccucccagagcaucaucgcguacaccaugucccugggggccgagaacagcguggccuacuccaacaacagcaucgccaucccgaucaacuucaccaucuccgucacgaccgagauccugcccgugagcaugaccaagaccagcguggacugcacgauguacaucugcggcgacuccaccgagugcagcaaccuccugcugcaguacggguccuucugcacccagcucaaccgcgcccugaccggcaucgcggucgagcaggacaagaacacgcaggagguguucgcccaggugaagcagaucuacaagaccccgcccaucaaggacuucgggggcuucaacuucagccagauccugcccgaccccuccaagcccagcaagcgguccuucaucgaggaccuccuguucaacaaggucacccuggccgacgccggcuucaucaagcaguacggggacugccucggcgacaucgccgcgcgcgaccugaucugcgcccagaaguucaacgggcugaccgugcugcccccgcuccugacggacgagaugaucgcccaguacaccagcgcccuccuggccggcaccaucaccuccggguggacguucggcgcgggcgccgcccugcagauccccuucgccaugcagauggcguaccgguucaacgggaucggcgugacccagaacguccucuacgagaaccagaagcugaucgccaaccaguucaacagcgccaucgggaagauccaggacucccugagcuccaccgccagcgcccucggcaagcugcaggacguggugaaccagaacgcgcaggcccugaacacccucgucaagcagcuguccagcaacuucggggccaucuccagcgugcugaacgacauccucgcccgccuggacccgcccgaggccgaggugcagaucgaccggcugaucacgggccgccuccagucccugcagaccuacgucacccagcagcugauccgggcggccgagauccgcgccagcgccaaccucgccgcgaccaagaugagcgagugcgugcugggccaguccaagcggguggacuucugcgggaagggcuaccaccugaugagcuucccccaguccgcgccccacggggucguguuccuccacgugaccuacguccccgcccaggagaagaacuucacgaccgcccccgccaucugccacgacggcaaggcccacuucccgcgcgaggggguguucgucagcaacggcacccacugguucgugacccagcggaacuucuacgagccccagaucaucacgacccacaacaccuucguguccggcaacugcgacgucgugaucgggaucgugaacaacaccgucuacgacccccugcagcccgagcuggacagcuucaaggaggagcucgacaaguacuucaagaaccacacguccccggacguggaccugggcgacaucagcgggaucaacgccuccguggucaacauccagaaggagaucgaccgccugaacgagguggccaagaaccucaacgagagccugaucgaccugcaggagcucggcaaguacgagcaguacaucaaguggcccugguacaucuggcugggcuucaucgccgggcugaucgcgaucgugauggucaccaucaugcucugcugcaugaccuccugcugcagcugccugaagggcugcugcuccugcgggagcugcugcaaguucgacgaggacgacuccgagcccgugcugaagggcgugaagcuccacuacaccugaggacuagucccuguucccagagcccacuuuuuuuucuuuuuuugaaauaaaauagccugucuuucagaucucaaaggcucuuuucagagccaccaaaaaaaaaaaaaaaaaaaaaaaaaaaaaaaaaaaaaaaaaaaaaaaaaaaaaaaaaaaaaaaaaaaaaaaaaaaaaaaaaaaaaaaaaaaaaaaaaaaaa

SEQ ID NO: 23548 - RNA, 4094 nt, Artificial Sequence
  SARS-CoV-2/Wuhan/WIV05/2019__EPI_ISL_402128 spike protein mRNA gc (1-1273)(K986P_V987P_K986P_V987P_K417N_E484K_N501Y_D614G)
aggagagucccgcagucggcguccagcggcucugcuuguucgugugugugucguugcaggccuuauucaagcuuaccauguucguguuccugguccuccugccccuggugagcucccagugcgugaaccucaccacccgcacgcagcugccgcccgccuacaccaacagcuucacccggggcgucuacuaccccgacaagguguuccgcuccagcgugcugcacuccacccaggaccucuuccugcccuucuucagcaacgucacgugguuccacgccauccacguguccgggaccaacggcaccaagcgguucgacaacccggugcugcccuucaacgacggggucuacuucgcgagcaccgagaaguccaacaucauccgcggcuggaucuucgggacgacccucgacagcaagacccagucccugcugaucgugaacaacgccaccaacguggucaucaaggugugcgaguuccaguucugcaacgaccccuuccucggcguguacuaccacaagaacaacaagagcuggauggaguccgaguuccgggucuacagcuccgccaacaacugcacguucgaguacgugagccagcccuuccugauggaccuggagggcaagcaggggaacuucaagaaccuccgcgaguucguguucaagaacaucgacggcuacuucaagaucuacuccaagcacaccccgaucaaccugguccgggaccugccccagggguucagcgcccucgagccccugguggaccugcccaucggcaucaacaucacccgcuuccagacccuccuggcccugcaccgguccuaccucacgccgggggacagcagcuccggcuggaccgcgggcgccgccgccuacuacgugggguaccugcagccccgcaccuuccugcucaaguacaacgagaacggcaccaucacggacgcggucgacugcgcccuggacccccugagcgagaccaagugcacccucaaguccuucaccguggagaaggggaucuaccagacgagcaacuuccgggugcagcccaccgaguccaucguccgcuucccgaacaucaccaaccugugccccuucggcgagguguucaacgccacccgguucgccagcgucuacgccuggaaccgcaagcggaucuccaacugcguggcggacuacagcgugcuguacaacuccgccagcuucuccacguucaagugcuacggcgucagccccaccaagcucaacgaccugugcuucaccaacguguacgccgacuccuucgugauccgcggggacgagguccggcagaucgcccccggccagaccgggaacaucgccgacuacaacuacaagcugccggacgacuucacgggcugcgugaucgcguggaacagcaacaaccucgacuccaaggucgggggcaacuacaacuaccuguaccgccuguuccgcaagagcaaccucaagcccuucgagcgggacaucuccaccgagaucuaccaggccggcagcacccccugcaacggggugaagggcuucaacugcuacuucccccugcaguccuacggguuccagccgaccuacggcgugggguaccagcccuaccggguggucgugcugagcuucgagcuccugcacgcccccgccacggugugcggccccaagaaguccaccaaccuggucaagaacaagugcgugaacuucaacuucaacggccucaccgggaccggcgugcugaccgagagcaacaagaaguuccugccguuccagcaguucgggcgcgacaucgccgacacgaccgacgcgguccgcgacccccagacccuggagauccucgacaucacccccugcagcuucggcgggguguccgugaucacgccgggcaccaacaccagcaaccaggucgccgugcuguaccagggcgugaacugcaccgagguccccguggccauccacgccgaccagcugacgcccaccuggcggguguacuccaccgggagcaacgucuuccagacccgcgccggcugccucaucggggcggagcacgugaacaacuccuacgagugcgacauccccaucggcgccggcaucugcgccagcuaccagacgcagaccaacuccccgcggcgcgcccggagcguggcgucccagagcaucaucgccuacaccaugucccugggggccgagaacagcgucgccuacuccaacaacagcaucgccauccccaccaacuucacgaucuccgugaccaccgagauccugcccgugagcaugaccaagacgagcgucgacugcaccauguacaucugcggcgacuccaccgagugcagcaaccuccugcugcaguacggguccuucugcacccagcucaaccgcgcgcugacgggcaucgccguggagcaggacaagaacacccaggagguguucgcccaggucaagcagaucuacaagacgcccccgaucaaggacuucgggggcuucaacuucagccagauccugcccgaccccuccaagcccagcaagcgguccuucaucgaggaccuccuguucaacaaggugacccuggccgacgccggcuucaucaagcaguacggggacugccucggcgacaucgcggcccgcgaccugaucugcgcccagaaguucaacgggcugaccgugcucccgccccugcugaccgacgagaugaucgcccaguacaccagcgcccuccuggcgggcaccaucacguccggguggaccuucggcgccggcgccgcccugcagauccccuucgcgaugcagauggccuaccgguucaacgggaucggcgucacccagaacgugcucuacgagaaccagaagcugaucgccaaccaguucaacagcgccaucgggaagauccaggacucccugagcuccaccgccagcgcgcucggcaagcugcaggacguggucaaccagaacgcccaggcccugaacacgcucgugaagcagcuguccagcaacuucggggccaucuccagcgugcugaacgacauccucucccgccuggacccgcccgaggccgagguccagaucgaccggcugaucaccggccgccuccagagccugcagaccuacgugacccagcagcugauccgggcggccgagauccgcgccagcgccaaccucgccgcgaccaagauguccgagugcgugcugggccagagcaagcgggucgacuucugcgggaagggcuaccaccugauguccuucccccagagcgcgccccacggggugguguuccuccacgucacguacgugcccgcccaggagaagaacuucaccaccgccccggccaucugccacgacggcaaggcccacuucccccgcgagggggucuucguguccaacggcacccacugguucgugacgcagcggaacuucuacgagccccagaucaucaccaccgacaacaccuucgucagcggcaacugcgacguggugaucgggaucgucaacaacacgguguacgacccccugcagccggagcuggacuccuucaaggaggagcucgacaaguacuucaagaaccacaccagccccgacguggaccugggcgacaucuccgggaucaacgccagcgucgugaacauccagaaggagaucgaccgccugaacgagguggccaagaaccucaacgagucccugaucgaccugcaggagcucggcaaguacgagcaguacaucaaguggcccugguacaucuggcugggcuucaucgccgggcugaucgcgaucgucauggugaccaucaugcucugcugcaugaccagcugcugcuccugccugaagggcugcugcagcugcggguccugcugcaaguucgacgaggacgacagcgagccggugcugaagggcgucaagcuccacuacacgugaggacuagucccuguucccagagcccacuuuuuuuucuuuuuuugaaauaaaauagccugucuuucagaucucaaaggcucuuuucagagccaccaaaaaaaaaaaaaaaaaaaaaaaaaaaaaaaaaaaaaaaaaaaaaaaaaaaaaaaaaaaaaaaaaaaaaaaaaaaaaaaaaaaaaaaaaaaaaaaaaaaaa

SEQ ID NO: 23549 - RNA, 4085 nt, Artificial Sequence
  SARS-CoV-2/Wuhan/WIV05/2019__EPI_ISL_402128 spike protein mRNA gc (1-1273)(K986P_V987P_K986P_V987P_L18F_D80A_D215G_L242del_A243del_ L244del_R246I_K417N_E484K_N501Y_D614G_A701V)
aggagagucccgcagucggcguccagcggcucugcuuguucgugugugugucguugcaggccuuauucaagcuuaccauguucguguuccugguccuccugccccuggugagcucccagugcgugaacuucaccacccgcacgcagcucccgcccgccuacaccaacagcuucacccggggcgucuacuaccccgacaagguguuccgcuccagcgugcugcacuccacccaggaccuguuccuccccuucuucagcaacgucacgugguuccacgccauccacguguccgggaccaacggcaccaagcgguucgcgaacccggugcugcccuucaacgacggggucuacuucgccagcaccgagaaguccaacaucauccgcggcuggaucuucgggacgacccuggacagcaagacccagucccuccugaucgugaacaacgccaccaacguggucaucaaggugugcgaguuccaguucugcaacgaccccuuccugggcguguacuaccacaagaacaacaagagcuggauggaguccgaguuccgggucuacagcuccgccaacaacugcacguucgaguacgugagccagcccuuccucauggaccuggagggcaagcaggggaacuucaagaaccugcgcgaguucguguucaagaacaucgacggcuacuucaagaucuacuccaagcacaccccgaucaaccucguccgggggcugccccagggcuucagcgcccuggagccccucguggaccugcccaucgggaucaacaucacccgcuuccagacccugcacaucuccuaccucacgccgggcgacagcagcuccggcuggaccgcgggggccgccgccuacuacgugggcuaccugcagccccggaccuuccugcucaaguacaacgagaacgggaccaucacggacgcggucgacugcgcccuggacccccugagcgagaccaagugcacccucaaguccuucaccguggagaagggcaucuaccagacgagcaacuuccgcgugcagcccaccgaguccaucguccgguucccgaacaucaccaaccugugccccuucggcgagguguucaacgccacccgcuucgccagcgucuacgccuggaaccggaagcgcaucuccaacugcguggcggacuacagcgugcuguacaacuccgccagcuucuccacguucaagugcuacggggucagccccaccaagcucaacgaccugugcuucaccaacguguacgccgacuccuucgugauccggggcgacgagguccgccagaucgcccccgggcagaccggcaacaucgccgacuacaacuacaagcugccggacgacuucacggggugcgugaucgcguggaacagcaacaaccucgacuccaaggugggcggcaacuacaacuaccuguaccggcuguuccgcaagagcaaccucaagcccuucgagcgggacaucuccaccgagaucuaccaggccgggagcacccccugcaacggcgucaagggguucaacugcuacuucccccugcaguccuacggcuuccagccgaccuacggggugggcuaccagcccuaccgcguggucgugcugagcuucgagcuccugcacgcccccgccacggugugcggccccaagaaguccaccaaccuggucaagaacaagugcgugaacuucaacuucaacgggcucaccggcaccggggugcugaccgagagcaacaagaaguuccugccguuccagcaguucggccgggacaucgccgacacgaccgacgcgguccgcgacccccagacccucgagauccuggacaucacccccugcagcuucgggggcguguccgugaucacgccgggcaccaacaccagcaaccaggucgccgugcuguaccagggggugaacugcaccgagguccccguggccauccacgccgaccagcugacgcccaccuggcgcguguacuccaccggcagcaacgucuuccagacccgggccgggugccucaucggcgcggagcacgugaacaacuccuacgagugcgacauccccaucggcgccgggaucugcgccagcuaccagacgcagaccaacuccccgcgccgggcccgcagcguggcgucccagagcaucaucgccuacaccaugucccugggcgucgagaacagcguggccuacuccaacaacagcaucgccauccccaccaacuucacgaucuccgugaccaccgagauccugcccgucagcaugaccaagacgagcguggacugcaccauguacaucugcggggacuccaccgagugcagcaaccuccugcugcaguacggcuccuucugcacccagcucaaccgggcccugacggggaucgcgguggagcaggacaagaacacccaggaggucuucgcccaggugaagcagaucuacaagacgcccccgaucaaggacuucggcggcuucaacuucagccagauccugcccgaccccuccaagcccagcaagcgcuccuucaucgaggaccuccuguucaacaaggugacccuggccgacgccggguucaucaagcaguacggcgacugccucggggacaucgccgcgcgggaccugaucugcgcccagaaguucaacggccugaccguccucccgccccugcugaccgacgagaugaucgcccaguacaccagcgcccuccuggccgggaccaucacguccggcuggaccuucggcgcgggggccgcccugcagauccccuucgccaugcagauggcguaccgcuucaacggcaucggggugacccagaacgugcucuacgagaaccagaagcugaucgccaaccaguucaacagcgccaucggcaagauccaggacucccugagcuccaccgccagcgcccucgggaagcugcaggacgucgugaaccagaacgcgcaggcccugaacacgcucgugaagcagcuguccagcaacuucggcgccaucuccagcguccugaacgacauccucucccggcuggacccgcccgaggccgaggugcagaucgaccgccugaucaccggccggcuccagagccugcagaccuacgugacccagcagcugauccgcgccgcggagauccgggccagcgccaaccucgccgccaccaagauguccgagugcguccuggggcagagcaagcgcguggacuucugcggcaagggguaccaccugauguccuucccccagagcgcgccccacggcguggucuuccuccacgugacguacguccccgcccaggagaagaacuucaccaccgccccggccaucugccacgacgggaaggcgcacuucccccgggagggcguguucguguccaacggcacccacugguucgucacgcagcgcaacuucuacgagccccagaucaucaccaccgacaacaccuucgugagcgggaacugcgacguggucaucggcaucgugaacaacacgguguacgacccccugcagccggagcuggacuccuucaaggaggagcucgacaaguacuucaagaaccacaccagccccgacgucgaccugggggacaucuccggcaucaacgccagcguggugaacauccagaaggagaucgaccggcugaacgaggucgccaagaaccucaacgagucccugaucgaccugcaggagcucggcaaguacgagcaguacaucaaguggcccugguacaucuggcugggguucaucgccggccugaucgccaucgugauggugaccaucaugcucugcugcaugaccagcugcugcuccugccugaaggggugcugcagcugcggcuccugcugcaaguucgacgaggacgacagcgagccgguccugaagggggugaagcuccacuacacgugaggacuagucccuguucccagagcccacuuuuuuuucuuuuuuugaaauaaaauagccugucuuucagaucucaaaggcucuuuucagagccaccaaaaaaaaaaaaaaaaaaaaaaaaaaaaaaaaaaaaaaaaaaaaaaaaaaaaaaaaaaaaaaaaaaaaaaaaaaaaaaaaaaaaaaaaaaaaaaaaaaaaa

SEQ ID NO: 23550 - RNA, 4094 nt, Artificial Sequence
  SARS-CoV-2/Wuhan/WIV05/2019__EPI_ISL_402128 spike protein mRNA gc (1-1273)(K986P_V987P_K986P_V987P_E484K_D614G)
aggagagucccgcagucggcguccagcggcucugcuuguucgugugugugucguugcaggccuuauucaagcuuaccauguucguguuccugguccuccugccccuggugagcucccagugcgugaaccucaccacccgcacgcagcugccgcccgccuacaccaacagcuucacccggggcgucuacuaccccgacaagguguuccgcuccagcgugcugcacuccacccaggaccucuuccugcccuucuucagcaacgucacgugguuccacgccauccacguguccgggaccaacggcaccaagcgguucgacaacccggugcugcccuucaacgacggggucuacuucgcgagcaccgagaaguccaacaucauccgcggcuggaucuucgggacgacccucgacagcaagacccagucccugcugaucgugaacaacgccaccaacguggucaucaaggugugcgaguuccaguucugcaacgaccccuuccucggcguguacuaccacaagaacaacaagagcuggauggaguccgaguuccgggucuacagcuccgccaacaacugcacguucgaguacgugagccagcccuuccugauggaccuggagggcaagcaggggaacuucaagaaccuccgcgaguucguguucaagaacaucgacggcuacuucaagaucuacuccaagcacaccccgaucaaccugguccgggaccugccccagggguucagcgcccucgagccccugguggaccugcccaucggcaucaacaucacccgcuuccagacccuccuggcccugcaccgguccuaccucacgccgggggacagcagcuccggcuggaccgcgggcgccgccgccuacuacgugggguaccugcagccccgcaccuuccugcucaaguacaacgagaacggcaccaucacggacgcggucgacugcgcccuggacccccugagcgagaccaagugcacccucaaguccuucaccguggagaaggggaucuaccagacgagcaacuuccgggugcagcccaccgaguccaucguccgcuucccgaacaucaccaaccugugccccuucggcgagguguucaacgccacccgguucgccagcgucuacgccuggaaccgcaagcggaucuccaacugcguggcggacuacagcgugcuguacaacuccgccagcuucuccacguucaagugcuacggcgucagccccaccaagcucaacgaccugugcuucaccaacguguacgccgacuccuucgugauccgcggggacgagguccggcagaucgcccccggccagaccgggaagaucgccgacuacaacuacaagcugccggacgacuucacgggcugcgugaucgcguggaacagcaacaaccucgacuccaaggucgggggcaacuacaacuaccuguaccgccuguuccgcaagagcaaccucaagcccuucgagcgggacaucuccaccgagaucuaccaggccggcagcacccccugcaacggggugaagggcuucaacugcuacuucccccugcaguccuacggguuccagccgaccaacggcgugggguaccagcccuaccggguggucgugcugagcuucgagcuccugcacgcccccgccacggugugcggccccaagaaguccaccaaccuggucaagaacaagugcgugaacuucaacuucaacggccucaccgggaccggcgugcugaccgagagcaacaagaaguuccugccguuccagcaguucgggcgcgacaucgccgacacgaccgacgcgguccgcgacccccagacccuggagauccucgacaucacccccugcagcuucggcgggguguccgugaucacgccgggcaccaacaccagcaaccaggucgccgugcuguaccagggcgugaacugcaccgagguccccguggccauccacgccgaccagcugacgcccaccuggcggguguacuccaccgggagcaacgucuuccagacccgcgccggcugccucaucggggcggagcacgugaacaacuccuacgagugcgacauccccaucggcgccggcaucugcgccagcuaccagacgcagaccaacuccccgcggcgcgcccggagcguggcgucccagagcaucaucgccuacaccaugucccugggggccgagaacagcgucgccuacuccaacaacagcaucgccauccccaccaacuucacgaucuccgugaccaccgagauccugcccgugagcaugaccaagacgagcgucgacugcaccauguacaucugcggcgacuccaccgagugcagcaaccuccugcugcaguacggguccuucugcacccagcucaaccgcgcgcugacgggcaucgccguggagcaggacaagaacacccaggagguguucgcccaggucaagcagaucuacaagacgcccccgaucaaggacuucgggggcuucaacuucagccagauccugcccgaccccuccaagcccagcaagcgguccuucaucgaggaccuccuguucaacaaggugacccuggccgacgccggcuucaucaagcaguacggggacugccucggcgacaucgcggcccgcgaccugaucugcgcccagaaguucaacgggcugaccgugcucccgccccugcugaccgacgagaugaucgcccaguacaccagcgcccuccuggcgggcaccaucacguccggguggaccuucggcgccggcgccgcccugcagauccccuucgcgaugcagauggccuaccgguucaacgggaucggcgucacccagaacgugcucuacgagaaccagaagcugaucgccaaccaguucaacagcgccaucgggaagauccaggacucccugagcuccaccgccagcgcgcucggcaagcugcaggacguggucaaccagaacgcccaggcccugaacacgcucgugaagcagcuguccagcaacuucggggccaucuccagcgugcugaacgacauccucucccgccuggacccgcccgaggccgagguccagaucgaccggcugaucaccggccgccuccagagccugcagaccuacgugacccagcagcugauccgggcggccgagauccgcgccagcgccaaccucgccgcgaccaagauguccgagugcgugcugggccagagcaagcgggucgacuucugcgggaagggcuaccaccugauguccuucccccagagcgcgccccacggggugguguuccuccacgucacguacgugcccgcccaggagaagaacuucaccaccgccccggccaucugccacgacggcaaggcccacuucccccgcgagggggucuucguguccaacggcacccacugguucgugacgcagcggaacuucuacgagccccagaucaucaccaccgacaacaccuucgucagcggcaacugcgacguggugaucgggaucgucaacaacacgguguacgacccccugcagccggagcuggacuccuucaaggaggagcucgacaaguacuucaagaaccacaccagccccgacguggaccugggcgacaucuccgggaucaacgccagcgucgugaacauccagaaggagaucgaccgccugaacgagguggccaagaaccucaacgagucccugaucgaccugcaggagcucggcaaguacgagcaguacaucaaguggcccugguacaucuggcugggcuucaucgccgggcugaucgcgaucgucauggugaccaucaugcucugcugcaugaccagcugcugcuccugccugaagggcugcugcagcugcggguccugcugcaaguucgacgaggacgacagcgagccggugcugaagggcgucaagcuccacuacacgugaggacuagucccuguucccagagcccacuuuuuuuucuuuuuuugaaauaaaauagccugucuuucagaucucaaaggcucuuuucagagccaccaaaaaaaaaaaaaaaaaaaaaaaaaaaaaaaaaaaaaaaaaaaaaaaaaaaaaaaaaaaaaaaaaaaaaaaaaaaaaaaaaaaaaaaaaaaaaaaaaaaaa

SEQ ID NO: 23551 - RNA, 4094 nt, Artificial Sequence
  SARS-CoV-2/Wuhan/WIV05/2019__EPI_ISL_402128 spike protein mRNA gc (1-1273)(K986P_V987P_K986P_V987P_L18F_T20N_P26S_D138Y_R190S_K417T _E484K_N501Y_D614G_H655Y_T1027I)
aggagagucccgcagucggcguccagcggcucugcuuguucgugugugugucguugcaggccuuauucaagcuuaccauguucguguuccugguccuccugccccuggugagcucccagugcgugaacuucaccaaccgcacccagcucccgagcgccuacacgaacuccuucacccggggcgucuacuaccccgacaagguguuccgcagcuccgugcugcacagcacccaggaccuguuccuccccuucuucuccaacgucaccugguuccacgccauccacgugagcgggacgaacggcaccaagcgguucgacaaccccgugcugccguucaacgacggggucuacuucgcguccaccgagaaguccaacaucauccgcggcuggaucuucgggaccacgcuggacuccaagacccagagccuccugaucgugaacaacgccaccaacguggucaucaaggugugcgaguuccaguucugcaacuaccccuuccugggcguguacuaccacaagaacaacaaguccuggauggagagcgaguuccgggucuacuccagcgccaacaacugcaccuucgaguacgugucccagcccuuccucauggaccuggagggcaagcaggggaacuucaagaaccugagcgaguucguguucaagaacaucgacggcuacuucaagaucuacuccaagcacacgcccaucaaccucguccgcgaccugccgcagggguucagcgcccuggagccccucguggaccugcccaucggcaucaacaucacccgguuccagacccugcucgcccugcaccgcagcuaccugacccccggggacuccagcuccggcuggacggcgggcgccgccgccuacuacgugggguaccuccagccgcggaccuuccugcugaaguacaacgagaacggcaccaucaccgacgcggucgacugcgcccucgacccccugagcgagacgaagugcacccugaaguccuucaccguggagaaggggaucuaccagaccagcaacuuccgcgugcagcccacggaguccaucguccgguuccccaacaucaccaaccucugcccguucggcgagguguucaacgccacccgcuucgccagcgucuacgccuggaaccggaagcgcaucuccaacugcguggcggacuacagcgugcuguacaacuccgccagcuucuccaccuucaagugcuacggcgucagccccacgaagcugaacgaccucugcuucaccaacguguacgccgacuccuucgugauccgcggggacgagguccggcagaucgcccccggccagaccgggaccaucgccgacuacaacuacaagcugcccgacgacuucacgggcugcgugaucgcguggaacagcaacaaccuggacuccaaggucgggggcaacuacaacuaccucuaccggcuguuccgcaagagcaaccugaagccguucgagcgggacaucuccaccgagaucuaccaggccggcagcacccccugcaacggggugaagggcuucaacugcuacuucccccuccagagcuacggguuccagcccaccuacggcgugggguaccagccguaccgcguggucgugcuguccuucgagcugcuccacgcccccgccacggugugcggccccaagaaguccaccaaccuggucaagaacaagugcgugaacuucaacuucaacggccugaccgggaccggcgugcucaccgagagcaacaagaaguuccugcccuuccagcaguucgggcgggacaucgccgacacgaccgacgcgguccgcgacccgcagacccuggagauccuggacaucacccccugcagcuucggcgggguguccgugaucacgcccggcaccaacaccagcaaccaggucgccgugcucuaccagggcgugaacugcaccgaggucccgguggccauccacgccgaccagcugacgcccaccuggcgcguguacuccaccgggagcaacgucuuccagacccgggccggcugccugaucggggcggaguacgugaacaacuccuacgagugcgacauccccaucggcgccggcaucugcgccagcuaccagacgcagaccaacagcccccgccgggcccgcagcguggcgucccagagcaucaucgccuacaccaugucccucggggccgagaacagcgucgccuacuccaacaacagcaucgccaucccgaccaacuucacgaucagcgugaccaccgagauccugcccguguccaugaccaagacgagcgucgacugcaccauguacaucugcggcgacuccaccgagugcagcaaccugcuccugcaguacggguccuucugcacccagcugaaccgggcgcucacgggcaucgccguggagcaggacaagaacacccaggagguguucgcccaggucaagcagaucuacaagaccccgcccaucaaggacuucgggggcuucaacuucagccagauccugcccgaccccuccaagcccagcaagcgcuccuucaucgaggaccuccuguucaacaaggugacccuggccgacgccggcuucaucaagcaguacggggacugccugggcgacaucgcggcccgggaccucaucugcgcccagaaguucaacgggcugacggugcugcccccgcuccugaccgacgagaugaucgcccaguacaccagcgcccugcucgcgggcaccaucacguccggguggaccuucggcgccggcgccgcccugcagauccccuucgcgaugcagauggccuaccgcuucaacgggaucggcgucacccagaacgugcuguacgagaaccagaagcucaucgccaaccaguucaacagcgccaucgggaagauccaggacucccugagcuccaccgccagcgcgcugggcaagcuccaggacguggucaaccagaacgcccaggcccugaacacgcuggugaagcagcucuccagcaacuucggggccaucuccagcgugcugaacgacauccugagccggcucgacccgcccgaggccgagguccagaucgaccgccugaucaccggccggcugcagucccuccagaccuacgugacccagcagcugauccgcgcggccgagauccgggccagcgccaaccuggccgcgaucaagauguccgagugcgugcucggccagagcaagcgcgucgacuucugcgggaagggcuaccaccugauguccuucccccagagcgcgccccacggggugguguuccugcacgucaccuacgugcccgcccaggagaagaacuucacgaccgcccccgccaucugccacgacggcaaggcccacuucccgcgggagggggucuucguguccaacggcacccacugguucgugacccagcgcaacuucuacgagccccagaucaucacgaccgacaacaccuucgucagcggcaacugcgacguggugaucgggaucgucaacaacaccguguacgacccccuccagcccgagcuggacuccuucaaggaggagcuggacaaguacuucaagaaccacacgagcccggacguggaccucggcgacaucuccgggaucaacgccagcgucgugaacauccagaaggagaucgaccggcugaacgagguggccaagaaccugaacgagucccucaucgaccugcaggagcugggcaaguacgagcaguacaucaaguggcccugguacaucuggcucggcuucaucgccgggcugaucgcgaucgucauggugaccaucaugcugugcugcaugaccagcugcugcuccugccucaagggcugcugcagcugcggguccugcugcaaguucgacgaggacgacagcgagcccgugcugaagggcgucaagcugcacuacaccugaggacuagucccuguucccagagcccacuuuuuuuucuuuuuuugaaauaaaauagccugucuuucagaucucaaaggcucuuuucagagccaccaaaaaaaaaaaaaaaaaaaaaaaaaaaaaaaaaaaaaaaaaaaaaaaaaaaaaaaaaaaaaaaaaaaaaaaaaaaaaaaaaaaaaaaaaaaaaaaaaaaaa

SEQ ID NO: 23552 - RNA, 4094 nt, Artificial Sequence
  SARS-CoV-2/Wuhan/WIV05/2019__EPI_ISL_402128 spike protein mRNA gc (1-1273)(K986P_V987P_K986P_V987P_S13I_W152C_L452R_D614G)
aggagagucccgcagucggcguccagcggcucugcuuguucgugugugugucguugcaggccuuauucaagcuuaccauguucguguuccugguccuccugccccuggugagcauccagugcgugaaccucaccacccgcacgcagcugccgcccgccuacaccaacuccuucacccggggcgucuacuaccccgacaagguguuccgcagcuccgugcugcacagcacccaggaccucuuccugcccuucuucuccaacgucacgugguuccacgccauccacgugagcgggaccaacggcaccaagcgguucgacaacccggugcugcccuucaacgacggggucuacuucgcguccaccgagaaguccaacaucauccgcggcuggaucuucgggacgacccucgacagcaagacccagagccugcugaucgugaacaacgccaccaacguggucaucaaggugugcgaguuccaguucugcaacgaccccuuccucggcguguacuaccacaagaacaacaaguccugcauggagagcgaguuccgggucuacuccagcgccaacaacugcacguucgaguacgugucccagcccuuccugauggaccuggagggcaagcaggggaacuucaagaaccuccgcgaguucguguucaagaacaucgacggcuacuucaagaucuacagcaagcacaccccgaucaaccugguccgggaccugccccagggguucuccgcccucgagccccugguggaccugcccaucggcaucaacaucacccgcuuccagacccuccuggcccugcaccggagcuaccucacgccgggggacuccagcagcggcuggaccgcgggcgccgccgccuacuacgugggguaccugcagccccgcaccuuccugcucaaguacaacgagaacggcaccaucacggacgcggucgacugcgcccuggacccccuguccgagaccaagugcacccucaagagcuucaccguggagaaggggaucuaccagacguccaacuuccgggugcagcccaccgagagcaucguccgcuucccgaacaucaccaaccugugccccuucggcgagguguucaacgccacccgguucgccuccgucuacgccuggaaccgcaagcggaucagcaacugcguggcggacuacuccgugcuguacaacagcgccuccuucagcacguucaagugcuacggcgucucccccaccaagcucaacgaccugugcuucaccaacguguacgccgacagcuucgugauccgcggggacgagguccggcagaucgcccccggccagaccgggaagaucgccgacuacaacuacaagcugccggacgacuucacgggcugcgugaucgcguggaacuccaacaaccucgacagcaaggucgggggcaacuacaacuaccgcuaccggcuguuccgcaaguccaaccugaagcccuucgagcgggacaucagcaccgagaucuaccaggccggcuccacccccugcaacgggguggagggcuucaacugcuacuucccccuccagagcuacggguuccagccgaccaacggcgugggguaccagcccuaccgcguggucgugcuguccuucgagcugcuccacgcccccgccacggugugcggccccaagaaguccaccaaccuggucaagaacaagugcgugaacuucaacuucaacggccugaccgggaccggcgugcucaccgagagcaacaagaaguuccugccguuccagcaguucgggcgcgacaucgccgacacgaccgacgcgguccgggacccccagacccuggagauccuggacaucacccccugcagcuucggcggggugagcgugaucacgccgggcaccaacaccuccaaccaggucgccgugcucuaccagggcgugaacugcaccgagguccccguggccauccacgccgaccagcugacgcccaccuggcgcguguacagcaccggguccaacgucuuccagacccgggccggcugccugaucggggcggagcacgugaacaacagcuacgagugcgacauccccaucggcgccggcaucugcgccuccuaccagacgcagaccaacagcccgcgccgggcccgcuccguggcgagccaguccaucaucgccuacaccaugagccucggggccgagaacuccgucgccuacagcaacaacuccaucgccauccccaccaacuucacgaucagcgugaccaccgagauccugcccguguccaugaccaagacgagcgucgacugcaccauguacaucugcggcgacagcaccgagugcuccaaccugcuccugcaguacgggagcuucugcacccagcugaaccgggcgcucacgggcaucgccguggagcaggacaagaacacccaggagguguucgcccaggucaagcagaucuacaagacgcccccgaucaaggacuucgggggcuucaacuucucccagauccugcccgaccccagcaagcccuccaagcgcagcuucaucgaggaccuccuguucaacaaggugacccuggccgacgccggcuucaucaagcaguacggggacugccugggcgacaucgcggcccgggaccucaucugcgcccagaaguucaacgggcugaccgugcugccgccccuccugaccgacgagaugaucgcccaguacaccuccgcccugcucgcgggcaccaucacgagcggguggaccuucggcgccggcgccgcccugcagauccccuucgcgaugcagauggccuaccgcuucaacgggaucggcgucacccagaacgugcuguacgagaaccagaagcucaucgccaaccaguucaacuccgccaucgggaagauccaggacagccuguccagcaccgccuccgcgcugggcaagcuccaggacguggucaaccagaacgcccaggcccugaacacgcuggugaagcagcucagcuccaacuucggggccaucagcuccgugcugaacgacauccugagccggcucgacccgcccgaggccgagguccagaucgaccgccugaucaccggccggcugcagucccuccagaccuacgugacccagcagcugauccgcgcggccgagauccgggccagcgccaaccuggccgcgaccaagaugagcgagugcgugcucggccaguccaagcgcgucgacuucugcgggaagggcuaccaccugaugagcuucccccaguccgcgccccacggggugguguuccugcacgucacguacgugcccgcccaggagaagaacuucaccaccgccccggccaucugccacgacggcaaggcccacuucccccgggagggggucuucgugagcaacggcacccacugguucgugacgcagcgcaacuucuacgagccccagaucaucaccaccgacaacaccuucgucuccggcaacugcgacguggugaucgggaucgucaacaacacgguguacgacccccuccagccggagcuggacagcuucaaggaggagcuggacaaguacuucaagaaccacaccucccccgacguggaccucggcgacaucagcgggaucaacgccuccgucgugaacauccagaaggagaucgaccggcugaacgagguggccaagaaccugaacgagagccucaucgaccugcaggagcugggcaaguacgagcaguacaucaaguggcccugguacaucuggcucggcuucaucgccgggcugaucgcgaucgucauggugaccaucaugcugugcugcaugaccuccugcugcagcugccucaagggcugcugcuccugcgggagcugcugcaaguucgacgaggacgacuccgagccggugcugaagggcgucaagcugcacuacacgugaggacuagucccuguucccagagcccacuuuuuuuucuuuuuuugaaauaaaauagccugucuuucagaucucaaaggcucuuuucagagccaccaaaaaaaaaaaaaaaaaaaaaaaaaaaaaaaaaaaaaaaaaaaaaaaaaaaaaaaaaaaaaaaaaaaaaaaaaaaaaaaaaaaaaaaaaaaaaaaaaaaaa

SEQ ID NO: 23553 - RNA, 4094 nt, Artificial Sequence
  SARS-CoV-2/Wuhan/WIV05/2019__EPI_ISL_402128 spike protein mRNA gc (1-1273)(K986P_V987P)
aggagagucccgcagucggcguccagcggcucugcuuguucgugugugugucguugcaggccuuauucaagcuuaccauguucguguuccuggugcugcugccccuggugagcagccagugcgugaaccugaccacccggacccagcugccaccagccuacaccaacagcuucacccggggcgucuacuaccccgacaagguguuccggagcagcguccugcacagcacccaggaccuguuccugcccuucuucagcaacgugaccugguuccacgccauccacgugagcggcaccaacggcaccaagcgguucgacaaccccgugcugcccuucaacgacggcguguacuucgccagcaccgagaagagcaacaucauccggggcuggaucuucggcaccacccuggacagcaagacccagagccugcugaucgugaauaacgccaccaacguggugaucaaggugugcgaguuccaguucugcaacgaccccuuccugggcguguacuaccacaagaacaacaagagcuggauggagagcgaguuccggguguacagcagcgccaacaacugcaccuucgaguacgugagccagcccuuccugauggaccuggagggcaagcagggcaacuucaagaaccugcgggaguucguguucaagaacaucgacggcuacuucaagaucuacagcaagcacaccccaaucaaccuggugcgggaucugccccagggcuucucagcccuggagccccugguggaccugcccaucggcaucaacaucacccgguuccagacccugcuggcccugcaccggagcuaccugaccccaggcgacagcagcagcggguggacagcaggcgcggcugcuuacuacgugggcuaccugcagccccggaccuuccugcugaaguacaacgagaacggcaccaucaccgacgccguggacugcgcccuggacccucugagcgagaccaagugcacccugaagagcuucaccguggagaagggcaucuaccagaccagcaacuuccgggugcagcccaccgagagcaucgugcgguuccccaacaucaccaaccugugccccuucggcgagguguucaacgccacccgguucgccagcguguacgccuggaaccggaagcggaucagcaacugcguggccgacuacagcgugcuguacaacagcgccagcuucagcaccuucaagugcuacggcgugagccccaccaagcugaacgaccugugcuucaccaacguguacgccgacagcuucgugauccguggcgacgaggugcggcagaucgcacccggccagacaggcaagaucgccgacuacaacuacaagcugcccgacgacuucaccggcugcgugaucgccuggaacagcaacaaccucgacagcaaggugggcggcaacuacaacuaccuguaccggcuguuccggaagagcaaccugaagcccuucgagcgggacaucagcaccgagaucuaccaagccggcuccaccccuugcaacggcguggagggcuucaacugcuacuucccucugcagagcuacggcuuccagcccaccaacggcgugggcuaccagcccuaccgggugguggugcugagcuucgagcugcugcacgccccagccaccguguguggccccaagaagagcaccaaccuggugaagaacaagugcgugaacuucaacuucaacggccuuaccggcaccggcgugcugaccgagagcaacaagaaauuccugcccuuucagcaguucggccgggacaucgccgacaccaccgacgcugugcgggauccccagacccuggagauccuggacaucaccccuugcagcuucggcggcgugagcgugaucaccccaggcaccaacaccagcaaccagguggccgugcuguaccaggacgugaacugcaccgaggugcccguggccauccacgccgaccagcugacacccaccuggcgggucuacagcaccggcagcaacguguuccagacccgggccgguugccugaucggcgccgagcacgugaacaacagcuacgagugcgacauccccaucggcgccggcaucugugccagcuaccagacccagaccaauucaccccggagggcaaggagcguggccagccagagcaucaucgccuacaccaugagccugggcgccgagaacagcguggccuacagcaacaacagcaucgccauccccaccaacuucaccaucagcgugaccaccgagauucugcccgugagcaugaccaagaccagcguggacugcaccauguacaucugcggcgacagcaccgagugcagcaaccugcugcugcaguacggcagcuucugcacccagcugaaccgggcccugaccggcaucgccguggagcaggacaagaacacccaggagguguucgcccaggugaagcagaucuacaagaccccucccaucaaggacuucggcggcuucaacuucagccagauccugcccgaccccagcaagcccagcaagcggagcuucaucgaggaccugcuguucaacaaggugacccuagccgacgccggcuucaucaagcaguacggcgacugccucggcgacauagccgcccgggaccugaucugcgcccagaaguucaacggccugaccgugcugccuccccugcugaccgacgagaugaucgcccaguacaccagcgcccuguuagccggaaccaucaccagcggcuggacuuucggcgcuggagccgcucugcagauccccuucgccaugcagauggccuaccgguucaacggcaucggcgugacccagaacgugcuguacgagaaccagaagcugaucgccaaccaguucaacagcgccaucggcaagauccaggacagccugagcagcaccgcuagcgcccugggcaagcugcaggacguggugaaccagaacgcccaggcccugaacacccuggugaagcagcugagcagcaacuucggcgccaucagcagcgugcugaacgacauccugagccggcuggacccucccgaggccgaggugcagaucgaccggcugaucacuggccggcugcagagccugcagaccuacgugacccagcagcugauccgggccgccgagauucgggccagcgccaaccuggccgccaccaagaugagcgagugcgugcugggccagagcaagcggguggacuucugcggcaagggcuaccaccugaugagcuuuccccagagcgcaccccacggagugguguuccugcacgugaccuacgugcccgcccaggagaagaacuucaccaccgccccagccaucugccacgacggcaaggcccacuuuccccgggagggcguguucgugagcaacggcacccacugguucgugacccagcggaacuucuacgagccccagaucaucaccaccgacaacaccuucgugagcggcaacugcgacguggugaucggcaucgugaacaacaccguguacgauccccugcagcccgagcuggacagcuucaaggaggagcuggacaaguacuucaagaaucacaccagccccgacguggaccugggcgacaucagcggcaucaacgccagcguggugaacauccagaaggagaucgaucggcugaacgagguggccaagaaccugaacgagagccugaucgaccugcaggagcugggcaaguacgagcaguacaucaaguggcccugguacaucuggcugggcuucaucgccggccugaucgccaucgugauggugaccaucaugcugugcugcaugaccagcugcugcagcugccugaagggcuguugcagcugcggcagcugcugcaaguucgacgaggacgacagcgagcccgugcugaagggcgugaagcugcacuacaccugaggacuagucccuguucccagagcccacuuuuuuuucuuuuuuugaaauaaaauagccugucuuucagaucucaaaggcucuuuucagagccaccaaaaaaaaaaaaaaaaaaaaaaaaaaaaaaaaaaaaaaaaaaaaaaaaaaaaaaaaaaaaaaaaaaaaaaaaaaaaaaaaaaaaaaaaaaaaaaaaaaaaa

SEQ ID NO: 23554 - RNA, 4094 nt, Artificial Sequence
  SARS-CoV-2/Wuhan/WIV05/2019__EPI_ISL_402128 spike protein mRNA gc (1-1273)(K986P_V987P_ D614G)
aggagagucccgcagucggcguccagcggcucugcuuguucgugugugugucguugcaggccuuauucaagcuuaccauguucguguuccuggugcugcugccccuggugagcagccagugcgugaaccugaccacccggacccagcugccaccagccuacaccaacagcuucacccggggcgucuacuaccccgacaagguguuccggagcagcguccugcacagcacccaggaccuguuccugcccuucuucagcaacgugaccugguuccacgccauccacgugagcggcaccaacggcaccaagcgguucgacaaccccgugcugcccuucaacgacggcguguacuucgccagcaccgagaagagcaacaucauccggggcuggaucuucggcaccacccuggacagcaagacccagagccugcugaucgugaauaacgccaccaacguggugaucaaggugugcgaguuccaguucugcaacgaccccuuccugggcguguacuaccacaagaacaacaagagcuggauggagagcgaguuccggguguacagcagcgccaacaacugcaccuucgaguacgugagccagcccuuccugauggaccuggagggcaagcagggcaacuucaagaaccugcgggaguucguguucaagaacaucgacggcuacuucaagaucuacagcaagcacaccccaaucaaccuggugcgggaucugccccagggcuucucagcccuggagccccugguggaccugcccaucggcaucaacaucacccgguuccagacccugcuggcccugcaccggagcuaccugaccccaggcgacagcagcagcggguggacagcaggcgcggcugcuuacuacgugggcuaccugcagccccggaccuuccugcugaaguacaacgagaacggcaccaucaccgacgccguggacugcgcccuggacccucugagcgagaccaagugcacccugaagagcuucaccguggagaagggcaucuaccagaccagcaacuuccgggugcagcccaccgagagcaucgugcgguuccccaacaucaccaaccugugccccuucggcgagguguucaacgccacccgguucgccagcguguacgccuggaaccggaagcggaucagcaacugcguggccgacuacagcgugcuguacaacagcgccagcuucagcaccuucaagugcuacggcgugagccccaccaagcugaacgaccugugcuucaccaacguguacgccgacagcuucgugauccguggcgacgaggugcggcagaucgcacccggccagacaggcaagaucgccgacuacaacuacaagcugcccgacgacuucaccggcugcgugaucgccuggaacagcaacaaccucgacagcaaggugggcggcaacuacaacuaccuguaccggcuguuccggaagagcaaccugaagcccuucgagcgggacaucagcaccgagaucuaccaagccggcuccaccccuugcaacggcguggagggcuucaacugcuacuucccucugcagagcuacggcuuccagcccaccaacggcgugggcuaccagcccuaccgggugguggugcugagcuucgagcugcugcacgccccagccaccguguguggccccaagaagagcaccaaccuggugaagaacaagugcgugaacuucaacuucaacggccuuaccggcaccggcgugcugaccgagagcaacaagaaauuccugcccuuucagcaguucggccgggacaucgccgacaccaccgacgcugugcgggauccccagacccuggagauccuggacaucaccccuugcagcuucggcggcgugagcgugaucaccccaggcaccaacaccagcaaccagguggccgugcuguaccagggcgugaacugcaccgaggugcccguggccauccacgccgaccagcugacacccaccuggcgggucuacagcaccggcagcaacguguuccagacccgggccgguugccugaucggcgccgagcacgugaacaacagcuacgagugcgacauccccaucggcgccggcaucugugccagcuaccagacccagaccaauucaccccggagggcaaggagcguggccagccagagcaucaucgccuacaccaugagccugggcgccgagaacagcguggccuacagcaacaacagcaucgccauccccaccaacuucaccaucagcgugaccaccgagauucugcccgugagcaugaccaagaccagcguggacugcaccauguacaucugcggcgacagcaccgagugcagcaaccugcugcugcaguacggcagcuucugcacccagcugaaccgggcccugaccggcaucgccguggagcaggacaagaacacccaggagguguucgcccaggugaagcagaucuacaagaccccucccaucaaggacuucggcggcuucaacuucagccagauccugcccgaccccagcaagcccagcaagcggagcuucaucgaggaccugcuguucaacaaggugacccuagccgacgccggcuucaucaagcaguacggcgacugccucggcgacauagccgcccgggaccugaucugcgcccagaaguucaacggccugaccgugcugccuccccugcugaccgacgagaugaucgcccaguacaccagcgcccuguuagccggaaccaucaccagcggcuggacuuucggcgcuggagccgcucugcagauccccuucgccaugcagauggccuaccgguucaacggcaucggcgugacccagaacgugcuguacgagaaccagaagcugaucgccaaccaguucaacagcgccaucggcaagauccaggacagccugagcagcaccgcuagcgcccugggcaagcugcaggacguggugaaccagaacgcccaggcccugaacacccuggugaagcagcugagcagcaacuucggcgccaucagcagcgugcugaacgacauccugagccggcuggacccucccgaggccgaggugcagaucgaccggcugaucacuggccggcugcagagccugcagaccuacgugacccagcagcugauccgggccgccgagauucgggccagcgccaaccuggccgccaccaagaugagcgagugcgugcugggccagagcaagcggguggacuucugcggcaagggcuaccaccugaugagcuuuccccagagcgcaccccacggagugguguuccugcacgugaccuacgugcccgcccaggagaagaacuucaccaccgccccagccaucugccacgacggcaaggcccacuuuccccgggagggcguguucgugagcaacggcacccacugguucgugacccagcggaacuucuacgagccccagaucaucaccaccgacaacaccuucgugagcggcaacugcgacguggugaucggcaucgugaacaacaccguguacgauccccugcagcccgagcuggacagcuucaaggaggagcuggacaaguacuucaagaaucacaccagccccgacguggaccugggcgacaucagcggcaucaacgccagcguggugaacauccagaaggagaucgaucggcugaacgagguggccaagaaccugaacgagagccugaucgaccugcaggagcugggcaaguacgagcaguacaucaaguggcccugguacaucuggcugggcuucaucgccggccugaucgccaucgugauggugaccaucaugcugugcugcaugaccagcugcugcagcugccugaagggcuguugcagcugcggcagcugcugcaaguucgacgaggacgacagcgagcccgugcugaagggcgugaagcugcacuacaccugaggacuagucccuguucccagagcccacuuuuuuuucuuuuuuugaaauaaaauagccugucuuucagaucucaaaggcucuuuucagagccaccaaaaaaaaaaaaaaaaaaaaaaaaaaaaaaaaaaaaaaaaaaaaaaaaaaaaaaaaaaaaaaaaaaaaaaaaaaaaaaaaaaaaaaaaaaaaaaaaaaaaa

SEQ ID NO: 23555 - RNA, 4094 nt, Artificial Sequence
  SARS-CoV-2/Wuhan/WIV05/2019__EPI_ISL_402128 spike protein mRNA gc (1-1273)(K986P_V987P_A222V_D614G)
aggagagucccgcagucggcguccagcggcucugcuuguucgugugugugucguugcaggccuuauucaagcuuaccauguucguguuccuggugcugcugccccuggugagcagccagugcgugaaccugaccacccggacccagcugccaccagccuacaccaacagcuucacccggggcgucuacuaccccgacaagguguuccggagcagcguccugcacagcacccaggaccuguuccugcccuucuucagcaacgugaccugguuccacgccauccacgugagcggcaccaacggcaccaagcgguucgacaaccccgugcugcccuucaacgacggcguguacuucgccagcaccgagaagagcaacaucauccggggcuggaucuucggcaccacccuggacagcaagacccagagccugcugaucgugaauaacgccaccaacguggugaucaaggugugcgaguuccaguucugcaacgaccccuuccugggcguguacuaccacaagaacaacaagagcuggauggagagcgaguuccggguguacagcagcgccaacaacugcaccuucgaguacgugagccagcccuuccugauggaccuggagggcaagcagggcaacuucaagaaccugcgggaguucguguucaagaacaucgacggcuacuucaagaucuacagcaagcacaccccaaucaaccuggugcgggaucugccccagggcuucucagugcuggagccccugguggaccugcccaucggcaucaacaucacccgguuccagacccugcuggcccugcaccggagcuaccugaccccaggcgacagcagcagcggguggacagcaggcgcggcugcuuacuacgugggcuaccugcagccccggaccuuccugcugaaguacaacgagaacggcaccaucaccgacgccguggacugcgcccuggacccucugagcgagaccaagugcacccugaagagcuucaccguggagaagggcaucuaccagaccagcaacuuccgggugcagcccaccgagagcaucgugcgguuccccaacaucaccaaccugugccccuucggcgagguguucaacgccacccgguucgccagcguguacgccuggaaccggaagcggaucagcaacugcguggccgacuacagcgugcuguacaacagcgccagcuucagcaccuucaagugcuacggcgugagccccaccaagcugaacgaccugugcuucaccaacguguacgccgacagcuucgugauccguggcgacgaggugcggcagaucgcacccggccagacaggcaagaucgccgacuacaacuacaagcugcccgacgacuucaccggcugcgugaucgccuggaacagcaacaaccucgacagcaaggugggcggcaacuacaacuaccuguaccggcuguuccggaagagcaaccugaagcccuucgagcgggacaucagcaccgagaucuaccaagccggcuccaccccuugcaacggcguggagggcuucaacugcuacuucccucugcagagcuacggcuuccagcccaccaacggcgugggcuaccagcccuaccgggugguggugcugagcuucgagcugcugcacgccccagccaccguguguggccccaagaagagcaccaaccuggugaagaacaagugcgugaacuucaacuucaacggccuuaccggcaccggcgugcugaccgagagcaacaagaaauuccugcccuuucagcaguucggccgggacaucgccgacaccaccgacgcugugcgggauccccagacccuggagauccuggacaucaccccuugcagcuucggcggcgugagcgugaucaccccaggcaccaacaccagcaaccagguggccgugcuguaccagggcgugaacugcaccgaggugcccguggccauccacgccgaccagcugacacccaccuggcgggucuacagcaccggcagcaacguguuccagacccgggccgguugccugaucggcgccgagcacgugaacaacagcuacgagugcgacauccccaucggcgccggcaucugugccagcuaccagacccagaccaauucaccccggagggcaaggagcguggccagccagagcaucaucgccuacaccaugagccugggcgccgagaacagcguggccuacagcaacaacagcaucgccauccccaccaacuucaccaucagcgugaccaccgagauucugcccgugagcaugaccaagaccagcguggacugcaccauguacaucugcggcgacagcaccgagugcagcaaccugcugcugcaguacggcagcuucugcacccagcugaaccgggcccugaccggcaucgccguggagcaggacaagaacacccaggagguguucgcccaggugaagcagaucuacaagaccccucccaucaaggacuucggcggcuucaacuucagccagauccugcccgaccccagcaagcccagcaagcggagcuucaucgaggaccugcuguucaacaaggugacccuagccgacgccggcuucaucaagcaguacggcgacugccucggcgacauagccgcccgggaccugaucugcgcccagaaguucaacggccugaccgugcugccuccccugcugaccgacgagaugaucgcccaguacaccagcgcccuguuagccggaaccaucaccagcggcuggacuuucggcgcuggagccgcucugcagauccccuucgccaugcagauggccuaccgguucaacggcaucggcgugacccagaacgugcuguacgagaaccagaagcugaucgccaaccaguucaacagcgccaucggcaagauccaggacagccugagcagcaccgcuagcgcccugggcaagcugcaggacguggugaaccagaacgcccaggcccugaacacccuggugaagcagcugagcagcaacuucggcgccaucagcagcgugcugaacgacauccugagccggcuggacccucccgaggccgaggugcagaucgaccggcugaucacuggccggcugcagagccugcagaccuacgugacccagcagcugauccgggccgccgagauucgggccagcgccaaccuggccgccaccaagaugagcgagugcgugcugggccagagcaagcggguggacuucugcggcaagggcuaccaccugaugagcuuuccccagagcgcaccccacggagugguguuccugcacgugaccuacgugcccgcccaggagaagaacuucaccaccgccccagccaucugccacgacggcaaggcccacuuuccccgggagggcguguucgugagcaacggcacccacugguucgugacccagcggaacuucuacgagccccagaucaucaccaccgacaacaccuucgugagcggcaacugcgacguggugaucggcaucgugaacaacaccguguacgauccccugcagcccgagcuggacagcuucaaggaggagcuggacaaguacuucaagaaucacaccagccccgacguggaccugggcgacaucagcggcaucaacgccagcguggugaacauccagaaggagaucgaucggcugaacgagguggccaagaaccugaacgagagccugaucgaccugcaggagcugggcaaguacgagcaguacaucaaguggcccugguacaucuggcugggcuucaucgccggccugaucgccaucgugauggugaccaucaugcugugcugcaugaccagcugcugcagcugccugaagggcuguugcagcugcggcagcugcugcaaguucgacgaggacgacagcgagcccgugcugaagggcgugaagcugcacuacaccugaggacuagucccuguucccagagcccacuuuuuuuucuuuuuuugaaauaaaauagccugucuuucagaucucaaaggcucuuuucagagccaccaaaaaaaaaaaaaaaaaaaaaaaaaaaaaaaaaaaaaaaaaaaaaaaaaaaaaaaaaaaaaaaaaaaaaaaaaaaaaaaaaaaaaaaaaaaaaaaaaaaaa

SEQ ID NO: 23556 - RNA, 4094 nt, Artificial Sequence
  SARS-CoV-2/Wuhan/WIV05/2019__EPI_ISL_402128 spike protein mRNA gc (1-1273)(K986P_V987P_N439K_D614G)
aggagagucccgcagucggcguccagcggcucugcuuguucgugugugugucguugcaggccuuauucaagcuuaccauguucguguuccuggugcugcugccccuggugagcagccagugcgugaaccugaccacccggacccagcugccaccagccuacaccaacagcuucacccggggcgucuacuaccccgacaagguguuccggagcagcguccugcacagcacccaggaccuguuccugcccuucuucagcaacgugaccugguuccacgccauccacgugagcggcaccaacggcaccaagcgguucgacaaccccgugcugcccuucaacgacggcguguacuucgccagcaccgagaagagcaacaucauccggggcuggaucuucggcaccacccuggacagcaagacccagagccugcugaucgugaauaacgccaccaacguggugaucaaggugugcgaguuccaguucugcaacgaccccuuccugggcguguacuaccacaagaacaacaagagcuggauggagagcgaguuccggguguacagcagcgccaacaacugcaccuucgaguacgugagccagcccuuccugauggaccuggagggcaagcagggcaacuucaagaaccugcgggaguucguguucaagaacaucgacggcuacuucaagaucuacagcaagcacaccccaaucaaccuggugcgggaucugccccagggcuucucagcccuggagccccugguggaccugcccaucggcaucaacaucacccgguuccagacccugcuggcccugcaccggagcuaccugaccccaggcgacagcagcagcggguggacagcaggcgcggcugcuuacuacgugggcuaccugcagccccggaccuuccugcugaaguacaacgagaacggcaccaucaccgacgccguggacugcgcccuggacccucugagcgagaccaagugcacccugaagagcuucaccguggagaagggcaucuaccagaccagcaacuuccgggugcagcccaccgagagcaucgugcgguuccccaacaucaccaaccugugccccuucggcgagguguucaacgccacccgguucgccagcguguacgccuggaaccggaagcggaucagcaacugcguggccgacuacagcgugcuguacaacagcgccagcuucagcaccuucaagugcuacggcgugagccccaccaagcugaacgaccugugcuucaccaacguguacgccgacagcuucgugauccguggcgacgaggugcggcagaucgcacccggccagacaggcaagaucgccgacuacaacuacaagcugcccgacgacuucaccggcugcgugaucgccuggaacagcaagaaccucgacagcaaggugggcggcaacuacaacuaccuguaccggcuguuccggaagagcaaccugaagcccuucgagcgggacaucagcaccgagaucuaccaagccggcuccaccccuugcaacggcguggagggcuucaacugcuacuucccucugcagagcuacggcuuccagcccaccaacggcgugggcuaccagcccuaccgggugguggugcugagcuucgagcugcugcacgccccagccaccguguguggccccaagaagagcaccaaccuggugaagaacaagugcgugaacuucaacuucaacggccuuaccggcaccggcgugcugaccgagagcaacaagaaauuccugcccuuucagcaguucggccgggacaucgccgacaccaccgacgcugugcgggauccccagacccuggagauccuggacaucaccccuugcagcuucggcggcgugagcgugaucaccccaggcaccaacaccagcaaccagguggccgugcuguaccagggcgugaacugcaccgaggugcccguggccauccacgccgaccagcugacacccaccuggcgggucuacagcaccggcagcaacguguuccagacccgggccgguugccugaucggcgccgagcacgugaacaacagcuacgagugcgacauccccaucggcgccggcaucugugccagcuaccagacccagaccaauucaccccggagggcaaggagcguggccagccagagcaucaucgccuacaccaugagccugggcgccgagaacagcguggccuacagcaacaacagcaucgccauccccaccaacuucaccaucagcgugaccaccgagauucugcccgugagcaugaccaagaccagcguggacugcaccauguacaucugcggcgacagcaccgagugcagcaaccugcugcugcaguacggcagcuucugcacccagcugaaccgggcccugaccggcaucgccguggagcaggacaagaacacccaggagguguucgcccaggugaagcagaucuacaagaccccucccaucaaggacuucggcggcuucaacuucagccagauccugcccgaccccagcaagcccagcaagcggagcuucaucgaggaccugcuguucaacaaggugacccuagccgacgccggcuucaucaagcaguacggcgacugccucggcgacauagccgcccgggaccugaucugcgcccagaaguucaacggccugaccgugcugccuccccugcugaccgacgagaugaucgcccaguacaccagcgcccuguuagccggaaccaucaccagcggcuggacuuucggcgcuggagccgcucugcagauccccuucgccaugcagauggccuaccgguucaacggcaucggcgugacccagaacgugcuguacgagaaccagaagcugaucgccaaccaguucaacagcgccaucggcaagauccaggacagccugagcagcaccgcuagcgcccugggcaagcugcaggacguggugaaccagaacgcccaggcccugaacacccuggugaagcagcugagcagcaacuucggcgccaucagcagcgugcugaacgacauccugagccggcuggacccucccgaggccgaggugcagaucgaccggcugaucacuggccggcugcagagccugcagaccuacgugacccagcagcugauccgggccgccgagauucgggccagcgccaaccuggccgccaccaagaugagcgagugcgugcugggccagagcaagcggguggacuucugcggcaagggcuaccaccugaugagcuuuccccagagcgcaccccacggagugguguuccugcacgugaccuacgugcccgcccaggagaagaacuucaccaccgccccagccaucugccacgacggcaaggcccacuuuccccgggagggcguguucgugagcaacggcacccacugguucgugacccagcggaacuucuacgagccccagaucaucaccaccgacaacaccuucgugagcggcaacugcgacguggugaucggcaucgugaacaacaccguguacgauccccugcagcccgagcuggacagcuucaaggaggagcuggacaaguacuucaagaaucacaccagccccgacguggaccugggcgacaucagcggcaucaacgccagcguggugaacauccagaaggagaucgaucggcugaacgagguggccaagaaccugaacgagagccugaucgaccugcaggagcugggcaaguacgagcaguacaucaaguggcccugguacaucuggcugggcuucaucgccggccugaucgccaucgugauggugaccaucaugcugugcugcaugaccagcugcugcagcugccugaagggcuguugcagcugcggcagcugcugcaaguucgacgaggacgacagcgagcccgugcugaagggcgugaagcugcacuacaccugaggacuagucccuguucccagagcccacuuuuuuuucuuuuuuugaaauaaaauagccugucuuucagaucucaaaggcucuuuucagagccaccaaaaaaaaaaaaaaaaaaaaaaaaaaaaaaaaaaaaaaaaaaaaaaaaaaaaaaaaaaaaaaaaaaaaaaaaaaaaaaaaaaaaaaaaaaaaaaaaaaaaa

SEQ ID NO: 23557 - RNA, 4094 nt, Artificial Sequence
  SARS-CoV-2/Wuhan/WIV05/2019__EPI_ISL_402128 spike protein mRNA gc (1-1273)(K986P_V987P_S477N_D614G)
aggagagucccgcagucggcguccagcggcucugcuuguucgugugugugucguugcaggccuuauucaagcuuaccauguucguguuccuggugcugcugccccuggugagcagccagugcgugaaccugaccacccggacccagcugccaccagccuacaccaacagcuucacccggggcgucuacuaccccgacaagguguuccggagcagcguccugcacagcacccaggaccuguuccugcccuucuucagcaacgugaccugguuccacgccauccacgugagcggcaccaacggcaccaagcgguucgacaaccccgugcugcccuucaacgacggcguguacuucgccagcaccgagaagagcaacaucauccggggcuggaucuucggcaccacccuggacagcaagacccagagccugcugaucgugaauaacgccaccaacguggugaucaaggugugcgaguuccaguucugcaacgaccccuuccugggcguguacuaccacaagaacaacaagagcuggauggagagcgaguuccggguguacagcagcgccaacaacugcaccuucgaguacgugagccagcccuuccugauggaccuggagggcaagcagggcaacuucaagaaccugcgggaguucguguucaagaacaucgacggcuacuucaagaucuacagcaagcacaccccaaucaaccuggugcgggaucugccccagggcuucucagcccuggagccccugguggaccugcccaucggcaucaacaucacccgguuccagacccugcuggcccugcaccggagcuaccugaccccaggcgacagcagcagcggguggacagcaggcgcggcugcuuacuacgugggcuaccugcagccccggaccuuccugcugaaguacaacgagaacggcaccaucaccgacgccguggacugcgcccuggacccucugagcgagaccaagugcacccugaagagcuucaccguggagaagggcaucuaccagaccagcaacuuccgggugcagcccaccgagagcaucgugcgguuccccaacaucaccaaccugugccccuucggcgagguguucaacgccacccgguucgccagcguguacgccuggaaccggaagcggaucagcaacugcguggccgacuacagcgugcuguacaacagcgccagcuucagcaccuucaagugcuacggcgugagccccaccaagcugaacgaccugugcuucaccaacguguacgccgacagcuucgugauccguggcgacgaggugcggcagaucgcacccggccagacaggcaagaucgccgacuacaacuacaagcugcccgacgacuucaccggcugcgugaucgccuggaacagcaacaaccucgacagcaaggugggcggcaacuacaacuaccuguaccggcuguuccggaagagcaaccugaagcccuucgagcgggacaucagcaccgagaucuaccaagccggcaacaccccuugcaacggcguggagggcuucaacugcuacuucccucugcagagcuacggcuuccagcccaccaacggcgugggcuaccagcccuaccgggugguggugcugagcuucgagcugcugcacgccccagccaccguguguggccccaagaagagcaccaaccuggugaagaacaagugcgugaacuucaacuucaacggccuuaccggcaccggcgugcugaccgagagcaacaagaaauuccugcccuuucagcaguucggccgggacaucgccgacaccaccgacgcugugcgggauccccagacccuggagauccuggacaucaccccuugcagcuucggcggcgugagcgugaucaccccaggcaccaacaccagcaaccagguggccgugcuguaccagggcgugaacugcaccgaggugcccguggccauccacgccgaccagcugacacccaccuggcgggucuacagcaccggcagcaacguguuccagacccgggccgguugccugaucggcgccgagcacgugaacaacagcuacgagugcgacauccccaucggcgccggcaucugugccagcuaccagacccagaccaauucaccccggagggcaaggagcguggccagccagagcaucaucgccuacaccaugagccugggcgccgagaacagcguggccuacagcaacaacagcaucgccauccccaccaacuucaccaucagcgugaccaccgagauucugcccgugagcaugaccaagaccagcguggacugcaccauguacaucugcggcgacagcaccgagugcagcaaccugcugcugcaguacggcagcuucugcacccagcugaaccgggcccugaccggcaucgccguggagcaggacaagaacacccaggagguguucgcccaggugaagcagaucuacaagaccccucccaucaaggacuucggcggcuucaacuucagccagauccugcccgaccccagcaagcccagcaagcggagcuucaucgaggaccugcuguucaacaaggugacccuagccgacgccggcuucaucaagcaguacggcgacugccucggcgacauagccgcccgggaccugaucugcgcccagaaguucaacggccugaccgugcugccuccccugcugaccgacgagaugaucgcccaguacaccagcgcccuguuagccggaaccaucaccagcggcuggacuuucggcgcuggagccgcucugcagauccccuucgccaugcagauggccuaccgguucaacggcaucggcgugacccagaacgugcuguacgagaaccagaagcugaucgccaaccaguucaacagcgccaucggcaagauccaggacagccugagcagcaccgcuagcgcccugggcaagcugcaggacguggugaaccagaacgcccaggcccugaacacccuggugaagcagcugagcagcaacuucggcgccaucagcagcgugcugaacgacauccugagccggcuggacccucccgaggccgaggugcagaucgaccggcugaucacuggccggcugcagagccugcagaccuacgugacccagcagcugauccgggccgccgagauucgggccagcgccaaccuggccgccaccaagaugagcgagugcgugcugggccagagcaagcggguggacuucugcggcaagggcuaccaccugaugagcuuuccccagagcgcaccccacggagugguguuccugcacgugaccuacgugcccgcccaggagaagaacuucaccaccgccccagccaucugccacgacggcaaggcccacuuuccccgggagggcguguucgugagcaacggcacccacugguucgugacccagcggaacuucuacgagccccagaucaucaccaccgacaacaccuucgugagcggcaacugcgacguggugaucggcaucgugaacaacaccguguacgauccccugcagcccgagcuggacagcuucaaggaggagcuggacaaguacuucaagaaucacaccagccccgacguggaccugggcgacaucagcggcaucaacgccagcguggugaacauccagaaggagaucgaucggcugaacgagguggccaagaaccugaacgagagccugaucgaccugcaggagcugggcaaguacgagcaguacaucaaguggcccugguacaucuggcugggcuucaucgccggccugaucgccaucgugauggugaccaucaugcugugcugcaugaccagcugcugcagcugccugaagggcuguugcagcugcggcagcugcugcaaguucgacgaggacgacagcgagcccgugcugaagggcgugaagcugcacuacaccugaggacuagucccuguucccagagcccacuuuuuuuucuuuuuuugaaauaaaauagccugucuuucagaucucaaaggcucuuuucagagccaccaaaaaaaaaaaaaaaaaaaaaaaaaaaaaaaaaaaaaaaaaaaaaaaaaaaaaaaaaaaaaaaaaaaaaaaaaaaaaaaaaaaaaaaaaaaaaaaaaaaaa

SEQ ID NO: 23558 - RNA, 4094 nt, Artificial Sequence
  SARS-CoV-2/Wuhan/WIV05/2019__EPI_ISL_402128 spike protein mRNA gc (1-1273)(K986P_V987P_N501Y_D614G)
aggagagucccgcagucggcguccagcggcucugcuuguucgugugugugucguugcaggccuuauucaagcuuaccauguucguguuccuggugcugcugccccuggugagcagccagugcgugaaccugaccacccggacccagcugccaccagccuacaccaacagcuucacccggggcgucuacuaccccgacaagguguuccggagcagcguccugcacagcacccaggaccuguuccugcccuucuucagcaacgugaccugguuccacgccauccacgugagcggcaccaacggcaccaagcgguucgacaaccccgugcugcccuucaacgacggcguguacuucgccagcaccgagaagagcaacaucauccggggcuggaucuucggcaccacccuggacagcaagacccagagccugcugaucgugaauaacgccaccaacguggugaucaaggugugcgaguuccaguucugcaacgaccccuuccugggcguguacuaccacaagaacaacaagagcuggauggagagcgaguuccggguguacagcagcgccaacaacugcaccuucgaguacgugagccagcccuuccugauggaccuggagggcaagcagggcaacuucaagaaccugcgggaguucguguucaagaacaucgacggcuacuucaagaucuacagcaagcacaccccaaucaaccuggugcgggaucugccccagggcuucucagcccuggagccccugguggaccugcccaucggcaucaacaucacccgguuccagacccugcuggcccugcaccggagcuaccugaccccaggcgacagcagcagcggguggacagcaggcgcggcugcuuacuacgugggcuaccugcagccccggaccuuccugcugaaguacaacgagaacggcaccaucaccgacgccguggacugcgcccuggacccucugagcgagaccaagugcacccugaagagcuucaccguggagaagggcaucuaccagaccagcaacuuccgggugcagcccaccgagagcaucgugcgguuccccaacaucaccaaccugugccccuucggcgagguguucaacgccacccgguucgccagcguguacgccuggaaccggaagcggaucagcaacugcguggccgacuacagcgugcuguacaacagcgccagcuucagcaccuucaagugcuacggcgugagccccaccaagcugaacgaccugugcuucaccaacguguacgccgacagcuucgugauccguggcgacgaggugcggcagaucgcacccggccagacaggcaagaucgccgacuacaacuacaagcugcccgacgacuucaccggcugcgugaucgccuggaacagcaacaaccucgacagcaaggugggcggcaacuacaacuaccuguaccggcuguuccggaagagcaaccugaagcccuucgagcgggacaucagcaccgagaucuaccaagccggcuccaccccuugcaacggcguggagggcuucaacugcuacuucccucugcagagcuacggcuuccagcccaccuacggcgugggcuaccagcccuaccgggugguggugcugagcuucgagcugcugcacgccccagccaccguguguggccccaagaagagcaccaaccuggugaagaacaagugcgugaacuucaacuucaacggccuuaccggcaccggcgugcugaccgagagcaacaagaaauuccugcccuuucagcaguucggccgggacaucgccgacaccaccgacgcugugcgggauccccagacccuggagauccuggacaucaccccuugcagcuucggcggcgugagcgugaucaccccaggcaccaacaccagcaaccagguggccgugcuguaccagggcgugaacugcaccgaggugcccguggccauccacgccgaccagcugacacccaccuggcgggucuacagcaccggcagcaacguguuccagacccgggccgguugccugaucggcgccgagcacgugaacaacagcuacgagugcgacauccccaucggcgccggcaucugugccagcuaccagacccagaccaauucaccccggagggcaaggagcguggccagccagagcaucaucgccuacaccaugagccugggcgccgagaacagcguggccuacagcaacaacagcaucgccauccccaccaacuucaccaucagcgugaccaccgagauucugcccgugagcaugaccaagaccagcguggacugcaccauguacaucugcggcgacagcaccgagugcagcaaccugcugcugcaguacggcagcuucugcacccagcugaaccgggcccugaccggcaucgccguggagcaggacaagaacacccaggagguguucgcccaggugaagcagaucuacaagaccccucccaucaaggacuucggcggcuucaacuucagccagauccugcccgaccccagcaagcccagcaagcggagcuucaucgaggaccugcuguucaacaaggugacccuagccgacgccggcuucaucaagcaguacggcgacugccucggcgacauagccgcccgggaccugaucugcgcccagaaguucaacggccugaccgugcugccuccccugcugaccgacgagaugaucgcccaguacaccagcgcccuguuagccggaaccaucaccagcggcuggacuuucggcgcuggagccgcucugcagauccccuucgccaugcagauggccuaccgguucaacggcaucggcgugacccagaacgugcuguacgagaaccagaagcugaucgccaaccaguucaacagcgccaucggcaagauccaggacagccugagcagcaccgcuagcgcccugggcaagcugcaggacguggugaaccagaacgcccaggcccugaacacccuggugaagcagcugagcagcaacuucggcgccaucagcagcgugcugaacgacauccugagccggcuggacccucccgaggccgaggugcagaucgaccggcugaucacuggccggcugcagagccugcagaccuacgugacccagcagcugauccgggccgccgagauucgggccagcgccaaccuggccgccaccaagaugagcgagugcgugcugggccagagcaagcggguggacuucugcggcaagggcuaccaccugaugagcuuuccccagagcgcaccccacggagugguguuccugcacgugaccuacgugcccgcccaggagaagaacuucaccaccgccccagccaucugccacgacggcaaggcccacuuuccccgggagggcguguucgugagcaacggcacccacugguucgugacccagcggaacuucuacgagccccagaucaucaccaccgacaacaccuucgugagcggcaacugcgacguggugaucggcaucgugaacaacaccguguacgauccccugcagcccgagcuggacagcuucaaggaggagcuggacaaguacuucaagaaucacaccagccccgacguggaccugggcgacaucagcggcaucaacgccagcguggugaacauccagaaggagaucgaucggcugaacgagguggccaagaaccugaacgagagccugaucgaccugcaggagcugggcaaguacgagcaguacaucaaguggcccugguacaucuggcugggcuucaucgccggccugaucgccaucgugauggugaccaucaugcugugcugcaugaccagcugcugcagcugccugaagggcuguugcagcugcggcagcugcugcaaguucgacgaggacgacagcgagcccgugcugaagggcgugaagcugcacuacaccugaggacuagucccuguucccagagcccacuuuuuuuucuuuuuuugaaauaaaauagccugucuuucagaucucaaaggcucuuuucagagccaccaaaaaaaaaaaaaaaaaaaaaaaaaaaaaaaaaaaaaaaaaaaaaaaaaaaaaaaaaaaaaaaaaaaaaaaaaaaaaaaaaaaaaaaaaaaaaaaaaaaaa

SEQ ID NO: 23559 - RNA, 4088 nt, Artificial Sequence
  SARS-CoV-2/Wuhan/WIV05/2019__EPI_ISL_402128 spike protein mRNA gc (1-1273)(K986P_V987P_H69del_V70del_D614G)
aggagagucccgcagucggcguccagcggcucugcuuguucgugugugugucguugcaggccuuauucaagcuuaccauguucguguuccuggugcugcugccccuggugagcagccagugcgugaaccugaccacccggacccagcugccaccagccuacaccaacagcuucacccggggcgucuacuaccccgacaagguguuccggagcagcguccugcacagcacccaggaccuguuccugcccuucuucagcaacgugaccugguuccacgccaucagcggcaccaacggcaccaagcgguucgacaaccccgugcugcccuucaacgacggcguguacuucgccagcaccgagaagagcaacaucauccggggcuggaucuucggcaccacccuggacagcaagacccagagccugcugaucgugaauaacgccaccaacguggugaucaaggugugcgaguuccaguucugcaacgaccccuuccugggcguguacuaccacaagaacaacaagagcuggauggagagcgaguuccggguguacagcagcgccaacaacugcaccuucgaguacgugagccagcccuuccugauggaccuggagggcaagcagggcaacuucaagaaccugcgggaguucguguucaagaacaucgacggcuacuucaagaucuacagcaagcacaccccaaucaaccuggugcgggaucugccccagggcuucucagcccuggagccccugguggaccugcccaucggcaucaacaucacccgguuccagacccugcuggcccugcaccggagcuaccugaccccaggcgacagcagcagcggguggacagcaggcgcggcugcuuacuacgugggcuaccugcagccccggaccuuccugcugaaguacaacgagaacggcaccaucaccgacgccguggacugcgcccuggacccucugagcgagaccaagugcacccugaagagcuucaccguggagaagggcaucuaccagaccagcaacuuccgggugcagcccaccgagagcaucgugcgguuccccaacaucaccaaccugugccccuucggcgagguguucaacgccacccgguucgccagcguguacgccuggaaccggaagcggaucagcaacugcguggccgacuacagcgugcuguacaacagcgccagcuucagcaccuucaagugcuacggcgugagccccaccaagcugaacgaccugugcuucaccaacguguacgccgacagcuucgugauccguggcgacgaggugcggcagaucgcacccggccagacaggcaagaucgccgacuacaacuacaagcugcccgacgacuucaccggcugcgugaucgccuggaacagcaacaaccucgacagcaaggugggcggcaacuacaacuaccuguaccggcuguuccggaagagcaaccugaagcccuucgagcgggacaucagcaccgagaucuaccaagccggcuccaccccuugcaacggcguggagggcuucaacugcuacuucccucugcagagcuacggcuuccagcccaccaacggcgugggcuaccagcccuaccgggugguggugcugagcuucgagcugcugcacgccccagccaccguguguggccccaagaagagcaccaaccuggugaagaacaagugcgugaacuucaacuucaacggccuuaccggcaccggcgugcugaccgagagcaacaagaaauuccugcccuuucagcaguucggccgggacaucgccgacaccaccgacgcugugcgggauccccagacccuggagauccuggacaucaccccuugcagcuucggcggcgugagcgugaucaccccaggcaccaacaccagcaaccagguggccgugcuguaccagggcgugaacugcaccgaggugcccguggccauccacgccgaccagcugacacccaccuggcgggucuacagcaccggcagcaacguguuccagacccgggccgguugccugaucggcgccgagcacgugaacaacagcuacgagugcgacauccccaucggcgccggcaucugugccagcuaccagacccagaccaauucaccccggagggcaaggagcguggccagccagagcaucaucgccuacaccaugagccugggcgccgagaacagcguggccuacagcaacaacagcaucgccauccccaccaacuucaccaucagcgugaccaccgagauucugcccgugagcaugaccaagaccagcguggacugcaccauguacaucugcggcgacagcaccgagugcagcaaccugcugcugcaguacggcagcuucugcacccagcugaaccgggcccugaccggcaucgccguggagcaggacaagaacacccaggagguguucgcccaggugaagcagaucuacaagaccccucccaucaaggacuucggcggcuucaacuucagccagauccugcccgaccccagcaagcccagcaagcggagcuucaucgaggaccugcuguucaacaaggugacccuagccgacgccggcuucaucaagcaguacggcgacugccucggcgacauagccgcccgggaccugaucugcgcccagaaguucaacggccugaccgugcugccuccccugcugaccgacgagaugaucgcccaguacaccagcgcccuguuagccggaaccaucaccagcggcuggacuuucggcgcuggagccgcucugcagauccccuucgccaugcagauggccuaccgguucaacggcaucggcgugacccagaacgugcuguacgagaaccagaagcugaucgccaaccaguucaacagcgccaucggcaagauccaggacagccugagcagcaccgcuagcgcccugggcaagcugcaggacguggugaaccagaacgcccaggcccugaacacccuggugaagcagcugagcagcaacuucggcgccaucagcagcgugcugaacgacauccugagccggcuggacccucccgaggccgaggugcagaucgaccggcugaucacuggccggcugcagagccugcagaccuacgugacccagcagcugauccgggccgccgagauucgggccagcgccaaccuggccgccaccaagaugagcgagugcgugcugggccagagcaagcggguggacuucugcggcaagggcuaccaccugaugagcuuuccccagagcgcaccccacggagugguguuccugcacgugaccuacgugcccgcccaggagaagaacuucaccaccgccccagccaucugccacgacggcaaggcccacuuuccccgggagggcguguucgugagcaacggcacccacugguucgugacccagcggaacuucuacgagccccagaucaucaccaccgacaacaccuucgugagcggcaacugcgacguggugaucggcaucgugaacaacaccguguacgauccccugcagcccgagcuggacagcuucaaggaggagcuggacaaguacuucaagaaucacaccagccccgacguggaccugggcgacaucagcggcaucaacgccagcguggugaacauccagaaggagaucgaucggcugaacgagguggccaagaaccugaacgagagccugaucgaccugcaggagcugggcaaguacgagcaguacaucaaguggcccugguacaucuggcugggcuucaucgccggccugaucgccaucgugauggugaccaucaugcugugcugcaugaccagcugcugcagcugccugaagggcuguugcagcugcggcagcugcugcaaguucgacgaggacgacagcgagcccgugcugaagggcgugaagcugcacuacaccugaggacuagucccuguucccagagcccacuuuuuuuucuuuuuuugaaauaaaauagccugucuuucagaucucaaaggcucuuuucagagccaccaaaaaaaaaaaaaaaaaaaaaaaaaaaaaaaaaaaaaaaaaaaaaaaaaaaaaaaaaaaaaaaaaaaaaaaaaaaaaaaaaaaaaaaaaaaaaaaaaaaaa

SEQ ID NO: 23560 - RNA, 4094 nt, Artificial Sequence
  SARS-CoV-2/Wuhan/WIV05/2019__EPI_ISL_402128 spike protein mRNA gc (1-1273)(K986P_V987P_Y453F_D614G)
aggagagucccgcagucggcguccagcggcucugcuuguucgugugugugucguugcaggccuuauucaagcuuaccauguucguguuccuggugcugcugccccuggugagcagccagugcgugaaccugaccacccggacccagcugccaccagccuacaccaacagcuucacccggggcgucuacuaccccgacaagguguuccggagcagcguccugcacagcacccaggaccuguuccugcccuucuucagcaacgugaccugguuccacgccauccacgugagcggcaccaacggcaccaagcgguucgacaaccccgugcugcccuucaacgacggcguguacuucgccagcaccgagaagagcaacaucauccggggcuggaucuucggcaccacccuggacagcaagacccagagccugcugaucgugaauaacgccaccaacguggugaucaaggugugcgaguuccaguucugcaacgaccccuuccugggcguguacuaccacaagaacaacaagagcuggauggagagcgaguuccggguguacagcagcgccaacaacugcaccuucgaguacgugagccagcccuuccugauggaccuggagggcaagcagggcaacuucaagaaccugcgggaguucguguucaagaacaucgacggcuacuucaagaucuacagcaagcacaccccaaucaaccuggugcgggaucugccccagggcuucucagcccuggagccccugguggaccugcccaucggcaucaacaucacccgguuccagacccugcuggcccugcaccggagcuaccugaccccaggcgacagcagcagcggguggacagcaggcgcggcugcuuacuacgugggcuaccugcagccccggaccuuccugcugaaguacaacgagaacggcaccaucaccgacgccguggacugcgcccuggacccucugagcgagaccaagugcacccugaagagcuucaccguggagaagggcaucuaccagaccagcaacuuccgggugcagcccaccgagagcaucgugcgguuccccaacaucaccaaccugugccccuucggcgagguguucaacgccacccgguucgccagcguguacgccuggaaccggaagcggaucagcaacugcguggccgacuacagcgugcuguacaacagcgccagcuucagcaccuucaagugcuacggcgugagccccaccaagcugaacgaccugugcuucaccaacguguacgccgacagcuucgugauccguggcgacgaggugcggcagaucgcacccggccagacaggcaagaucgccgacuacaacuacaagcugcccgacgacuucaccggcugcgugaucgccuggaacagcaacaaccucgacagcaaggugggcggcaacuacaacuaccuguuccggcuguuccggaagagcaaccugaagcccuucgagcgggacaucagcaccgagaucuaccaagccggcuccaccccuugcaacggcguggagggcuucaacugcuacuucccucugcagagcuacggcuuccagcccaccaacggcgugggcuaccagcccuaccgggugguggugcugagcuucgagcugcugcacgccccagccaccguguguggccccaagaagagcaccaaccuggugaagaacaagugcgugaacuucaacuucaacggccuuaccggcaccggcgugcugaccgagagcaacaagaaauuccugcccuuucagcaguucggccgggacaucgccgacaccaccgacgcugugcgggauccccagacccuggagauccuggacaucaccccuugcagcuucggcggcgugagcgugaucaccccaggcaccaacaccagcaaccagguggccgugcuguaccagggcgugaacugcaccgaggugcccguggccauccacgccgaccagcugacacccaccuggcgggucuacagcaccggcagcaacguguuccagacccgggccgguugccugaucggcgccgagcacgugaacaacagcuacgagugcgacauccccaucggcgccggcaucugugccagcuaccagacccagaccaauucaccccggagggcaaggagcguggccagccagagcaucaucgccuacaccaugagccugggcgccgagaacagcguggccuacagcaacaacagcaucgccauccccaccaacuucaccaucagcgugaccaccgagauucugcccgugagcaugaccaagaccagcguggacugcaccauguacaucugcggcgacagcaccgagugcagcaaccugcugcugcaguacggcagcuucugcacccagcugaaccgggcccugaccggcaucgccguggagcaggacaagaacacccaggagguguucgcccaggugaagcagaucuacaagaccccucccaucaaggacuucggcggcuucaacuucagccagauccugcccgaccccagcaagcccagcaagcggagcuucaucgaggaccugcuguucaacaaggugacccuagccgacgccggcuucaucaagcaguacggcgacugccucggcgacauagccgcccgggaccugaucugcgcccagaaguucaacggccugaccgugcugccuccccugcugaccgacgagaugaucgcccaguacaccagcgcccuguuagccggaaccaucaccagcggcuggacuuucggcgcuggagccgcucugcagauccccuucgccaugcagauggccuaccgguucaacggcaucggcgugacccagaacgugcuguacgagaaccagaagcugaucgccaaccaguucaacagcgccaucggcaagauccaggacagccugagcagcaccgcuagcgcccugggcaagcugcaggacguggugaaccagaacgcccaggcccugaacacccuggugaagcagcugagcagcaacuucggcgccaucagcagcgugcugaacgacauccugagccggcuggacccucccgaggccgaggugcagaucgaccggcugaucacuggccggcugcagagccugcagaccuacgugacccagcagcugauccgggccgccgagauucgggccagcgccaaccuggccgccaccaagaugagcgagugcgugcugggccagagcaagcggguggacuucugcggcaagggcuaccaccugaugagcuuuccccagagcgcaccccacggagugguguuccugcacgugaccuacgugcccgcccaggagaagaacuucaccaccgccccagccaucugccacgacggcaaggcccacuuuccccgggagggcguguucgugagcaacggcacccacugguucgugacccagcggaacuucuacgagccccagaucaucaccaccgacaacaccuucgugagcggcaacugcgacguggugaucggcaucgugaacaacaccguguacgauccccugcagcccgagcuggacagcuucaaggaggagcuggacaaguacuucaagaaucacaccagccccgacguggaccugggcgacaucagcggcaucaacgccagcguggugaacauccagaaggagaucgaucggcugaacgagguggccaagaaccugaacgagagccugaucgaccugcaggagcugggcaaguacgagcaguacaucaaguggcccugguacaucuggcugggcuucaucgccggccugaucgccaucgugauggugaccaucaugcugugcugcaugaccagcugcugcagcugccugaagggcuguugcagcugcggcagcugcugcaaguucgacgaggacgacagcgagcccgugcugaagggcgugaagcugcacuacaccugaggacuagucccuguucccagagcccacuuuuuuuucuuuuuuugaaauaaaauagccugucuuucagaucucaaaggcucuuuucagagccaccaaaaaaaaaaaaaaaaaaaaaaaaaaaaaaaaaaaaaaaaaaaaaaaaaaaaaaaaaaaaaaaaaaaaaaaaaaaaaaaaaaaaaaaaaaaaaaaaaaaaa

SEQ ID NO: 23561 - RNA, 4094 nt, Artificial Sequence
  SARS-CoV-2/Wuhan/WIV05/2019__EPI_ISL_402128 spike protein mRNA gc (1-1273)(K986P_V987P_D614G_I692V)
aggagagucccgcagucggcguccagcggcucugcuuguucgugugugugucguugcaggccuuauucaagcuuaccauguucguguuccuggugcugcugccccuggugagcagccagugcgugaaccugaccacccggacccagcugccaccagccuacaccaacagcuucacccggggcgucuacuaccccgacaagguguuccggagcagcguccugcacagcacccaggaccuguuccugcccuucuucagcaacgugaccugguuccacgccauccacgugagcggcaccaacggcaccaagcgguucgacaaccccgugcugcccuucaacgacggcguguacuucgccagcaccgagaagagcaacaucauccggggcuggaucuucggcaccacccuggacagcaagacccagagccugcugaucgugaauaacgccaccaacguggugaucaaggugugcgaguuccaguucugcaacgaccccuuccugggcguguacuaccacaagaacaacaagagcuggauggagagcgaguuccggguguacagcagcgccaacaacugcaccuucgaguacgugagccagcccuuccugauggaccuggagggcaagcagggcaacuucaagaaccugcgggaguucguguucaagaacaucgacggcuacuucaagaucuacagcaagcacaccccaaucaaccuggugcgggaucugccccagggcuucucagcccuggagccccugguggaccugcccaucggcaucaacaucacccgguuccagacccugcuggcccugcaccggagcuaccugaccccaggcgacagcagcagcggguggacagcaggcgcggcugcuuacuacgugggcuaccugcagccccggaccuuccugcugaaguacaacgagaacggcaccaucaccgacgccguggacugcgcccuggacccucugagcgagaccaagugcacccugaagagcuucaccguggagaagggcaucuaccagaccagcaacuuccgggugcagcccaccgagagcaucgugcgguuccccaacaucaccaaccugugccccuucggcgagguguucaacgccacccgguucgccagcguguacgccuggaaccggaagcggaucagcaacugcguggccgacuacagcgugcuguacaacagcgccagcuucagcaccuucaagugcuacggcgugagccccaccaagcugaacgaccugugcuucaccaacguguacgccgacagcuucgugauccguggcgacgaggugcggcagaucgcacccggccagacaggcaagaucgccgacuacaacuacaagcugcccgacgacuucaccggcugcgugaucgccuggaacagcaacaaccucgacagcaaggugggcggcaacuacaacuaccuguaccggcuguuccggaagagcaaccugaagcccuucgagcgggacaucagcaccgagaucuaccaagccggcuccaccccuugcaacggcguggagggcuucaacugcuacuucccucugcagagcuacggcuuccagcccaccaacggcgugggcuaccagcccuaccgggugguggugcugagcuucgagcugcugcacgccccagccaccguguguggccccaagaagagcaccaaccuggugaagaacaagugcgugaacuucaacuucaacggccuuaccggcaccggcgugcugaccgagagcaacaagaaauuccugcccuuucagcaguucggccgggacaucgccgacaccaccgacgcugugcgggauccccagacccuggagauccuggacaucaccccuugcagcuucggcggcgugagcgugaucaccccaggcaccaacaccagcaaccagguggccgugcuguaccagggcgugaacugcaccgaggugcccguggccauccacgccgaccagcugacacccaccuggcgggucuacagcaccggcagcaacguguuccagacccgggccgguugccugaucggcgccgagcacgugaacaacagcuacgagugcgacauccccaucggcgccggcaucugugccagcuaccagacccagaccaauucaccccggagggcaaggagcguggccagccagagcgugaucgccuacaccaugagccugggcgccgagaacagcguggccuacagcaacaacagcaucgccauccccaccaacuucaccaucagcgugaccaccgagauucugcccgugagcaugaccaagaccagcguggacugcaccauguacaucugcggcgacagcaccgagugcagcaaccugcugcugcaguacggcagcuucugcacccagcugaaccgggcccugaccggcaucgccguggagcaggacaagaacacccaggagguguucgcccaggugaagcagaucuacaagaccccucccaucaaggacuucggcggcuucaacuucagccagauccugcccgaccccagcaagcccagcaagcggagcuucaucgaggaccugcuguucaacaaggugacccuagccgacgccggcuucaucaagcaguacggcgacugccucggcgacauagccgcccgggaccugaucugcgcccagaaguucaacggccugaccgugcugccuccccugcugaccgacgagaugaucgcccaguacaccagcgcccuguuagccggaaccaucaccagcggcuggacuuucggcgcuggagccgcucugcagauccccuucgccaugcagauggccuaccgguucaacggcaucggcgugacccagaacgugcuguacgagaaccagaagcugaucgccaaccaguucaacagcgccaucggcaagauccaggacagccugagcagcaccgcuagcgcccugggcaagcugcaggacguggugaaccagaacgcccaggcccugaacacccuggugaagcagcugagcagcaacuucggcgccaucagcagcgugcugaacgacauccugagccggcuggacccucccgaggccgaggugcagaucgaccggcugaucacuggccggcugcagagccugcagaccuacgugacccagcagcugauccgggccgccgagauucgggccagcgccaaccuggccgccaccaagaugagcgagugcgugcugggccagagcaagcggguggacuucugcggcaagggcuaccaccugaugagcuuuccccagagcgcaccccacggagugguguuccugcacgugaccuacgugcccgcccaggagaagaacuucaccaccgccccagccaucugccacgacggcaaggcccacuuuccccgggagggcguguucgugagcaacggcacccacugguucgugacccagcggaacuucuacgagccccagaucaucaccaccgacaacaccuucgugagcggcaacugcgacguggugaucggcaucgugaacaacaccguguacgauccccugcagcccgagcuggacagcuucaaggaggagcuggacaaguacuucaagaaucacaccagccccgacguggaccugggcgacaucagcggcaucaacgccagcguggugaacauccagaaggagaucgaucggcugaacgagguggccaagaaccugaacgagagccugaucgaccugcaggagcugggcaaguacgagcaguacaucaaguggcccugguacaucuggcugggcuucaucgccggccugaucgccaucgugauggugaccaucaugcugugcugcaugaccagcugcugcagcugccugaagggcuguugcagcugcggcagcugcugcaaguucgacgaggacgacagcgagcccgugcugaagggcgugaagcugcacuacaccugaggacuagucccuguucccagagcccacuuuuuuuucuuuuuuugaaauaaaauagccugucuuucagaucucaaaggcucuuuucagagccaccaaaaaaaaaaaaaaaaaaaaaaaaaaaaaaaaaaaaaaaaaaaaaaaaaaaaaaaaaaaaaaaaaaaaaaaaaaaaaaaaaaaaaaaaaaaaaaaaaaaaa

SEQ ID NO: 23562 - RNA, 4094 nt, Artificial Sequence
  SARS-CoV-2/Wuhan/WIV05/2019__EPI_ISL_402128 spike protein mRNA gc (1-1273)(K986P_V987P_D614G_M1229I)
aggagagucccgcagucggcguccagcggcucugcuuguucgugugugugucguugcaggccuuauucaagcuuaccauguucguguuccuggugcugcugccccuggugagcagccagugcgugaaccugaccacccggacccagcugccaccagccuacaccaacagcuucacccggggcgucuacuaccccgacaagguguuccggagcagcguccugcacagcacccaggaccuguuccugcccuucuucagcaacgugaccugguuccacgccauccacgugagcggcaccaacggcaccaagcgguucgacaaccccgugcugcccuucaacgacggcguguacuucgccagcaccgagaagagcaacaucauccggggcuggaucuucggcaccacccuggacagcaagacccagagccugcugaucgugaauaacgccaccaacguggugaucaaggugugcgaguuccaguucugcaacgaccccuuccugggcguguacuaccacaagaacaacaagagcuggauggagagcgaguuccggguguacagcagcgccaacaacugcaccuucgaguacgugagccagcccuuccugauggaccuggagggcaagcagggcaacuucaagaaccugcgggaguucguguucaagaacaucgacggcuacuucaagaucuacagcaagcacaccccaaucaaccuggugcgggaucugccccagggcuucucagcccuggagccccugguggaccugcccaucggcaucaacaucacccgguuccagacccugcuggcccugcaccggagcuaccugaccccaggcgacagcagcagcggguggacagcaggcgcggcugcuuacuacgugggcuaccugcagccccggaccuuccugcugaaguacaacgagaacggcaccaucaccgacgccguggacugcgcccuggacccucugagcgagaccaagugcacccugaagagcuucaccguggagaagggcaucuaccagaccagcaacuuccgggugcagcccaccgagagcaucgugcgguuccccaacaucaccaaccugugccccuucggcgagguguucaacgccacccgguucgccagcguguacgccuggaaccggaagcggaucagcaacugcguggccgacuacagcgugcuguacaacagcgccagcuucagcaccuucaagugcuacggcgugagccccaccaagcugaacgaccugugcuucaccaacguguacgccgacagcuucgugauccguggcgacgaggugcggcagaucgcacccggccagacaggcaagaucgccgacuacaacuacaagcugcccgacgacuucaccggcugcgugaucgccuggaacagcaacaaccucgacagcaaggugggcggcaacuacaacuaccuguaccggcuguuccggaagagcaaccugaagcccuucgagcgggacaucagcaccgagaucuaccaagccggcuccaccccuugcaacggcguggagggcuucaacugcuacuucccucugcagagcuacggcuuccagcccaccaacggcgugggcuaccagcccuaccgggugguggugcugagcuucgagcugcugcacgccccagccaccguguguggccccaagaagagcaccaaccuggugaagaacaagugcgugaacuucaacuucaacggccuuaccggcaccggcgugcugaccgagagcaacaagaaauuccugcccuuucagcaguucggccgggacaucgccgacaccaccgacgcugugcgggauccccagacccuggagauccuggacaucaccccuugcagcuucggcggcgugagcgugaucaccccaggcaccaacaccagcaaccagguggccgugcuguaccagggcgugaacugcaccgaggugcccguggccauccacgccgaccagcugacacccaccuggcgggucuacagcaccggcagcaacguguuccagacccgggccgguugccugaucggcgccgagcacgugaacaacagcuacgagugcgacauccccaucggcgccggcaucugugccagcuaccagacccagaccaauucaccccggagggcaaggagcguggccagccagagcaucaucgccuacaccaugagccugggcgccgagaacagcguggccuacagcaacaacagcaucgccauccccaccaacuucaccaucagcgugaccaccgagauucugcccgugagcaugaccaagaccagcguggacugcaccauguacaucugcggcgacagcaccgagugcagcaaccugcugcugcaguacggcagcuucugcacccagcugaaccgggcccugaccggcaucgccguggagcaggacaagaacacccaggagguguucgcccaggugaagcagaucuacaagaccccucccaucaaggacuucggcggcuucaacuucagccagauccugcccgaccccagcaagcccagcaagcggagcuucaucgaggaccugcuguucaacaaggugacccuagccgacgccggcuucaucaagcaguacggcgacugccucggcgacauagccgcccgggaccugaucugcgcccagaaguucaacggccugaccgugcugccuccccugcugaccgacgagaugaucgcccaguacaccagcgcccuguuagccggaaccaucaccagcggcuggacuuucggcgcuggagccgcucugcagauccccuucgccaugcagauggccuaccgguucaacggcaucggcgugacccagaacgugcuguacgagaaccagaagcugaucgccaaccaguucaacagcgccaucggcaagauccaggacagccugagcagcaccgcuagcgcccugggcaagcugcaggacguggugaaccagaacgcccaggcccugaacacccuggugaagcagcugagcagcaacuucggcgccaucagcagcgugcugaacgacauccugagccggcuggacccucccgaggccgaggugcagaucgaccggcugaucacuggccggcugcagagccugcagaccuacgugacccagcagcugauccgggccgccgagauucgggccagcgccaaccuggccgccaccaagaugagcgagugcgugcugggccagagcaagcggguggacuucugcggcaagggcuaccaccugaugagcuuuccccagagcgcaccccacggagugguguuccugcacgugaccuacgugcccgcccaggagaagaacuucaccaccgccccagccaucugccacgacggcaaggcccacuuuccccgggagggcguguucgugagcaacggcacccacugguucgugacccagcggaacuucuacgagccccagaucaucaccaccgacaacaccuucgugagcggcaacugcgacguggugaucggcaucgugaacaacaccguguacgauccccugcagcccgagcuggacagcuucaaggaggagcuggacaaguacuucaagaaucacaccagccccgacguggaccugggcgacaucagcggcaucaacgccagcguggugaacauccagaaggagaucgaucggcugaacgagguggccaagaaccugaacgagagccugaucgaccugcaggagcugggcaaguacgagcaguacaucaaguggcccugguacaucuggcugggcuucaucgccggccugaucgccaucgugaucgugaccaucaugcugugcugcaugaccagcugcugcagcugccugaagggcuguugcagcugcggcagcugcugcaaguucgacgaggacgacagcgagcccgugcugaagggcgugaagcugcacuacaccugaggacuagucccuguucccagagcccacuuuuuuuucuuuuuuugaaauaaaauagccugucuuucagaucucaaaggcucuuuucagagccaccaaaaaaaaaaaaaaaaaaaaaaaaaaaaaaaaaaaaaaaaaaaaaaaaaaaaaaaaaaaaaaaaaaaaaaaaaaaaaaaaaaaaaaaaaaaaaaaaaaaaa

SEQ ID NO: 23563 - RNA, 4088 nt, Artificial Sequence
  SARS-CoV-2/Wuhan/WIV05/2019__EPI_ISL_402128 spike protein mRNA gc (1-1273)(K986P_V987P_H69del_V70del_A222V_Y453F_S477N_D614G_I692V)
aggagagucccgcagucggcguccagcggcucugcuuguucgugugugugucguugcaggccuuauucaagcuuaccauguucguguuccuggugcugcugccccuggugagcagccagugcgugaaccugaccacccggacccagcugccaccagccuacaccaacagcuucacccggggcgucuacuaccccgacaagguguuccggagcagcguccugcacagcacccaggaccuguuccugcccuucuucagcaacgugaccugguuccacgccaucagcggcaccaacggcaccaagcgguucgacaaccccgugcugcccuucaacgacggcguguacuucgccagcaccgagaagagcaacaucauccggggcuggaucuucggcaccacccuggacagcaagacccagagccugcugaucgugaauaacgccaccaacguggugaucaaggugugcgaguuccaguucugcaacgaccccuuccugggcguguacuaccacaagaacaacaagagcuggauggagagcgaguuccggguguacagcagcgccaacaacugcaccuucgaguacgugagccagcccuuccugauggaccuggagggcaagcagggcaacuucaagaaccugcgggaguucguguucaagaacaucgacggcuacuucaagaucuacagcaagcacaccccaaucaaccuggugcgggaucugccccagggcuucucagugcuggagccccugguggaccugcccaucggcaucaacaucacccgguuccagacccugcuggcccugcaccggagcuaccugaccccaggcgacagcagcagcggguggacagcaggcgcggcugcuuacuacgugggcuaccugcagccccggaccuuccugcugaaguacaacgagaacggcaccaucaccgacgccguggacugcgcccuggacccucugagcgagaccaagugcacccugaagagcuucaccguggagaagggcaucuaccagaccagcaacuuccgggugcagcccaccgagagcaucgugcgguuccccaacaucaccaaccugugccccuucggcgagguguucaacgccacccgguucgccagcguguacgccuggaaccggaagcggaucagcaacugcguggccgacuacagcgugcuguacaacagcgccagcuucagcaccuucaagugcuacggcgugagccccaccaagcugaacgaccugugcuucaccaacguguacgccgacagcuucgugauccguggcgacgaggugcggcagaucgcacccggccagacaggcaagaucgccgacuacaacuacaagcugcccgacgacuucaccggcugcgugaucgccuggaacagcaacaaccucgacagcaaggugggcggcaacuacaacuaccuguuccggcuguuccggaagagcaaccugaagcccuucgagcgggacaucagcaccgagaucuaccaagccggcaacaccccuugcaacggcguggagggcuucaacugcuacuucccucugcagagcuacggcuuccagcccaccaacggcgugggcuaccagcccuaccgggugguggugcugagcuucgagcugcugcacgccccagccaccguguguggccccaagaagagcaccaaccuggugaagaacaagugcgugaacuucaacuucaacggccuuaccggcaccggcgugcugaccgagagcaacaagaaauuccugcccuuucagcaguucggccgggacaucgccgacaccaccgacgcugugcgggauccccagacccuggagauccuggacaucaccccuugcagcuucggcggcgugagcgugaucaccccaggcaccaacaccagcaaccagguggccgugcuguaccagggcgugaacugcaccgaggugcccguggccauccacgccgaccagcugacacccaccuggcgggucuacagcaccggcagcaacguguuccagacccgggccgguugccugaucggcgccgagcacgugaacaacagcuacgagugcgacauccccaucggcgccggcaucugugccagcuaccagacccagaccaauucaccccggagggcaaggagcguggccagccagagcgugaucgccuacaccaugagccugggcgccgagaacagcguggccuacagcaacaacagcaucgccauccccaccaacuucaccaucagcgugaccaccgagauucugcccgugagcaugaccaagaccagcguggacugcaccauguacaucugcggcgacagcaccgagugcagcaaccugcugcugcaguacggcagcuucugcacccagcugaaccgggcccugaccggcaucgccguggagcaggacaagaacacccaggagguguucgcccaggugaagcagaucuacaagaccccucccaucaaggacuucggcggcuucaacuucagccagauccugcccgaccccagcaagcccagcaagcggagcuucaucgaggaccugcuguucaacaaggugacccuagccgacgccggcuucaucaagcaguacggcgacugccucggcgacauagccgcccgggaccugaucugcgcccagaaguucaacggccugaccgugcugccuccccugcugaccgacgagaugaucgcccaguacaccagcgcccuguuagccggaaccaucaccagcggcuggacuuucggcgcuggagccgcucugcagauccccuucgccaugcagauggccuaccgguucaacggcaucggcgugacccagaacgugcuguacgagaaccagaagcugaucgccaaccaguucaacagcgccaucggcaagauccaggacagccugagcagcaccgcuagcgcccugggcaagcugcaggacguggugaaccagaacgcccaggcccugaacacccuggugaagcagcugagcagcaacuucggcgccaucagcagcgugcugaacgacauccugagccggcuggacccucccgaggccgaggugcagaucgaccggcugaucacuggccggcugcagagccugcagaccuacgugacccagcagcugauccgggccgccgagauucgggccagcgccaaccuggccgccaccaagaugagcgagugcgugcugggccagagcaagcggguggacuucugcggcaagggcuaccaccugaugagcuuuccccagagcgcaccccacggagugguguuccugcacgugaccuacgugcccgcccaggagaagaacuucaccaccgccccagccaucugccacgacggcaaggcccacuuuccccgggagggcguguucgugagcaacggcacccacugguucgugacccagcggaacuucuacgagccccagaucaucaccaccgacaacaccuucgugagcggcaacugcgacguggugaucggcaucgugaacaacaccguguacgauccccugcagcccgagcuggacagcuucaaggaggagcuggacaaguacuucaagaaucacaccagccccgacguggaccugggcgacaucagcggcaucaacgccagcguggugaacauccagaaggagaucgaucggcugaacgagguggccaagaaccugaacgagagccugaucgaccugcaggagcugggcaaguacgagcaguacaucaaguggcccugguacaucuggcugggcuucaucgccggccugaucgccaucgugauggugaccaucaugcugugcugcaugaccagcugcugcagcugccugaagggcuguugcagcugcggcagcugcugcaaguucgacgaggacgacagcgagcccgugcugaagggcgugaagcugcacuacaccugaggacuagucccuguucccagagcccacuuuuuuuucuuuuuuugaaauaaaauagccugucuuucagaucucaaaggcucuuuucagagccaccaaaaaaaaaaaaaaaaaaaaaaaaaaaaaaaaaaaaaaaaaaaaaaaaaaaaaaaaaaaaaaaaaaaaaaaaaaaaaaaaaaaaaaaaaaaaaaaaaaaaa

SEQ ID NO: 23564 - RNA, 4088 nt, Artificial Sequence
  SARS-CoV-2/Wuhan/WIV05/2019__EPI_ISL_402128 spike protein mRNA gc (1-1273)(K986P_V987P_H69del_V70del_Y453F_D614G_I692V_M1229I)
aggagagucccgcagucggcguccagcggcucugcuuguucgugugugugucguugcaggccuuauucaagcuuaccauguucguguuccuggugcugcugccccuggugagcagccagugcgugaaccugaccacccggacccagcugccaccagccuacaccaacagcuucacccggggcgucuacuaccccgacaagguguuccggagcagcguccugcacagcacccaggaccuguuccugcccuucuucagcaacgugaccugguuccacgccaucagcggcaccaacggcaccaagcgguucgacaaccccgugcugcccuucaacgacggcguguacuucgccagcaccgagaagagcaacaucauccggggcuggaucuucggcaccacccuggacagcaagacccagagccugcugaucgugaauaacgccaccaacguggugaucaaggugugcgaguuccaguucugcaacgaccccuuccugggcguguacuaccacaagaacaacaagagcuggauggagagcgaguuccggguguacagcagcgccaacaacugcaccuucgaguacgugagccagcccuuccugauggaccuggagggcaagcagggcaacuucaagaaccugcgggaguucguguucaagaacaucgacggcuacuucaagaucuacagcaagcacaccccaaucaaccuggugcgggaucugccccagggcuucucagcccuggagccccugguggaccugcccaucggcaucaacaucacccgguuccagacccugcuggcccugcaccggagcuaccugaccccaggcgacagcagcagcggguggacagcaggcgcggcugcuuacuacgugggcuaccugcagccccggaccuuccugcugaaguacaacgagaacggcaccaucaccgacgccguggacugcgcccuggacccucugagcgagaccaagugcacccugaagagcuucaccguggagaagggcaucuaccagaccagcaacuuccgggugcagcccaccgagagcaucgugcgguuccccaacaucaccaaccugugccccuucggcgagguguucaacgccacccgguucgccagcguguacgccuggaaccggaagcggaucagcaacugcguggccgacuacagcgugcuguacaacagcgccagcuucagcaccuucaagugcuacggcgugagccccaccaagcugaacgaccugugcuucaccaacguguacgccgacagcuucgugauccguggcgacgaggugcggcagaucgcacccggccagacaggcaagaucgccgacuacaacuacaagcugcccgacgacuucaccggcugcgugaucgccuggaacagcaacaaccucgacagcaaggugggcggcaacuacaacuaccuguuccggcuguuccggaagagcaaccugaagcccuucgagcgggacaucagcaccgagaucuaccaagccggcuccaccccuugcaacggcguggagggcuucaacugcuacuucccucugcagagcuacggcuuccagcccaccaacggcgugggcuaccagcccuaccgggugguggugcugagcuucgagcugcugcacgccccagccaccguguguggccccaagaagagcaccaaccuggugaagaacaagugcgugaacuucaacuucaacggccuuaccggcaccggcgugcugaccgagagcaacaagaaauuccugcccuuucagcaguucggccgggacaucgccgacaccaccgacgcugugcgggauccccagacccuggagauccuggacaucaccccuugcagcuucggcggcgugagcgugaucaccccaggcaccaacaccagcaaccagguggccgugcuguaccagggcgugaacugcaccgaggugcccguggccauccacgccgaccagcugacacccaccuggcgggucuacagcaccggcagcaacguguuccagacccgggccgguugccugaucggcgccgagcacgugaacaacagcuacgagugcgacauccccaucggcgccggcaucugugccagcuaccagacccagaccaauucaccccggagggcaaggagcguggccagccagagcgugaucgccuacaccaugagccugggcgccgagaacagcguggccuacagcaacaacagcaucgccauccccaccaacuucaccaucagcgugaccaccgagauucugcccgugagcaugaccaagaccagcguggacugcaccauguacaucugcggcgacagcaccgagugcagcaaccugcugcugcaguacggcagcuucugcacccagcugaaccgggcccugaccggcaucgccguggagcaggacaagaacacccaggagguguucgcccaggugaagcagaucuacaagaccccucccaucaaggacuucggcggcuucaacuucagccagauccugcccgaccccagcaagcccagcaagcggagcuucaucgaggaccugcuguucaacaaggugacccuagccgacgccggcuucaucaagcaguacggcgacugccucggcgacauagccgcccgggaccugaucugcgcccagaaguucaacggccugaccgugcugccuccccugcugaccgacgagaugaucgcccaguacaccagcgcccuguuagccggaaccaucaccagcggcuggacuuucggcgcuggagccgcucugcagauccccuucgccaugcagauggccuaccgguucaacggcaucggcgugacccagaacgugcuguacgagaaccagaagcugaucgccaaccaguucaacagcgccaucggcaagauccaggacagccugagcagcaccgcuagcgcccugggcaagcugcaggacguggugaaccagaacgcccaggcccugaacacccuggugaagcagcugagcagcaacuucggcgccaucagcagcgugcugaacgacauccugagccggcuggacccucccgaggccgaggugcagaucgaccggcugaucacuggccggcugcagagccugcagaccuacgugacccagcagcugauccgggccgccgagauucgggccagcgccaaccuggccgccaccaagaugagcgagugcgugcugggccagagcaagcggguggacuucugcggcaagggcuaccaccugaugagcuuuccccagagcgcaccccacggagugguguuccugcacgugaccuacgugcccgcccaggagaagaacuucaccaccgccccagccaucugccacgacggcaaggcccacuuuccccgggagggcguguucgugagcaacggcacccacugguucgugacccagcggaacuucuacgagccccagaucaucaccaccgacaacaccuucgugagcggcaacugcgacguggugaucggcaucgugaacaacaccguguacgauccccugcagcccgagcuggacagcuucaaggaggagcuggacaaguacuucaagaaucacaccagccccgacguggaccugggcgacaucagcggcaucaacgccagcguggugaacauccagaaggagaucgaucggcugaacgagguggccaagaaccugaacgagagccugaucgaccugcaggagcugggcaaguacgagcaguacaucaaguggcccugguacaucuggcugggcuucaucgccggccugaucgccaucgugaucgugaccaucaugcugugcugcaugaccagcugcugcagcugccugaagggcuguugcagcugcggcagcugcugcaaguucgacgaggacgacagcgagcccgugcugaagggcgugaagcugcacuacaccugaggacuagucccuguucccagagcccacuuuuuuuucuuuuuuugaaauaaaauagccugucuuucagaucucaaaggcucuuuucagagccaccaaaaaaaaaaaaaaaaaaaaaaaaaaaaaaaaaaaaaaaaaaaaaaaaaaaaaaaaaaaaaaaaaaaaaaaaaaaaaaaaaaaaaaaaaaaaaaaaaaaaa

SEQ ID NO: 23565 - RNA, 4085 nt, Artificial Sequence
  SARS-CoV-2/Wuhan/WIV05/2019__EPI_ISL_402128 spike protein mRNA gc (1-1273)(K986P_V987P_K986P_V987P_H69del_V70del_Y144del_N501Y_A570 D_D614G_P681H_T716I_S982A_D1118H)
aggagagucccgcagucggcguccagcggcucugcuuguucgugugugugucguugcaggccuuauucaagcuuaccauguucguguuccuggugcugcugccccuggugagcagccagugcgugaaccugaccacccggacccagcugccaccagccuacaccaacagcuucacccggggcgucuacuaccccgacaagguguuccggagcagcguccugcacagcacccaggaccuguuccugcccuucuucagcaacgugaccugguuccacgccaucagcggcaccaacggcaccaagcgguucgacaaccccgugcugcccuucaacgacggcguguacuucgccagcaccgagaagagcaacaucauccggggcuggaucuucggcaccacccuggacagcaagacccagagccugcugaucgugaauaacgccaccaacguggugaucaaggugugcgaguuccaguucugcaacgaccccuuccugggcguguaccacaagaacaacaagagcuggauggagagcgaguuccggguguacagcagcgccaacaacugcaccuucgaguacgugagccagcccuuccugauggaccuggagggcaagcagggcaacuucaagaaccugcgggaguucguguucaagaacaucgacggcuacuucaagaucuacagcaagcacaccccaaucaaccuggugcgggaucugccccagggcuucucagcccuggagccccugguggaccugcccaucggcaucaacaucacccgguuccagacccugcuggcccugcaccggagcuaccugaccccaggcgacagcagcagcggguggacagcaggcgcggcugcuuacuacgugggcuaccugcagccccggaccuuccugcugaaguacaacgagaacggcaccaucaccgacgccguggacugcgcccuggacccucugagcgagaccaagugcacccugaagagcuucaccguggagaagggcaucuaccagaccagcaacuuccgggugcagcccaccgagagcaucgugcgguuccccaacaucaccaaccugugccccuucggcgagguguucaacgccacccgguucgccagcguguacgccuggaaccggaagcggaucagcaacugcguggccgacuacagcgugcuguacaacagcgccagcuucagcaccuucaagugcuacggcgugagccccaccaagcugaacgaccugugcuucaccaacguguacgccgacagcuucgugauccguggcgacgaggugcggcagaucgcacccggccagacaggcaagaucgccgacuacaacuacaagcugcccgacgacuucaccggcugcgugaucgccuggaacagcaacaaccucgacagcaaggugggcggcaacuacaacuaccuguaccggcuguuccggaagagcaaccugaagcccuucgagcgggacaucagcaccgagaucuaccaagccggcuccaccccuugcaacggcguggagggcuucaacugcuacuucccucugcagagcuacggcuuccagcccaccuacggcgugggcuaccagcccuaccgggugguggugcugagcuucgagcugcugcacgccccagccaccguguguggccccaagaagagcaccaaccuggugaagaacaagugcgugaacuucaacuucaacggccuuaccggcaccggcgugcugaccgagagcaacaagaaauuccugcccuuucagcaguucggccgggacaucgacgacaccaccgacgcugugcgggauccccagacccuggagauccuggacaucaccccuugcagcuucggcggcgugagcgugaucaccccaggcaccaacaccagcaaccagguggccgugcuguaccagggcgugaacugcaccgaggugcccguggccauccacgccgaccagcugacacccaccuggcgggucuacagcaccggcagcaacguguuccagacccgggccgguugccugaucggcgccgagcacgugaacaacagcuacgagugcgacauccccaucggcgccggcaucugugccagcuaccagacccagaccaauucacaccggagggcaaggagcguggccagccagagcaucaucgccuacaccaugagccugggcgccgagaacagcguggccuacagcaacaacagcaucgccauccccaucaacuucaccaucagcgugaccaccgagauucugcccgugagcaugaccaagaccagcguggacugcaccauguacaucugcggcgacagcaccgagugcagcaaccugcugcugcaguacggcagcuucugcacccagcugaaccgggcccugaccggcaucgccguggagcaggacaagaacacccaggagguguucgcccaggugaagcagaucuacaagaccccucccaucaaggacuucggcggcuucaacuucagccagauccugcccgaccccagcaagcccagcaagcggagcuucaucgaggaccugcuguucaacaaggugacccuagccgacgccggcuucaucaagcaguacggcgacugccucggcgacauagccgcccgggaccugaucugcgcccagaaguucaacggccugaccgugcugccuccccugcugaccgacgagaugaucgcccaguacaccagcgcccuguuagccggaaccaucaccagcggcuggacuuucggcgcuggagccgcucugcagauccccuucgccaugcagauggccuaccgguucaacggcaucggcgugacccagaacgugcuguacgagaaccagaagcugaucgccaaccaguucaacagcgccaucggcaagauccaggacagccugagcagcaccgcuagcgcccugggcaagcugcaggacguggugaaccagaacgcccaggcccugaacacccuggugaagcagcugagcagcaacuucggcgccaucagcagcgugcugaacgacauccuggcccggcuggacccucccgaggccgaggugcagaucgaccggcugaucacuggccggcugcagagccugcagaccuacgugacccagcagcugauccgggccgccgagauucgggccagcgccaaccuggccgccaccaagaugagcgagugcgugcugggccagagcaagcggguggacuucugcggcaagggcuaccaccugaugagcuuuccccagagcgcaccccacggagugguguuccugcacgugaccuacgugcccgcccaggagaagaacuucaccaccgccccagccaucugccacgacggcaaggcccacuuuccccgggagggcguguucgugagcaacggcacccacugguucgugacccagcggaacuucuacgagccccagaucaucaccacccacaacaccuucgugagcggcaacugcgacguggugaucggcaucgugaacaacaccguguacgauccccugcagcccgagcuggacagcuucaaggaggagcuggacaaguacuucaagaaucacaccagccccgacguggaccugggcgacaucagcggcaucaacgccagcguggugaacauccagaaggagaucgaucggcugaacgagguggccaagaaccugaacgagagccugaucgaccugcaggagcugggcaaguacgagcaguacaucaaguggcccugguacaucuggcugggcuucaucgccggccugaucgccaucgugauggugaccaucaugcugugcugcaugaccagcugcugcagcugccugaagggcuguugcagcugcggcagcugcugcaaguucgacgaggacgacagcgagcccgugcugaagggcgugaagcugcacuacaccugaggacuagucccuguucccagagcccacuuuuuuuucuuuuuuugaaauaaaauagccugucuuucagaucucaaaggcucuuuucagagccaccaaaaaaaaaaaaaaaaaaaaaaaaaaaaaaaaaaaaaaaaaaaaaaaaaaaaaaaaaaaaaaaaaaaaaaaaaaaaaaaaaaaaaaaaaaaaaaaaaaaaa

SEQ ID NO: 23566 - RNA, 4094 nt, Artificial Sequence
  SARS-CoV-2/Wuhan/WIV05/2019__EPI_ISL_402128 spike protein mRNA gc (1-1273)(K986P_V987P_K986P_V987P_K417N_E484K_N501Y_D614G)
aggagagucccgcagucggcguccagcggcucugcuuguucgugugugugucguugcaggccuuauucaagcuuaccauguucguguuccuggugcugcugccccuggugagcagccagugcgugaaccugaccacccggacccagcugccaccagccuacaccaacagcuucacccggggcgucuacuaccccgacaagguguuccggagcagcguccugcacagcacccaggaccuguuccugcccuucuucagcaacgugaccugguuccacgccauccacgugagcggcaccaacggcaccaagcgguucgacaaccccgugcugcccuucaacgacggcguguacuucgccagcaccgagaagagcaacaucauccggggcuggaucuucggcaccacccuggacagcaagacccagagccugcugaucgugaauaacgccaccaacguggugaucaaggugugcgaguuccaguucugcaacgaccccuuccugggcguguacuaccacaagaacaacaagagcuggauggagagcgaguuccggguguacagcagcgccaacaacugcaccuucgaguacgugagccagcccuuccugauggaccuggagggcaagcagggcaacuucaagaaccugcgggaguucguguucaagaacaucgacggcuacuucaagaucuacagcaagcacaccccaaucaaccuggugcgggaucugccccagggcuucucagcccuggagccccugguggaccugcccaucggcaucaacaucacccgguuccagacccugcuggcccugcaccggagcuaccugaccccaggcgacagcagcagcggguggacagcaggcgcggcugcuuacuacgugggcuaccugcagccccggaccuuccugcugaaguacaacgagaacggcaccaucaccgacgccguggacugcgcccuggacccucugagcgagaccaagugcacccugaagagcuucaccguggagaagggcaucuaccagaccagcaacuuccgggugcagcccaccgagagcaucgugcgguuccccaacaucaccaaccugugccccuucggcgagguguucaacgccacccgguucgccagcguguacgccuggaaccggaagcggaucagcaacugcguggccgacuacagcgugcuguacaacagcgccagcuucagcaccuucaagugcuacggcgugagccccaccaagcugaacgaccugugcuucaccaacguguacgccgacagcuucgugauccguggcgacgaggugcggcagaucgcacccggccagacaggcaacaucgccgacuacaacuacaagcugcccgacgacuucaccggcugcgugaucgccuggaacagcaacaaccucgacagcaaggugggcggcaacuacaacuaccuguaccggcuguuccggaagagcaaccugaagcccuucgagcgggacaucagcaccgagaucuaccaagccggcuccaccccuugcaacggcgugaagggcuucaacugcuacuucccucugcagagcuacggcuuccagcccaccuacggcgugggcuaccagcccuaccgggugguggugcugagcuucgagcugcugcacgccccagccaccguguguggccccaagaagagcaccaaccuggugaagaacaagugcgugaacuucaacuucaacggccuuaccggcaccggcgugcugaccgagagcaacaagaaauuccugcccuuucagcaguucggccgggacaucgccgacaccaccgacgcugugcgggauccccagacccuggagauccuggacaucaccccuugcagcuucggcggcgugagcgugaucaccccaggcaccaacaccagcaaccagguggccgugcuguaccagggcgugaacugcaccgaggugcccguggccauccacgccgaccagcugacacccaccuggcgggucuacagcaccggcagcaacguguuccagacccgggccgguugccugaucggcgccgagcacgugaacaacagcuacgagugcgacauccccaucggcgccggcaucugugccagcuaccagacccagaccaauucaccccggagggcaaggagcguggccagccagagcaucaucgccuacaccaugagccugggcgccgagaacagcguggccuacagcaacaacagcaucgccauccccaccaacuucaccaucagcgugaccaccgagauucugcccgugagcaugaccaagaccagcguggacugcaccauguacaucugcggcgacagcaccgagugcagcaaccugcugcugcaguacggcagcuucugcacccagcugaaccgggcccugaccggcaucgccguggagcaggacaagaacacccaggagguguucgcccaggugaagcagaucuacaagaccccucccaucaaggacuucggcggcuucaacuucagccagauccugcccgaccccagcaagcccagcaagcggagcuucaucgaggaccugcuguucaacaaggugacccuagccgacgccggcuucaucaagcaguacggcgacugccucggcgacauagccgcccgggaccugaucugcgcccagaaguucaacggccugaccgugcugccuccccugcugaccgacgagaugaucgcccaguacaccagcgcccuguuagccggaaccaucaccagcggcuggacuuucggcgcuggagccgcucugcagauccccuucgccaugcagauggccuaccgguucaacggcaucggcgugacccagaacgugcuguacgagaaccagaagcugaucgccaaccaguucaacagcgccaucggcaagauccaggacagccugagcagcaccgcuagcgcccugggcaagcugcaggacguggugaaccagaacgcccaggcccugaacacccuggugaagcagcugagcagcaacuucggcgccaucagcagcgugcugaacgacauccugagccggcuggacccucccgaggccgaggugcagaucgaccggcugaucacuggccggcugcagagccugcagaccuacgugacccagcagcugauccgggccgccgagauucgggccagcgccaaccuggccgccaccaagaugagcgagugcgugcugggccagagcaagcggguggacuucugcggcaagggcuaccaccugaugagcuuuccccagagcgcaccccacggagugguguuccugcacgugaccuacgugcccgcccaggagaagaacuucaccaccgccccagccaucugccacgacggcaaggcccacuuuccccgggagggcguguucgugagcaacggcacccacugguucgugacccagcggaacuucuacgagccccagaucaucaccaccgacaacaccuucgugagcggcaacugcgacguggugaucggcaucgugaacaacaccguguacgauccccugcagcccgagcuggacagcuucaaggaggagcuggacaaguacuucaagaaucacaccagccccgacguggaccugggcgacaucagcggcaucaacgccagcguggugaacauccagaaggagaucgaucggcugaacgagguggccaagaaccugaacgagagccugaucgaccugcaggagcugggcaaguacgagcaguacaucaaguggcccugguacaucuggcugggcuucaucgccggccugaucgccaucgugauggugaccaucaugcugugcugcaugaccagcugcugcagcugccugaagggcuguugcagcugcggcagcugcugcaaguucgacgaggacgacagcgagcccgugcugaagggcgugaagcugcacuacaccugaggacuagucccuguucccagagcccacuuuuuuuucuuuuuuugaaauaaaauagccugucuuucagaucucaaaggcucuuuucagagccaccaaaaaaaaaaaaaaaaaaaaaaaaaaaaaaaaaaaaaaaaaaaaaaaaaaaaaaaaaaaaaaaaaaaaaaaaaaaaaaaaaaaaaaaaaaaaaaaaaaaaa

SEQ ID NO: 23567 - RNA, 4085 nt, Artificial Sequence
  SARS-CoV-2/Wuhan/WIV05/2019__EPI_ISL_402128 spike protein mRNA gc (1-1273)(K986P_V987P_K986P_V987P_L18F_D80A_D215G_L242del_A243del_ L244del_R246I_K417N_E484K_N501Y_D614G_A701V)
aggagagucccgcagucggcguccagcggcucugcuuguucgugugugugucguugcaggccuuauucaagcuuaccauguucguguuccuggugcugcugccccuggugagcagccagugcgugaacuucaccacccggacccagcugccaccagccuacaccaacagcuucacccggggcgucuacuaccccgacaagguguuccggagcagcguccugcacagcacccaggaccuguuccugcccuucuucagcaacgugaccugguuccacgccauccacgugagcggcaccaacggcaccaagcgguucgccaaccccgugcugcccuucaacgacggcguguacuucgccagcaccgagaagagcaacaucauccggggcuggaucuucggcaccacccuggacagcaagacccagagccugcugaucgugaauaacgccaccaacguggugaucaaggugugcgaguuccaguucugcaacgaccccuuccugggcguguacuaccacaagaacaacaagagcuggauggagagcgaguuccggguguacagcagcgccaacaacugcaccuucgaguacgugagccagcccuuccugauggaccuggagggcaagcagggcaacuucaagaaccugcgggaguucguguucaagaacaucgacggcuacuucaagaucuacagcaagcacaccccaaucaaccuggugcggggccugccccagggcuucucagcccuggagccccugguggaccugcccaucggcaucaacaucacccgguuccagacccugcacaucagcuaccugaccccaggcgacagcagcagcggguggacagcaggcgcggcugcuuacuacgugggcuaccugcagccccggaccuuccugcugaaguacaacgagaacggcaccaucaccgacgccguggacugcgcccuggacccucugagcgagaccaagugcacccugaagagcuucaccguggagaagggcaucuaccagaccagcaacuuccgggugcagcccaccgagagcaucgugcgguuccccaacaucaccaaccugugccccuucggcgagguguucaacgccacccgguucgccagcguguacgccuggaaccggaagcggaucagcaacugcguggccgacuacagcgugcuguacaacagcgccagcuucagcaccuucaagugcuacggcgugagccccaccaagcugaacgaccugugcuucaccaacguguacgccgacagcuucgugauccguggcgacgaggugcggcagaucgcacccggccagacaggcaacaucgccgacuacaacuacaagcugcccgacgacuucaccggcugcgugaucgccuggaacagcaacaaccucgacagcaaggugggcggcaacuacaacuaccuguaccggcuguuccggaagagcaaccugaagcccuucgagcgggacaucagcaccgagaucuaccaagccggcuccaccccuugcaacggcgugaagggcuucaacugcuacuucccucugcagagcuacggcuuccagcccaccuacggcgugggcuaccagcccuaccgggugguggugcugagcuucgagcugcugcacgccccagccaccguguguggccccaagaagagcaccaaccuggugaagaacaagugcgugaacuucaacuucaacggccuuaccggcaccggcgugcugaccgagagcaacaagaaauuccugcccuuucagcaguucggccgggacaucgccgacaccaccgacgcugugcgggauccccagacccuggagauccuggacaucaccccuugcagcuucggcggcgugagcgugaucaccccaggcaccaacaccagcaaccagguggccgugcuguaccagggcgugaacugcaccgaggugcccguggccauccacgccgaccagcugacacccaccuggcgggucuacagcaccggcagcaacguguuccagacccgggccgguugccugaucggcgccgagcacgugaacaacagcuacgagugcgacauccccaucggcgccggcaucugugccagcuaccagacccagaccaauucaccccggagggcaaggagcguggccagccagagcaucaucgccuacaccaugagccugggcguggagaacagcguggccuacagcaacaacagcaucgccauccccaccaacuucaccaucagcgugaccaccgagauucugcccgugagcaugaccaagaccagcguggacugcaccauguacaucugcggcgacagcaccgagugcagcaaccugcugcugcaguacggcagcuucugcacccagcugaaccgggcccugaccggcaucgccguggagcaggacaagaacacccaggagguguucgcccaggugaagcagaucuacaagaccccucccaucaaggacuucggcggcuucaacuucagccagauccugcccgaccccagcaagcccagcaagcggagcuucaucgaggaccugcuguucaacaaggugacccuagccgacgccggcuucaucaagcaguacggcgacugccucggcgacauagccgcccgggaccugaucugcgcccagaaguucaacggccugaccgugcugccuccccugcugaccgacgagaugaucgcccaguacaccagcgcccuguuagccggaaccaucaccagcggcuggacuuucggcgcuggagccgcucugcagauccccuucgccaugcagauggccuaccgguucaacggcaucggcgugacccagaacgugcuguacgagaaccagaagcugaucgccaaccaguucaacagcgccaucggcaagauccaggacagccugagcagcaccgcuagcgcccugggcaagcugcaggacguggugaaccagaacgcccaggcccugaacacccuggugaagcagcugagcagcaacuucggcgccaucagcagcgugcugaacgacauccugagccggcuggacccucccgaggccgaggugcagaucgaccggcugaucacuggccggcugcagagccugcagaccuacgugacccagcagcugauccgggccgccgagauucgggccagcgccaaccuggccgccaccaagaugagcgagugcgugcugggccagagcaagcggguggacuucugcggcaagggcuaccaccugaugagcuuuccccagagcgcaccccacggagugguguuccugcacgugaccuacgugcccgcccaggagaagaacuucaccaccgccccagccaucugccacgacggcaaggcccacuuuccccgggagggcguguucgugagcaacggcacccacugguucgugacccagcggaacuucuacgagccccagaucaucaccaccgacaacaccuucgugagcggcaacugcgacguggugaucggcaucgugaacaacaccguguacgauccccugcagcccgagcuggacagcuucaaggaggagcuggacaaguacuucaagaaucacaccagccccgacguggaccugggcgacaucagcggcaucaacgccagcguggugaacauccagaaggagaucgaucggcugaacgagguggccaagaaccugaacgagagccugaucgaccugcaggagcugggcaaguacgagcaguacaucaaguggcccugguacaucuggcugggcuucaucgccggccugaucgccaucgugauggugaccaucaugcugugcugcaugaccagcugcugcagcugccugaagggcuguugcagcugcggcagcugcugcaaguucgacgaggacgacagcgagcccgugcugaagggcgugaagcugcacuacaccugaggacuagucccuguucccagagcccacuuuuuuuucuuuuuuugaaauaaaauagccugucuuucagaucucaaaggcucuuuucagagccaccaaaaaaaaaaaaaaaaaaaaaaaaaaaaaaaaaaaaaaaaaaaaaaaaaaaaaaaaaaaaaaaaaaaaaaaaaaaaaaaaaaaaaaaaaaaaaaaaaaaaa

SEQ ID NO: 23568 - RNA, 4094 nt, Artificial Sequence
  SARS-CoV-2/Wuhan/WIV05/2019__EPI_ISL_402128 spike protein mRNA gc (1-1273)(K986P_V987P_K986P_V987P_E484K_D614G)
aggagagucccgcagucggcguccagcggcucugcuuguucgugugugugucguugcaggccuuauucaagcuuaccauguucguguuccuggugcugcugccccuggugagcagccagugcgugaaccugaccacccggacccagcugccaccagccuacaccaacagcuucacccggggcgucuacuaccccgacaagguguuccggagcagcguccugcacagcacccaggaccuguuccugcccuucuucagcaacgugaccugguuccacgccauccacgugagcggcaccaacggcaccaagcgguucgacaaccccgugcugcccuucaacgacggcguguacuucgccagcaccgagaagagcaacaucauccggggcuggaucuucggcaccacccuggacagcaagacccagagccugcugaucgugaauaacgccaccaacguggugaucaaggugugcgaguuccaguucugcaacgaccccuuccugggcguguacuaccacaagaacaacaagagcuggauggagagcgaguuccggguguacagcagcgccaacaacugcaccuucgaguacgugagccagcccuuccugauggaccuggagggcaagcagggcaacuucaagaaccugcgggaguucguguucaagaacaucgacggcuacuucaagaucuacagcaagcacaccccaaucaaccuggugcgggaucugccccagggcuucucagcccuggagccccugguggaccugcccaucggcaucaacaucacccgguuccagacccugcuggcccugcaccggagcuaccugaccccaggcgacagcagcagcggguggacagcaggcgcggcugcuuacuacgugggcuaccugcagccccggaccuuccugcugaaguacaacgagaacggcaccaucaccgacgccguggacugcgcccuggacccucugagcgagaccaagugcacccugaagagcuucaccguggagaagggcaucuaccagaccagcaacuuccgggugcagcccaccgagagcaucgugcgguuccccaacaucaccaaccugugccccuucggcgagguguucaacgccacccgguucgccagcguguacgccuggaaccggaagcggaucagcaacugcguggccgacuacagcgugcuguacaacagcgccagcuucagcaccuucaagugcuacggcgugagccccaccaagcugaacgaccugugcuucaccaacguguacgccgacagcuucgugauccguggcgacgaggugcggcagaucgcacccggccagacaggcaagaucgccgacuacaacuacaagcugcccgacgacuucaccggcugcgugaucgccuggaacagcaacaaccucgacagcaaggugggcggcaacuacaacuaccuguaccggcuguuccggaagagcaaccugaagcccuucgagcgggacaucagcaccgagaucuaccaagccggcuccaccccuugcaacggcgugaagggcuucaacugcuacuucccucugcagagcuacggcuuccagcccaccaacggcgugggcuaccagcccuaccgggugguggugcugagcuucgagcugcugcacgccccagccaccguguguggccccaagaagagcaccaaccuggugaagaacaagugcgugaacuucaacuucaacggccuuaccggcaccggcgugcugaccgagagcaacaagaaauuccugcccuuucagcaguucggccgggacaucgccgacaccaccgacgcugugcgggauccccagacccuggagauccuggacaucaccccuugcagcuucggcggcgugagcgugaucaccccaggcaccaacaccagcaaccagguggccgugcuguaccagggcgugaacugcaccgaggugcccguggccauccacgccgaccagcugacacccaccuggcgggucuacagcaccggcagcaacguguuccagacccgggccgguugccugaucggcgccgagcacgugaacaacagcuacgagugcgacauccccaucggcgccggcaucugugccagcuaccagacccagaccaauucaccccggagggcaaggagcguggccagccagagcaucaucgccuacaccaugagccugggcgccgagaacagcguggccuacagcaacaacagcaucgccauccccaccaacuucaccaucagcgugaccaccgagauucugcccgugagcaugaccaagaccagcguggacugcaccauguacaucugcggcgacagcaccgagugcagcaaccugcugcugcaguacggcagcuucugcacccagcugaaccgggcccugaccggcaucgccguggagcaggacaagaacacccaggagguguucgcccaggugaagcagaucuacaagaccccucccaucaaggacuucggcggcuucaacuucagccagauccugcccgaccccagcaagcccagcaagcggagcuucaucgaggaccugcuguucaacaaggugacccuagccgacgccggcuucaucaagcaguacggcgacugccucggcgacauagccgcccgggaccugaucugcgcccagaaguucaacggccugaccgugcugccuccccugcugaccgacgagaugaucgcccaguacaccagcgcccuguuagccggaaccaucaccagcggcuggacuuucggcgcuggagccgcucugcagauccccuucgccaugcagauggccuaccgguucaacggcaucggcgugacccagaacgugcuguacgagaaccagaagcugaucgccaaccaguucaacagcgccaucggcaagauccaggacagccugagcagcaccgcuagcgcccugggcaagcugcaggacguggugaaccagaacgcccaggcccugaacacccuggugaagcagcugagcagcaacuucggcgccaucagcagcgugcugaacgacauccugagccggcuggacccucccgaggccgaggugcagaucgaccggcugaucacuggccggcugcagagccugcagaccuacgugacccagcagcugauccgggccgccgagauucgggccagcgccaaccuggccgccaccaagaugagcgagugcgugcugggccagagcaagcggguggacuucugcggcaagggcuaccaccugaugagcuuuccccagagcgcaccccacggagugguguuccugcacgugaccuacgugcccgcccaggagaagaacuucaccaccgccccagccaucugccacgacggcaaggcccacuuuccccgggagggcguguucgugagcaacggcacccacugguucgugacccagcggaacuucuacgagccccagaucaucaccaccgacaacaccuucgugagcggcaacugcgacguggugaucggcaucgugaacaacaccguguacgauccccugcagcccgagcuggacagcuucaaggaggagcuggacaaguacuucaagaaucacaccagccccgacguggaccugggcgacaucagcggcaucaacgccagcguggugaacauccagaaggagaucgaucggcugaacgagguggccaagaaccugaacgagagccugaucgaccugcaggagcugggcaaguacgagcaguacaucaaguggcccugguacaucuggcugggcuucaucgccggccugaucgccaucgugauggugaccaucaugcugugcugcaugaccagcugcugcagcugccugaagggcuguugcagcugcggcagcugcugcaaguucgacgaggacgacagcgagcccgugcugaagggcgugaagcugcacuacaccugaggacuagucccuguucccagagcccacuuuuuuuucuuuuuuugaaauaaaauagccugucuuucagaucucaaaggcucuuuucagagccaccaaaaaaaaaaaaaaaaaaaaaaaaaaaaaaaaaaaaaaaaaaaaaaaaaaaaaaaaaaaaaaaaaaaaaaaaaaaaaaaaaaaaaaaaaaaaaaaaaaaaa

SEQ ID NO: 23569 - RNA, 4094 nt, Artificial Sequence
  SARS-CoV-2/Wuhan/WIV05/2019__EPI_ISL_402128 spike protein mRNA gc (1-1273)(K986P_V987P_K986P_V987P_L18F_T20N_P26S_D138Y_R190S_K417T _E484K_N501Y_D614G_H655Y_T1027I)
aggagagucccgcagucggcguccagcggcucugcuuguucgugugugugucguugcaggccuuauucaagcuuaccauguucguguuccuggugcugcugccccuggugagcagccagugcgugaacuucaccaaccggacccagcugccaagcgccuacaccaacagcuucacccggggcgucuacuaccccgacaagguguuccggagcagcguccugcacagcacccaggaccuguuccugcccuucuucagcaacgugaccugguuccacgccauccacgugagcggcaccaacggcaccaagcgguucgacaaccccgugcugcccuucaacgacggcguguacuucgccagcaccgagaagagcaacaucauccggggcuggaucuucggcaccacccuggacagcaagacccagagccugcugaucgugaauaacgccaccaacguggugaucaaggugugcgaguuccaguucugcaacuaccccuuccugggcguguacuaccacaagaacaacaagagcuggauggagagcgaguuccggguguacagcagcgccaacaacugcaccuucgaguacgugagccagcccuuccugauggaccuggagggcaagcagggcaacuucaagaaccugagcgaguucguguucaagaacaucgacggcuacuucaagaucuacagcaagcacaccccaaucaaccuggugcgggaucugccccagggcuucucagcccuggagccccugguggaccugcccaucggcaucaacaucacccgguuccagacccugcuggcccugcaccggagcuaccugaccccaggcgacagcagcagcggguggacagcaggcgcggcugcuuacuacgugggcuaccugcagccccggaccuuccugcugaaguacaacgagaacggcaccaucaccgacgccguggacugcgcccuggacccucugagcgagaccaagugcacccugaagagcuucaccguggagaagggcaucuaccagaccagcaacuuccgggugcagcccaccgagagcaucgugcgguuccccaacaucaccaaccugugccccuucggcgagguguucaacgccacccgguucgccagcguguacgccuggaaccggaagcggaucagcaacugcguggccgacuacagcgugcuguacaacagcgccagcuucagcaccuucaagugcuacggcgugagccccaccaagcugaacgaccugugcuucaccaacguguacgccgacagcuucgugauccguggcgacgaggugcggcagaucgcacccggccagacaggcaccaucgccgacuacaacuacaagcugcccgacgacuucaccggcugcgugaucgccuggaacagcaacaaccucgacagcaaggugggcggcaacuacaacuaccuguaccggcuguuccggaagagcaaccugaagcccuucgagcgggacaucagcaccgagaucuaccaagccggcuccaccccuugcaacggcgugaagggcuucaacugcuacuucccucugcagagcuacggcuuccagcccaccuacggcgugggcuaccagcccuaccgggugguggugcugagcuucgagcugcugcacgccccagccaccguguguggccccaagaagagcaccaaccuggugaagaacaagugcgugaacuucaacuucaacggccuuaccggcaccggcgugcugaccgagagcaacaagaaauuccugcccuuucagcaguucggccgggacaucgccgacaccaccgacgcugugcgggauccccagacccuggagauccuggacaucaccccuugcagcuucggcggcgugagcgugaucaccccaggcaccaacaccagcaaccagguggccgugcuguaccagggcgugaacugcaccgaggugcccguggccauccacgccgaccagcugacacccaccuggcgggucuacagcaccggcagcaacguguuccagacccgggccgguugccugaucggcgccgaguacgugaacaacagcuacgagugcgacauccccaucggcgccggcaucugugccagcuaccagacccagaccaauucaccccggagggcaaggagcguggccagccagagcaucaucgccuacaccaugagccugggcgccgagaacagcguggccuacagcaacaacagcaucgccauccccaccaacuucaccaucagcgugaccaccgagauucugcccgugagcaugaccaagaccagcguggacugcaccauguacaucugcggcgacagcaccgagugcagcaaccugcugcugcaguacggcagcuucugcacccagcugaaccgggcccugaccggcaucgccguggagcaggacaagaacacccaggagguguucgcccaggugaagcagaucuacaagaccccucccaucaaggacuucggcggcuucaacuucagccagauccugcccgaccccagcaagcccagcaagcggagcuucaucgaggaccugcuguucaacaaggugacccuagccgacgccggcuucaucaagcaguacggcgacugccucggcgacauagccgcccgggaccugaucugcgcccagaaguucaacggccugaccgugcugccuccccugcugaccgacgagaugaucgcccaguacaccagcgcccuguuagccggaaccaucaccagcggcuggacuuucggcgcuggagccgcucugcagauccccuucgccaugcagauggccuaccgguucaacggcaucggcgugacccagaacgugcuguacgagaaccagaagcugaucgccaaccaguucaacagcgccaucggcaagauccaggacagccugagcagcaccgcuagcgcccugggcaagcugcaggacguggugaaccagaacgcccaggcccugaacacccuggugaagcagcugagcagcaacuucggcgccaucagcagcgugcugaacgacauccugagccggcuggacccucccgaggccgaggugcagaucgaccggcugaucacuggccggcugcagagccugcagaccuacgugacccagcagcugauccgggccgccgagauucgggccagcgccaaccuggccgccaucaagaugagcgagugcgugcugggccagagcaagcggguggacuucugcggcaagggcuaccaccugaugagcuuuccccagagcgcaccccacggagugguguuccugcacgugaccuacgugcccgcccaggagaagaacuucaccaccgccccagccaucugccacgacggcaaggcccacuuuccccgggagggcguguucgugagcaacggcacccacugguucgugacccagcggaacuucuacgagccccagaucaucaccaccgacaacaccuucgugagcggcaacugcgacguggugaucggcaucgugaacaacaccguguacgauccccugcagcccgagcuggacagcuucaaggaggagcuggacaaguacuucaagaaucacaccagccccgacguggaccugggcgacaucagcggcaucaacgccagcguggugaacauccagaaggagaucgaucggcugaacgagguggccaagaaccugaacgagagccugaucgaccugcaggagcugggcaaguacgagcaguacaucaaguggcccugguacaucuggcugggcuucaucgccggccugaucgccaucgugauggugaccaucaugcugugcugcaugaccagcugcugcagcugccugaagggcuguugcagcugcggcagcugcugcaaguucgacgaggacgacagcgagcccgugcugaagggcgugaagcugcacuacaccugaggacuagucccuguucccagagcccacuuuuuuuucuuuuuuugaaauaaaauagccugucuuucagaucucaaaggcucuuuucagagccaccaaaaaaaaaaaaaaaaaaaaaaaaaaaaaaaaaaaaaaaaaaaaaaaaaaaaaaaaaaaaaaaaaaaaaaaaaaaaaaaaaaaaaaaaaaaaaaaaaaaaa

SEQ ID NO: 23570 - RNA, 4094 nt, Artificial Sequence
  SARS-CoV-2/Wuhan/WIV05/2019__EPI_ISL_402128 spike protein mRNA gc (1-1273)(K986P_V987P_K986P_V987P_S13I_W152C_L452R_D614G)
aggagagucccgcagucggcguccagcggcucugcuuguucgugugugugucguugcaggccuuauucaagcuuaccauguucguguuccuggugcugcugccccuggugagcauccagugcgugaaccugaccacccggacccagcugccaccagccuacaccaacagcuucacccggggcgucuacuaccccgacaagguguuccggagcagcguccugcacagcacccaggaccuguuccugcccuucuucagcaacgugaccugguuccacgccauccacgugagcggcaccaacggcaccaagcgguucgacaaccccgugcugcccuucaacgacggcguguacuucgccagcaccgagaagagcaacaucauccggggcuggaucuucggcaccacccuggacagcaagacccagagccugcugaucgugaauaacgccaccaacguggugaucaaggugugcgaguuccaguucugcaacgaccccuuccugggcguguacuaccacaagaacaacaagagcugcauggagagcgaguuccggguguacagcagcgccaacaacugcaccuucgaguacgugagccagcccuuccugauggaccuggagggcaagcagggcaacuucaagaaccugcgggaguucguguucaagaacaucgacggcuacuucaagaucuacagcaagcacaccccaaucaaccuggugcgggaucugccccagggcuucucagcccuggagccccugguggaccugcccaucggcaucaacaucacccgguuccagacccugcuggcccugcaccggagcuaccugaccccaggcgacagcagcagcggguggacagcaggcgcggcugcuuacuacgugggcuaccugcagccccggaccuuccugcugaaguacaacgagaacggcaccaucaccgacgccguggacugcgcccuggacccucugagcgagaccaagugcacccugaagagcuucaccguggagaagggcaucuaccagaccagcaacuuccgggugcagcccaccgagagcaucgugcgguuccccaacaucaccaaccugugccccuucggcgagguguucaacgccacccgguucgccagcguguacgccuggaaccggaagcggaucagcaacugcguggccgacuacagcgugcuguacaacagcgccagcuucagcaccuucaagugcuacggcgugagccccaccaagcugaacgaccugugcuucaccaacguguacgccgacagcuucgugauccguggcgacgaggugcggcagaucgcacccggccagacaggcaagaucgccgacuacaacuacaagcugcccgacgacuucaccggcugcgugaucgccuggaacagcaacaaccucgacagcaaggugggcggcaacuacaacuaccgcuaccggcuguuccggaagagcaaccugaagcccuucgagcgggacaucagcaccgagaucuaccaagccggcuccaccccuugcaacggcguggagggcuucaacugcuacuucccucugcagagcuacggcuuccagcccaccaacggcgugggcuaccagcccuaccgggugguggugcugagcuucgagcugcugcacgccccagccaccguguguggccccaagaagagcaccaaccuggugaagaacaagugcgugaacuucaacuucaacggccuuaccggcaccggcgugcugaccgagagcaacaagaaauuccugcccuuucagcaguucggccgggacaucgccgacaccaccgacgcugugcgggauccccagacccuggagauccuggacaucaccccuugcagcuucggcggcgugagcgugaucaccccaggcaccaacaccagcaaccagguggccgugcuguaccagggcgugaacugcaccgaggugcccguggccauccacgccgaccagcugacacccaccuggcgggucuacagcaccggcagcaacguguuccagacccgggccgguugccugaucggcgccgagcacgugaacaacagcuacgagugcgacauccccaucggcgccggcaucugugccagcuaccagacccagaccaauucaccccggagggcaaggagcguggccagccagagcaucaucgccuacaccaugagccugggcgccgagaacagcguggccuacagcaacaacagcaucgccauccccaccaacuucaccaucagcgugaccaccgagauucugcccgugagcaugaccaagaccagcguggacugcaccauguacaucugcggcgacagcaccgagugcagcaaccugcugcugcaguacggcagcuucugcacccagcugaaccgggcccugaccggcaucgccguggagcaggacaagaacacccaggagguguucgcccaggugaagcagaucuacaagaccccucccaucaaggacuucggcggcuucaacuucagccagauccugcccgaccccagcaagcccagcaagcggagcuucaucgaggaccugcuguucaacaaggugacccuagccgacgccggcuucaucaagcaguacggcgacugccucggcgacauagccgcccgggaccugaucugcgcccagaaguucaacggccugaccgugcugccuccccugcugaccgacgagaugaucgcccaguacaccagcgcccuguuagccggaaccaucaccagcggcuggacuuucggcgcuggagccgcucugcagauccccuucgccaugcagauggccuaccgguucaacggcaucggcgugacccagaacgugcuguacgagaaccagaagcugaucgccaaccaguucaacagcgccaucggcaagauccaggacagccugagcagcaccgcuagcgcccugggcaagcugcaggacguggugaaccagaacgcccaggcccugaacacccuggugaagcagcugagcagcaacuucggcgccaucagcagcgugcugaacgacauccugagccggcuggacccucccgaggccgaggugcagaucgaccggcugaucacuggccggcugcagagccugcagaccuacgugacccagcagcugauccgggccgccgagauucgggccagcgccaaccuggccgccaccaagaugagcgagugcgugcugggccagagcaagcggguggacuucugcggcaagggcuaccaccugaugagcuuuccccagagcgcaccccacggagugguguuccugcacgugaccuacgugcccgcccaggagaagaacuucaccaccgccccagccaucugccacgacggcaaggcccacuuuccccgggagggcguguucgugagcaacggcacccacugguucgugacccagcggaacuucuacgagccccagaucaucaccaccgacaacaccuucgugagcggcaacugcgacguggugaucggcaucgugaacaacaccguguacgauccccugcagcccgagcuggacagcuucaaggaggagcuggacaaguacuucaagaaucacaccagccccgacguggaccugggcgacaucagcggcaucaacgccagcguggugaacauccagaaggagaucgaucggcugaacgagguggccaagaaccugaacgagagccugaucgaccugcaggagcugggcaaguacgagcaguacaucaaguggcccugguacaucuggcugggcuucaucgccggccugaucgccaucgugauggugaccaucaugcugugcugcaugaccagcugcugcagcugccugaagggcuguugcagcugcggcagcugcugcaaguucgacgaggacgacagcgagcccgugcugaagggcgugaagcugcacuacaccugaggacuagucccuguucccagagcccacuuuuuuuucuuuuuuugaaauaaaauagccugucuuucagaucucaaaggcucuuuucagagccaccaaaaaaaaaaaaaaaaaaaaaaaaaaaaaaaaaaaaaaaaaaaaaaaaaaaaaaaaaaaaaaaaaaaaaaaaaaaaaaaaaaaaaaaaaaaaaaaaaaaaa

SEQ ID NO: 23571 - RNA, 4094 nt, Artificial Sequence
  SARS-CoV-2/Wuhan/WIV05/2019__EPI_ISL_402128 spike protein mRNA gc (1-1273)(K986P_V987P)
aggagagucccgcagucggcguccagcggcucugcuuguucgugugugugucguugcaggccuuauucaagcuuaccauguucguguuccuggugcugcugccccuggugagcagccagugcgugaaccugaccacccggacccagcugcccccugccuacaccaacagcuucacccggggcguguacuaccccgacaagguguuccggagcagcgugcugcacagcacccaggaccuguuccugcccuucuucagcaacgugaccugguuccacgccauccacgugagcggcaccaacggcaccaagcgguucgacaacccagugcugcccuucaacgacggcguguacuucgccagcaccgagaagucaaacaucauccggggcuggaucuucggcaccacccuggacagcaagacacagagccugcugaucgugaacaacgccaccaacguggugaucaaggugugcgaguuucaguucugcaacgaccccuuccugggcguguacuaccacaagaacaacaagagcuggauggagagcgaguuccgggucuacagcagcgcuaacaauugcaccuucgaguacgugagccagcccuuccugauggaccucgagggcaagcagggcaacuucaagaaccugcgggaguucguguucaagaacaucgauggcuacuucaagaucuacagcaagcacacccccaucaaccuggugcgggaccugccccagggauucagcgcccuggagccucugguggaccugcccaucggcaucaacaucaccagguuccagacccugcuggcccugcaccggagcuaccugacccccggcgacagcagcagcggcuggaccgccggcgccgccgcauacuacgugggcuaccugcagccacggaccuuccugcugaaguacaacgagaacggcaccaucaccgacgccguggacugcgcccuggacccccugagcgagaccaagugcacccuaaagagcuucaccguggagaagggcaucuaccagaccagcaacuuccgggugcagcccacugagagcaucgugcgguuccccaacauuaccaaccugugucccuucggcgagguguucaacgccacccgguucgccagcguguacgccuggaaccggaagcggaucagcaacugcguggccgacuacagcgugcuguacaacagcgccagcuucagcaccuucaagugcuacggcgugagcccuaccaagcugaacgaccugugcuucaccaacguguacgcugacagcuucgugauccggggcgacgaggugcggcagaucgcccccggccagaccggcaagaucgccgacuacaacuacaagcugcccgacgacuucaccggcugcgugaucgccuggaacagcaacaaccuggacagcaaggugggcggcaacuacaacuaccuguaccggcuguuccguaagagcaaccugaagccauucgagcgggacaucagcaccgagaucuaccaggccggcagcacccccugcaacgguguggagggcuuuaacugcuacuucccccugcagagcuacggcuuccagcccaccaacggcgugggcuaccagcccuaccgggugguggugcugagcuucgagcugcugcacgcccccgccaccgugugcggcccuaaaaagagcaccaaccuggugaagaacaagugcgugaacuucaauuucaacggccugaccggcaccggcgugcugaccgagagcaacaagaaguuccugcccuuccagcaguucggccgggauaucgccgacaccaccgacgcagugcgggacccccagacccuggagauccuggacaucaccccaugcagcuucggcggcgugagcgucaucacccccggcacaaacaccagcaaccagguggccgugcuguaccaggacgugaacugcaccgaggugcccguggccauccacgccgaccagcugacccccaccuggcggguguacagcaccggaagcaacguguuccagacccgggccggcugccugaucggcgccgagcacgugaacaacuccuacgagugcgacauccccaucggcgcuggcaucugcgccagcuaccagacccagaccaacagcccccggcgggcccggagcguggccagccagagcaucaucgccuacaccaugagcuuaggcgccgagaacagcguggccuacagcaacaacagcaucgcgaucccuaccaacuucaccaucagcgugaccaccgagauacugcccgugagcaugaccaagaccagcguggacuguaccauguacaucugcggcgacagcaccgagugcagcaaccugcugcugcaguacggcagcuucugcacccagcugaaccgggcccugaccggcaucgccguggagcaggacaagaacacccaagagguguucgcccaggugaagcagaucuacaagacucccccaaucaaggacuucggcggcuucaacuucagccagauccugcccgaccccagcaagcccagcaagcggagcuucaucgaggaccugcuguucaacaaggugacccuggccgacgccggcuucaucaagcaguacggcgauugccugggcgacaucgccgcucgggaccugaucugcgcccagaaguucaacgggcugaccgugcugcccccucugcugaccgacgagaugaucgcccaguacaccagcgcccugcuugccggcaccaucaccagcggcuggaccuucggcgccggcgcagcccugcagauccccuucgccaugcagauggccuaccgguucaacggcaucggcgugacccagaacgugcuguacgagaaccagaagcugaucgccaaccaguucaacagcgccaucggcaagauccaggacagccugagcagcaccgccagcgcccugggcaagcugcaggacguggugaaccagaacgcucaggcccugaacacccuggugaagcagcugagcagcaacuucggcgccaucagcucagugcugaaugacauccugagcaggcuggaucccccagaggccgaggugcagaucgaccggcugaucaccggccggcugcagagccugcagaccuacgugacccagcagcugauccgggccgccgagauccgggccagcgccaaccuggcagccaccaagaugagcgagugcgugcugggccagagcaagcggguggacuuuugcggcaagggcuaccaccugaugagcuucccccagagcgcuccccacggcgugguguuccuccacgugacauacguccccgcccaggagaagaacuucaccaccgcccccgccauuugccacgacggcaaggcccacuucccccgggagggcguguucgugagcaacggaacccacugguucgugacccagcggaacuucuacgagccucagaucaucaccaccgacaacaccuucgugagcggcaacugcgacguggugaucggcaucgugaacaacaccguguacgacccccugcagcccgagcuggacagcuucaaggaggagcuggacaaguacuucaagaaccacaccagcccagacguggaccugggcgacaucagcggcaucaacgccagcguggugaacauccagaaggagaucgaccggcugaacgagguggccaagaaccugaacgagagccugaucgaccugcaggagcugggcaaguacgagcaguacaucaaguggcccugguacaucuggcugggcuucaucgccggccugaucgccaucgugauggugaccaucaugcugugcugcaugaccagcugcuguagcugccugaagggcugcugcagcugcggcagcugcugcaaguucgacgaggacgacagcgagcccgugcugaagggcgugaagcugcacuacaccugaggacuagucccuguucccagagcccacuuuuuuuucuuuuuuugaaauaaaauagccugucuuucagaucucaaaggcucuuuucagagccaccaaaaaaaaaaaaaaaaaaaaaaaaaaaaaaaaaaaaaaaaaaaaaaaaaaaaaaaaaaaaaaaaaaaaaaaaaaaaaaaaaaaaaaaaaaaaaaaaaaaaa

SEQ ID NO: 23572 - RNA, 4094 nt, Artificial Sequence
  SARS-CoV-2/Wuhan/WIV05/2019__EPI_ISL_402128 spike protein mRNA gc (1-1273)(K986P_V987P_ D614G)
aggagagucccgcagucggcguccagcggcucugcuuguucgugugugugucguugcaggccuuauucaagcuuaccauguucguguuccuggugcugcugccccuggugagcagccagugcgugaaccugaccacccggacccagcugcccccugccuacaccaacagcuucacccggggcguguacuaccccgacaagguguuccggagcagcgugcugcacagcacccaggaccuguuccugcccuucuucagcaacgugaccugguuccacgccauccacgugagcggcaccaacggcaccaagcgguucgacaacccagugcugcccuucaacgacggcguguacuucgccagcaccgagaagucaaacaucauccggggcuggaucuucggcaccacccuggacagcaagacacagagccugcugaucgugaacaacgccaccaacguggugaucaaggugugcgaguuucaguucugcaacgaccccuuccugggcguguacuaccacaagaacaacaagagcuggauggagagcgaguuccgggucuacagcagcgcuaacaauugcaccuucgaguacgugagccagcccuuccugauggaccucgagggcaagcagggcaacuucaagaaccugcgggaguucguguucaagaacaucgauggcuacuucaagaucuacagcaagcacacccccaucaaccuggugcgggaccugccccagggauucagcgcccuggagccucugguggaccugcccaucggcaucaacaucaccagguuccagacccugcuggcccugcaccggagcuaccugacccccggcgacagcagcagcggcuggaccgccggcgccgccgcauacuacgugggcuaccugcagccacggaccuuccugcugaaguacaacgagaacggcaccaucaccgacgccguggacugcgcccuggacccccugagcgagaccaagugcacccuaaagagcuucaccguggagaagggcaucuaccagaccagcaacuuccgggugcagcccacugagagcaucgugcgguuccccaacauuaccaaccugugucccuucggcgagguguucaacgccacccgguucgccagcguguacgccuggaaccggaagcggaucagcaacugcguggccgacuacagcgugcuguacaacagcgccagcuucagcaccuucaagugcuacggcgugagcccuaccaagcugaacgaccugugcuucaccaacguguacgcugacagcuucgugauccggggcgacgaggugcggcagaucgcccccggccagaccggcaagaucgccgacuacaacuacaagcugcccgacgacuucaccggcugcgugaucgccuggaacagcaacaaccuggacagcaaggugggcggcaacuacaacuaccuguaccggcuguuccguaagagcaaccugaagccauucgagcgggacaucagcaccgagaucuaccaggccggcagcacccccugcaacgguguggagggcuuuaacugcuacuucccccugcagagcuacggcuuccagcccaccaacggcgugggcuaccagcccuaccgggugguggugcugagcuucgagcugcugcacgcccccgccaccgugugcggcccuaaaaagagcaccaaccuggugaagaacaagugcgugaacuucaauuucaacggccugaccggcaccggcgugcugaccgagagcaacaagaaguuccugcccuuccagcaguucggccgggauaucgccgacaccaccgacgcagugcgggacccccagacccuggagauccuggacaucaccccaugcagcuucggcggcgugagcgucaucacccccggcacaaacaccagcaaccagguggccgugcuguaccagggagugaacugcaccgaggugcccguggccauccacgccgaccagcugacccccaccuggcggguguacagcaccggcagcaacguguuccagacccgggccggcugccugaucggcgccgagcacgugaacaacuccuacgagugcgacauccccaucggcgcuggcaucugcgccagcuaccagacccagaccaacagcccccggcgggcccggagcguggccagccagagcaucaucgccuacaccaugagcuuaggcgccgagaacagcguggccuacagcaacaacagcaucgcgaucccuaccaacuucaccaucagcgugaccaccgagauacugcccgugagcaugaccaagaccagcguggacuguaccauguacaucugcggcgacagcaccgagugcagcaaccugcugcugcaguacggcagcuucugcacccagcugaaccgggcccugaccggcaucgccguggagcaggacaagaacacccaagagguguucgcccaggugaagcagaucuacaagacucccccaaucaaggacuucggcggcuucaacuucagccagauccugcccgaccccagcaagcccagcaagcggagcuucaucgaggaccugcuguucaacaaggugacccuggccgacgccggcuucaucaagcaguacggcgacugccugggggauaucgccgcucgggaccugaucugcgcccagaaguucaacggccugaccgugcugcccccucugcugaccgacgagaugaucgcccaguacaccagcgcccugcuugccggcaccaucaccagcggcuggaccuucggcgccggcgcagcccugcagauccccuucgccaugcagauggccuaccgguucaacggcaucggcgugacccagaacgugcuguacgagaaccagaagcugaucgccaaccaguucaacagcgccaucggcaagauccaggacagccugagcagcaccgccagcgcccugggcaagcugcaggacguggugaaccagaacgcucaggcccugaacacccuggugaagcagcugagcagcaacuucggcgccaucagcucagugcugaaugacauccugagcaggcuggaucccccagaggccgaggugcagaucgaccggcugaucaccggccggcugcagagccugcagaccuacgugacccagcagcugauccgggccgccgagauccgggccagcgccaaccuggcagccaccaagaugagcgagugcgugcugggccagagcaagcggguggacuuuugcggcaagggcuaccaccugaugagcuucccccagagcgcuccccacggcgugguguuccuccacgugacauacguccccgcccaggagaagaacuucaccaccgcccccgccauuugccacgacggcaaggcccacuucccccgggagggaguguucgugagcaacggcacccacugguucgugacccagcggaacuucuacgagccucagaucaucaccaccgacaacaccuucgugagcggcaacugcgacguggugaucggcaucgugaacaacaccguguacgacccccugcagcccgagcuggacagcuucaaggaggagcuggacaaguacuucaagaaccacaccagcccagacguggaccugggcgacaucagcggcaucaacgccagcguggugaacauccagaaggagaucgaccggcugaacgagguggccaagaaccugaacgagagccugaucgaccugcaggagcugggcaaguacgagcaguacaucaaguggcccugguacaucuggcugggcuucaucgccggccugaucgccaucgugauggugaccaucaugcugugcugcaugaccagcugcuguagcugccugaagggcugcugcagcugcggcagcugcugcaaguucgacgaggacgacagcgagcccgugcugaagggcgugaagcugcacuacaccugaggacuagucccuguucccagagcccacuuuuuuuucuuuuuuugaaauaaaauagccugucuuucagaucucaaaggcucuuuucagagccaccaaaaaaaaaaaaaaaaaaaaaaaaaaaaaaaaaaaaaaaaaaaaaaaaaaaaaaaaaaaaaaaaaaaaaaaaaaaaaaaaaaaaaaaaaaaaaaaaaaaaa

SEQ ID NO: 23573 - RNA, 4094 nt, Artificial Sequence
  SARS-CoV-2/Wuhan/WIV05/2019__EPI_ISL_402128 spike protein mRNA gc (1-1273)(K986P_V987P_A222V_D614G)
aggagagucccgcagucggcguccagcggcucugcuuguucgugugugugucguugcaggccuuauucaagcuuaccauguucguguuccuggugcugcugccccuggugagcagccagugcgugaaccugaccacccggacccagcugcccccugccuacaccaacagcuucacccggggcguguacuaccccgacaagguguuccggagcagcgugcugcacagcacccaggaccuguuccugcccuucuucagcaacgugaccugguuccacgccauccacgugagcggcaccaacggcaccaagcgguucgacaacccagugcugcccuucaacgacggcguguacuucgccagcaccgagaagucaaacaucauccggggcuggaucuucggcaccacccuggacagcaagacacagagccugcugaucgugaacaacgccaccaacguggugaucaaggugugcgaguuucaguucugcaacgaccccuuccugggcguguacuaccacaagaacaacaagagcuggauggagagcgaguuccgggucuacagcagcgcuaacaauugcaccuucgaguacgugagccagcccuuccugauggaccucgagggcaagcagggcaacuucaagaaccugcgggaguucguguucaagaacaucgauggcuacuucaagaucuacagcaagcacacccccaucaaccuggugcgggaccugccccagggauucagcgugcuggagccucugguggaccugcccaucggcaucaacaucaccagguuccagacccugcuggcccugcaccggagcuaccugacccccggcgacagcagcagcggcuggaccgccggcgccgccgccuacuacgugggcuaccugcagccacggaccuuccugcugaaguacaacgagaacggcaccaucaccgacgcaguggacugcgcccuggacccccugagcgagaccaagugcacccuaaagagcuucaccguggagaagggcaucuaccagaccagcaacuuccgggugcagcccacugagagcaucgugcgguuccccaacauuaccaaccugugucccuucggcgagguguucaacgccacccgguucgccagcguguacgccuggaaccggaagcggaucagcaacugcguggccgacuacagcgugcuguacaacagcgccagcuucagcaccuucaagugcuacggcgugagcccuaccaagcugaacgaccugugcuucaccaacguguacgccgacagcuucgugauccggggcgacgaggugcggcagaucgcucccggccagaccggcaagaucgccgacuacaacuacaagcugcccgacgacuucaccggcugcgugaucgccuggaacagcaacaaccuggacagcaaggugggcggcaacuacaacuaccuguaccggcuguuccguaagagcaaccugaagccauucgagcgggacaucagcaccgagaucuaccaggccggcagcacccccugcaacgguguggagggcuuuaacugcuacuucccccugcagagcuacggcuuccagcccaccaacggcgugggcuaccagcccuaccgggugguggugcugagcuucgagcugcugcacgcccccgccaccgugugcggcccuaaaaagagcaccaaccuggugaagaacaagugcgugaacuucaauuucaacggccugaccggcaccggcgugcugaccgagagcaacaagaaguuccugcccuuccagcaguucggccgggauaucgccgacaccaccgacgccgugcgggacccccagacccuggagauccuggacaucaccccaugcagcuucggcggcgucagcgugaucacccccggcacaaacaccagcaaccagguggcagugcuguaccagggagugaacugcaccgaggugcccguggccauccacgccgaccagcugacccccaccuggcggguguacagcaccggcagcaacguguuccagacccgggccggcugccugaucggcgccgagcacgugaacaacuccuacgagugcgacauccccaucggcgccggcaucugcgcuagcuaccagacccagaccaacagcccccggcgggcccggagcguggccagccagagcaucaucgccuacaccaugagcuuaggcgccgagaacagcguggccuacagcaacaacagcaucgccaucccuaccaacuucaccaucagcgugaccaccgagauacugcccgugagcaugaccaagaccagcguggacuguaccauguacaucugcggcgacagcaccgagugcagcaaccugcugcugcaguacggcagcuucugcacccagcugaaccgggcgcugaccggcaucgccguggagcaggacaagaacacccaagagguguucgcccaggugaagcagaucuacaagacucccccaaucaaggacuucggcggcuucaacuucagccagauccugcccgaccccagcaagcccagcaagcggagcuucaucgaggaccugcuguucaacaaggugacccuggccgacgccggcuucaucaagcaguacggcgacugccugggggauaucgccgcccgggaccugaucugcgcucagaaguucaacggccugaccgugcugcccccucugcugaccgacgagaugaucgcccaguacaccagcgcccugcuugccggcaccaucaccagcggcuggaccuucggcgccggcgccgcacugcagauccccuucgccaugcagauggccuaccgguucaacggcaucggcgugacccagaacgugcuguacgagaaccagaagcugaucgccaaccaguucaacagcgccaucggcaagauccaggacagccugagcagcaccgccagcgcccugggcaagcugcaggacguggugaaccagaacgcccaggcucugaacacccuggugaagcagcugagcagcaacuucggcgccaucagcucagugcugaaugacauccugagcaggcuggaucccccagaggccgaggugcagaucgaccggcugaucaccggccggcugcagagccugcagaccuacgugacccagcagcugauccgggccgccgagauccgggccagcgccaaccuggccgcaaccaagaugagcgagugcgugcugggccagagcaagcggguggacuuuugcggcaagggcuaccaccugaugagcuucccccagagcgcuccccacggcgugguguuccuccacgucacauacgugcccgcccaggagaagaacuucaccaccgcccccgccauuugccacgacggcaaggcccacuucccccgggagggaguguucgugagcaacggcacccacugguucgugacccagcggaacuucuacgagccucagaucaucaccaccgacaacaccuucgugagcggcaacugcgacguggugaucggcaucgugaacaacaccguguacgacccccugcagcccgagcuggacagcuucaaggaggagcuggacaaguacuucaagaaccacaccagcccagacguggaccugggcgacaucagcggcaucaacgccagcguggugaacauccagaaggagaucgaccggcugaacgagguggccaagaaccugaacgagagccugaucgaccugcaggagcugggcaaguacgagcaguacaucaaguggcccugguacaucuggcugggcuucaucgccggccugaucgccaucgugauggugaccaucaugcugugcugcaugaccagcugcuguagcugccugaagggcugcugcagcugcggcagcugcugcaaguucgacgaggacgacagcgagcccgugcugaagggcgugaagcugcacuacaccugaggacuagucccuguucccagagcccacuuuuuuuucuuuuuuugaaauaaaauagccugucuuucagaucucaaaggcucuuuucagagccaccaaaaaaaaaaaaaaaaaaaaaaaaaaaaaaaaaaaaaaaaaaaaaaaaaaaaaaaaaaaaaaaaaaaaaaaaaaaaaaaaaaaaaaaaaaaaaaaaaaaaa

SEQ ID NO: 23574 - RNA, 4094 nt, Artificial Sequence
  SARS-CoV-2/Wuhan/WIV05/2019__EPI_ISL_402128 spike protein mRNA gc (1-1273)(K986P_V987P_N439K_D614G)
aggagagucccgcagucggcguccagcggcucugcuuguucgugugugugucguugcaggccuuauucaagcuuaccauguucguguuccuggugcugcugccccuggugagcagccagugcgugaaccugaccacccggacccagcugcccccugccuacaccaacagcuucacccggggcguguacuaccccgacaagguguuccggagcagcgugcugcacagcacccaggaccuguuccugcccuucuucagcaacgugaccugguuccacgccauccacgugagcggcaccaacggcaccaagcgguucgacaacccagugcugcccuucaacgacggcguguacuucgccagcaccgagaagucaaacaucauccggggcuggaucuucggcaccacccuggacagcaagacacagagccugcugaucgugaacaacgccaccaacguggugaucaaggugugcgaguuucaguucugcaacgaccccuuccugggcguguacuaccacaagaacaacaagagcuggauggagagcgaguuccgggucuacagcagcgcuaacaauugcaccuucgaguacgugagccagcccuuccugauggaccucgagggcaagcagggcaacuucaagaaccugcgggaguucguguucaagaacaucgauggcuacuucaagaucuacagcaagcacacccccaucaaccuggugcgggaccugccccagggauucagcgcccuggagccucugguggaccugcccaucggcaucaacaucaccagguuccagacccugcuggcccugcaccggagcuaccugacccccggcgacagcagcagcggcuggaccgccggcgccgccgcauacuacgugggcuaccugcagccacggaccuuccugcugaaguacaacgagaacggcaccaucaccgacgccguggacugcgcccuggacccccugagcgagaccaagugcacccuaaagagcuucaccguggagaagggcaucuaccagaccagcaacuuccgggugcagcccacugagagcaucgugcgguuccccaacauuaccaaccugugucccuucggcgagguguucaacgccacccgguucgccagcguguacgccuggaaccggaagcggaucagcaacugcguggccgacuacagcgugcuguacaacagcgccagcuucagcaccuucaagugcuacggcgugagcccuaccaagcugaacgaccugugcuucaccaacguguacgcugacagcuucgugauccggggcgacgaggugcggcagaucgcccccggccagaccggcaagaucgccgacuacaacuacaagcugcccgacgacuucaccggcugcgugaucgccuggaacagcaagaaccuggacagcaaggugggcggcaacuacaacuaccuguaccggcuguuccguaagagcaaccugaagccauucgagcgggacaucagcaccgagaucuaccaggccggcagcacccccugcaacgguguggagggcuuuaacugcuacuucccccugcagagcuacggcuuccagcccaccaacggcgugggcuaccagcccuaccgggugguggugcugagcuucgagcugcugcacgcccccgccaccgugugcggcccuaaaaagagcaccaaccuggugaagaacaagugcgugaacuucaacuucaauggccugaccggcaccggcgugcugaccgagagcaacaagaaguuccugcccuuccagcaguucggccgggauaucgccgacaccaccgacgcagugcgggacccccagacccuggagauccuggacaucaccccaugcagcuucggcggcgugagcgucaucacccccggcacaaacaccagcaaccagguggccgugcuguaccagggagugaacugcaccgaggugcccguggccauccacgccgaccagcugacccccaccuggcggguguacagcaccggcagcaacguguuccagacccgggccggcugccugaucggcgccgagcacgugaacaacuccuacgagugcgacauccccaucggcgcuggcaucugcgccagcuaccagacccagaccaacagcccccggcgggcccggagcguggccagccagagcaucaucgccuacaccaugagcuuaggcgccgagaacagcguggccuacagcaacaacagcaucgcgaucccuaccaacuucaccaucagcgugaccaccgagauacugcccgugagcaugaccaagaccagcguggacuguaccauguacaucugcggcgacagcaccgagugcagcaaccugcugcugcaguacggcagcuucugcacccagcugaaccgggcccugaccggcaucgccguggagcaggacaagaacacccaagagguguucgcccaggugaagcagaucuacaagacucccccaaucaaggacuucggcggcuucaacuucagccagauccugcccgaccccagcaagcccagcaagcggagcuucaucgaggaccugcuguucaacaaggugacccuggccgacgccggcuucaucaagcaguacggcgacugccugggggauaucgccgcucgggaccugaucugcgcccagaaguucaacggccugaccgugcugcccccucugcugaccgacgagaugaucgcccaguacaccagcgcccugcuugccggcaccaucaccagcggcuggaccuucggcgccggcgcagcccugcagauccccuucgccaugcagauggccuaccgguucaacggcaucggcgugacccagaacgugcuguacgagaaccagaagcugaucgccaaccaguucaacagcgccaucggcaagauccaggacagccugagcagcaccgccagcgcccugggcaagcugcaggacguggugaaccagaacgcucaggcccugaacacccuggugaagcagcugagcagcaacuucggcgccaucagcucagugcugaacgacauccugagcaggcuggaucccccagaggccgaggugcagaucgaccggcugaucaccggccggcugcagagccugcagaccuacgugacccagcagcugauccgggccgccgagauccgggccagcgccaaucuggcagccaccaagaugagcgagugcgugcugggccagagcaagcggguggacuuuugcggcaagggcuaccaccugaugagcuucccccagagcgcuccccacggcgugguguuccuccacgugacauacguccccgcccaggagaagaacuucaccaccgcccccgccauuugccacgacggcaaggcccacuucccccgggagggaguguucgugagcaacggcacccacugguucgugacccagcggaacuucuacgagccucagaucaucaccaccgacaacaccuucgugagcggcaacugcgacguggugaucggcaucgugaacaacaccguguacgacccccugcagcccgagcuggacagcuucaaggaggagcuggacaaguacuucaagaaccacaccagcccagacguggaccugggcgacaucagcggcaucaacgccagcguggugaacauccagaaggagaucgaccggcugaacgagguggccaagaaccugaacgagagccugaucgaccugcaggagcugggcaaguacgagcaguacaucaaguggcccugguacaucuggcugggcuucaucgccggccugaucgccaucgugauggugaccaucaugcugugcugcaugaccagcugcuguagcugccugaagggcugcugcagcugcggcagcugcugcaaguucgacgaggacgacagcgagcccgugcugaagggcgugaagcugcacuacaccugaggacuagucccuguucccagagcccacuuuuuuuucuuuuuuugaaauaaaauagccugucuuucagaucucaaaggcucuuuucagagccaccaaaaaaaaaaaaaaaaaaaaaaaaaaaaaaaaaaaaaaaaaaaaaaaaaaaaaaaaaaaaaaaaaaaaaaaaaaaaaaaaaaaaaaaaaaaaaaaaaaaaa

SEQ ID NO: 23575 - RNA, 4094 nt, Artificial Sequence
  SARS-CoV-2/Wuhan/WIV05/2019__EPI_ISL_402128 spike protein mRNA gc (1-1273)(K986P_V987P_S477N_D614G)
aggagagucccgcagucggcguccagcggcucugcuuguucgugugugugucguugcaggccuuauucaagcuuaccauguucguguuccuggugcugcugccccuggugagcagccagugcgugaaccugaccacccggacccagcugcccccugccuacaccaacagcuucacccggggcguguacuaccccgacaagguguuccggagcagcgugcugcacagcacccaggaccuguuccugcccuucuucagcaacgugaccugguuccacgccauccacgugagcggcaccaacggcaccaagcgguucgacaacccagugcugcccuucaacgacggcguguacuucgccagcaccgagaagucaaacaucauccggggcuggaucuucggcaccacccuggacagcaagacacagagccugcugaucgugaacaacgccaccaacguggugaucaaggugugcgaguuucaguucugcaacgaccccuuccugggcguguacuaccacaagaacaacaagagcuggauggagagcgaguuccgggucuacagcagcgcuaacaauugcaccuucgaguacgugagccagcccuuccugauggaccucgagggcaagcagggcaacuucaagaaccugcgggaguucguguucaagaacaucgauggcuacuucaagaucuacagcaagcacacccccaucaaccuggugcgggaccugccccagggauucagcgcccuggagccucugguggaccugcccaucggcaucaacaucaccagguuccagacccugcuggcccugcaccggagcuaccugacccccggcgacagcagcagcggcuggaccgccggcgccgccgcauacuacgugggcuaccugcagccacggaccuuccugcugaaguacaacgagaacggcaccaucaccgacgccguggacugcgcccuggacccccugagcgagaccaagugcacccuaaagagcuucaccguggagaagggcaucuaccagaccagcaacuuccgggugcagcccacugagagcaucgugcgguuccccaacauuaccaaccugugucccuucggcgagguguucaacgccacccgguucgccagcguguacgccuggaaccggaagcggaucagcaacugcguggccgacuacagcgugcuguacaacagcgccagcuucagcaccuucaagugcuacggcgugagcccuaccaagcugaacgaccugugcuucaccaacguguacgcugacagcuucgugauccggggcgacgaggugcggcagaucgcccccggccagaccggcaagaucgccgacuacaacuacaagcugcccgacgacuucaccggcugcgugaucgccuggaacagcaacaaccuggacagcaaggugggcggcaacuacaacuaccuguaccggcuguuccguaagagcaaccugaagccauucgagcgggacaucagcaccgagaucuaccaggccggcaacacccccugcaacgguguggagggcuuuaacugcuacuucccccugcagagcuacggcuuccagcccaccaacggcgugggcuaccagcccuaccgggugguggugcugagcuucgagcugcugcacgcccccgccaccgugugcggcccuaaaaagagcaccaaccuggugaagaacaagugcgugaauuucaacuucaacggccugaccggcaccggcgugcugaccgagagcaacaagaaguuccugcccuuccagcaguucggccgggauaucgccgacaccaccgacgcagugcgggacccccagacccuggagauccuggacaucaccccaugcagcuucggcggcgugagcgucaucacccccggcacaaacaccagcaaccagguggccgugcuguaccagggagugaacugcaccgaggugcccguggccauccacgccgaccagcugacccccaccuggcggguguacagcaccggcagcaacguguuccagacccgggccggcugccugaucggcgccgagcacgugaacaacagcuacgagugcgacauccccaucggcgcuggcaucugcgccuccuaccagacccagaccaacagcccccggcgggcccggagcguggccagccagagcaucaucgccuacaccaugagcuuaggcgccgagaacagcguggccuacagcaacaacagcaucgcgaucccuaccaacuucaccaucagcgugaccaccgagauacugcccgugagcaugaccaagaccagcguggacuguaccauguacaucugcggcgacagcaccgagugcagcaaccugcugcugcaguacggcagcuucugcacccagcugaaccgggcccugaccggcaucgccguggagcaggacaagaacacccaagagguguucgcccaggugaagcagaucuacaagacucccccaaucaaggacuucggcggcuucaacuucagccagauccugcccgaccccagcaagcccagcaagcggagcuucaucgaggaccugcuguucaacaaggugacccuggccgacgccggcuucaucaagcaguacggcgacugccugggggauaucgccgcucgggaccugaucugcgcccagaaguucaacggccugaccgugcugcccccucugcugaccgacgagaugaucgcccaguacaccagcgcccugcuugccggcaccaucaccagcggcuggaccuucggcgccggcgcagcccugcagauccccuucgccaugcagauggccuaccgguucaacggcaucggcgugacccagaacgugcuguacgagaaccagaagcugaucgccaaccaguucaacagcgccaucggcaagauccaggacagccugagcagcaccgccagcgcccugggcaagcugcaggacguggugaaccagaacgcucaggcccugaacacccuggugaagcagcugagcagcaauuucggcgccaucagcagcgugcugaacgacauccugucaaggcuggaucccccagaggccgaggugcagaucgaccggcugaucaccggccggcugcagagccugcagaccuacgugacccagcagcugauccgggccgccgagauccgggccagcgccaaccuggcagccaccaagaugagcgagugcgugcugggccagagcaagcggguggacuuuugcggcaagggcuaccaccugaugagcuucccccagagcgcuccccacggcgugguguuccuccacgugacauacguccccgcccaggagaagaacuucaccaccgcccccgccauuugccacgacggcaaggcccacuucccccgggagggaguguucgugagcaacggcacccacugguucgugacccagcggaacuucuacgagccucagaucaucaccaccgacaacaccuucgugagcggcaacugcgacguggugaucggcaucgugaacaacaccguguacgacccccugcagcccgagcuggacagcuucaaggaggagcuggacaaguacuucaagaaccacaccagcccagacguggaccugggcgacaucagcggcaucaacgccagcguggugaacauccagaaggagaucgaccggcugaacgagguggccaagaaccugaacgagagccugaucgaccugcaggagcugggcaaguacgagcaguacaucaaguggcccugguacaucuggcugggcuucaucgccggccugaucgccaucgugauggugaccaucaugcugugcugcaugaccagcugcuguagcugccugaagggcugcugcagcugcggcagcugcugcaaguucgacgaggacgacagcgagcccgugcugaagggcgugaagcugcacuacaccugaggacuagucccuguucccagagcccacuuuuuuuucuuuuuuugaaauaaaauagccugucuuucagaucucaaaggcucuuuucagagccaccaaaaaaaaaaaaaaaaaaaaaaaaaaaaaaaaaaaaaaaaaaaaaaaaaaaaaaaaaaaaaaaaaaaaaaaaaaaaaaaaaaaaaaaaaaaaaaaaaaaaa

SEQ ID NO: 23576 - RNA, 4094 nt, Artificial Sequence
  SARS-CoV-2/Wuhan/WIV05/2019__EPI_ISL_402128 spike protein mRNA gc (1-1273)(K986P_V987P_N501Y_D614G)
aggagagucccgcagucggcguccagcggcucugcuuguucgugugugugucguugcaggccuuauucaagcuuaccauguucguguuccuggugcugcugccccuggugagcagccagugcgugaaccugaccacccggacccagcugcccccugccuacaccaacagcuucacccggggcguguacuaccccgacaagguguuccggagcagcgugcugcacagcacccaggaccuguuccugcccuucuucagcaacgugaccugguuccacgccauccacgugagcggcaccaacggcaccaagcgguucgacaacccagugcugcccuucaacgacggcguguacuucgccagcaccgagaagucaaacaucauccggggcuggaucuucggcaccacccuggacagcaagacacagagccugcugaucgugaacaacgccaccaacguggugaucaaggugugcgaguuucaguucugcaacgaccccuuccugggcguguacuaccacaagaacaacaagagcuggauggagagcgaguuccgggucuacagcagcgcuaacaauugcaccuucgaguacgugagccagcccuuccugauggaccucgagggcaagcagggcaacuucaagaaccugcgggaguucguguucaagaacaucgauggcuacuucaagaucuacagcaagcacacccccaucaaccuggugcgggaccugccccagggauucagcgcccuggagccucugguggaccugcccaucggcaucaacaucaccagguuccagacccugcuggcccugcaccggagcuaccugacccccggcgacagcagcagcggcuggaccgccggcgccgccgcauacuacgugggcuaccugcagccacggaccuuccugcugaaguacaacgagaacggcaccaucaccgacgccguggacugcgcccuggacccccugagcgagaccaagugcacccuaaagagcuucaccguggagaagggcaucuaccagaccagcaacuuccgggugcagcccacugagagcaucgugcgguuccccaacauuaccaaccugugucccuucggcgagguguucaacgccacccgguucgccagcguguacgccuggaaccggaagcggaucagcaacugcguggccgacuacagcgugcuguacaacagcgccagcuucagcaccuucaagugcuacggcgugagcccuaccaagcugaacgaccugugcuucaccaacguguacgcugacagcuucgugauccggggcgacgaggugcggcagaucgcccccggccagaccggcaagaucgccgacuacaacuacaagcugcccgacgacuucaccggcugcgugaucgccuggaacagcaacaaccuggacagcaaggugggcggcaacuacaacuaccuguaccggcuguuccguaagagcaaccugaagccauucgagcgggacaucagcaccgagaucuaccaggccggcagcacccccugcaacgguguggagggcuuuaacugcuacuucccccugcagagcuacggcuuccagcccaccuacggcgugggcuaccagcccuaccgggugguggugcugagcuucgagcugcugcacgcccccgccaccgugugcggcccuaaaaagagcaccaaccuggugaagaacaagugcgugaacuucaacuucaauggccugaccggcaccggcgugcugaccgagagcaacaagaaguuccugcccuuccagcaguucggccgggauaucgccgacaccaccgacgcagugcgggacccccagacccuggagauccuggacaucaccccaugcagcuucggcggcgugagcgucaucacccccggcacaaacaccagcaaccagguggccgugcuguaccagggagugaacugcaccgaggugcccguggccauccacgccgaccagcugacccccaccuggcggguguacagcaccggcagcaacguguuccagacccgggccggcugccugaucggcgccgagcacgugaacaacuccuacgagugcgacauccccaucggcgcuggcaucugcgccagcuaccagacccagaccaacagcccccggcgggcccggagcguggccagccagagcaucaucgccuacaccaugagcuuaggcgccgagaacagcguggccuacagcaacaacagcaucgcgaucccuaccaacuucaccaucagcgugaccaccgagauacugcccgugagcaugaccaagaccagcguggacuguaccauguacaucugcggcgacagcaccgagugcagcaaccugcugcugcaguacggcagcuucugcacccagcugaaccgggcccugaccggcaucgccguggagcaggacaagaacacccaagagguguucgcccaggugaagcagaucuacaagacucccccaaucaaggacuucggcggcuucaacuucagccagauccugcccgaccccagcaagcccagcaagcggagcuucaucgaggaccugcuguucaacaaggugacccuggccgacgccggcuucaucaagcaguacggcgacugccugggggauaucgccgcucgggaccugaucugcgcccagaaguucaacggccugaccgugcugcccccucugcugaccgacgagaugaucgcccaguacaccagcgcccugcuugccggcaccaucaccagcggcuggaccuucggcgccggcgcagcccugcagauccccuucgccaugcagauggccuaccgguucaacggcaucggcgugacccagaacgugcuguacgagaaccagaagcugaucgccaaccaguucaacagcgccaucggcaagauccaggacagccugagcagcaccgccagcgcccugggcaagcugcaggacguggugaaccagaacgcucaggcccugaacacccuggugaagcagcugagcagcaacuucggcgccaucagcucagugcugaacgacauccugagcaggcuggaucccccagaggccgaggugcagaucgaccggcugaucaccggccggcugcagagccugcagaccuacgugacccagcagcugauccgggccgccgagauccgggccagcgccaaucuggcagccaccaagaugagcgagugcgugcugggccagagcaagcggguggacuuuugcggcaagggcuaccaccugaugagcuucccccagagcgcuccccacggcgugguguuccuccacgugacauacguccccgcccaggagaagaacuucaccaccgcccccgccauuugccacgacggcaaggcccacuucccccgggagggaguguucgugagcaacggcacccacugguucgugacccagcggaacuucuacgagccucagaucaucaccaccgacaacaccuucgugagcggcaacugcgacguggugaucggcaucgugaacaacaccguguacgacccccugcagcccgagcuggacagcuucaaggaggagcuggacaaguacuucaagaaccacaccagcccagacguggaccugggcgacaucagcggcaucaacgccagcguggugaacauccagaaggagaucgaccggcugaacgagguggccaagaaccugaacgagagccugaucgaccugcaggagcugggcaaguacgagcaguacaucaaguggcccugguacaucuggcugggcuucaucgccggccugaucgccaucgugauggugaccaucaugcugugcugcaugaccagcugcuguagcugccugaagggcugcugcagcugcggcagcugcugcaaguucgacgaggacgacagcgagcccgugcugaagggcgugaagcugcacuacaccugaggacuagucccuguucccagagcccacuuuuuuuucuuuuuuugaaauaaaauagccugucuuucagaucucaaaggcucuuuucagagccaccaaaaaaaaaaaaaaaaaaaaaaaaaaaaaaaaaaaaaaaaaaaaaaaaaaaaaaaaaaaaaaaaaaaaaaaaaaaaaaaaaaaaaaaaaaaaaaaaaaaaa

SEQ ID NO: 23577 - RNA, 4088 nt, Artificial Sequence
  SARS-CoV-2/Wuhan/WIV05/2019__EPI_ISL_402128 spike protein mRNA gc (1-1273)(K986P_V987P_H69del_V70del_D614G)
aggagagucccgcagucggcguccagcggcucugcuuguucgugugugugucguugcaggccuuauucaagcuuaccauguucguguuccuggugcugcugccccuggugagcagccagugcgugaaccugaccacccggacccagcugcccccugccuacaccaacagcuucacccggggcguguacuaccccgacaagguguuccggagcagcgugcugcacagcacccaggaccuguuccugcccuucuucagcaacgugaccugguuccacgccaucagcggcaccaacggcaccaagcgguucgacaacccagugcugcccuucaacgacggcguguacuucgccagcaccgagaagucaaacaucauccggggcuggaucuucggcaccacccuggacagcaagacacagagccugcugaucgugaacaacgccaccaacguggugaucaaggugugcgaguuucaguucugcaacgaccccuuccugggcguguacuaccacaagaacaacaagagcuggauggagagcgaguuccggguguacagcagcgcuaacaauugcaccuucgaguacgucagccagcccuuccugauggaccucgagggcaagcagggcaacuucaagaaccugcgggaguucguguucaagaacaucgauggcuacuucaagaucuacagcaagcacacccccaucaaccuggugcgggaccugccccagggauucagcgcccuggagccucugguggaccugcccaucggcaucaacaucaccagguuccagacccugcuggcccugcaccggagcuaccugacccccggcgacagcagcagcggcuggaccgccggcgccgccgcauacuacgugggcuaccugcagccacggaccuuccugcugaaguacaacgagaacggcaccaucaccgacgccguggacugcgcccuggacccccugagcgagaccaagugcacccuaaagagcuucaccguggagaagggcaucuaccagaccagcaacuuccgggugcagcccacugagagcaucgugcgguuccccaacauuaccaaccugugucccuucggcgagguguucaacgccacccgguucgccagcguguacgccuggaaccggaagcggaucagcaacugcguggccgacuacagcgugcuguacaacagcgccagcuucagcaccuucaagugcuacggcgugagcccuaccaagcugaacgaccugugcuucaccaacguguacgcugacagcuucgugauccggggcgacgaggugcggcagaucgcccccggccagaccggcaagaucgccgacuacaacuacaagcugcccgacgacuucaccggcugcgugaucgccuggaacagcaacaaccuggacagcaaggugggcggcaacuacaacuaccuguaccggcuguuccguaagagcaaccugaagccauucgagcgggacaucagcaccgagaucuaccaggccggcagcacccccugcaacgguguggagggcuuuaacugcuacuucccccugcagagcuacggcuuccagcccaccaacggcgugggcuaccagcccuaccgggugguggugcugagcuucgagcugcugcacgcccccgccaccgugugcggcccuaaaaagagcaccaaccuggugaagaacaagugcgugaacuucaauuucaacggccugaccggcaccggcgugcugaccgagagcaacaagaaguuccugcccuuccagcaguucggccgggauaucgccgacaccaccgacgcagugcgggacccccagacccuggagauccuggacaucaccccaugcagcuucggcggcgugagcgugaucacccccggcacaaacaccagcaaccaggucgccgugcuguaccagggagugaacugcaccgaggugcccguggccauccacgccgaccagcugacccccaccuggcggguguacagcaccggcagcaacguguuccagacccgggccggcugccugaucggcgccgagcacgugaacaacuccuacgagugcgacauccccaucggcgcuggcaucugcgccagcuaccagacccagaccaacagcccccggcgggcccggagcguggccagccagagcaucaucgccuacaccaugagcuuaggcgccgagaacagcguggccuacagcaacaacagcaucgcgaucccuaccaacuucaccaucagcgugaccaccgagauacugcccgugagcaugaccaagaccagcguggacuguaccauguacaucugcggcgacagcaccgagugcagcaaccugcugcugcaguacggcagcuucugcacccagcugaaccgggcccugaccggcaucgccguggagcaggacaagaacacccaagagguguucgcccaggugaagcagaucuacaagacucccccaaucaaggacuucggcggcuucaacuucagccagauccugcccgaccccagcaagcccagcaagcggagcuucaucgaggaccugcuguucaacaaggugacccuggccgacgccggcuucaucaagcaguacggcgacugccugggggauaucgccgcucgggaccugaucugcgcccagaaguucaacggccugaccgugcugcccccucugcugaccgacgagaugaucgcccaguacaccagcgcccugcuugccggcaccaucaccagcggcuggaccuucggcgccggcgcagcccugcagauccccuucgccaugcagauggccuaccgguucaacggcaucggcgugacccagaacgugcuguacgagaaccagaagcugaucgccaaccaguucaacagcgccaucggcaagauccaggacagccugagcagcaccgccagcgcccugggcaagcugcaggacguggugaaccagaacgcucaggcccugaacacccuggugaagcagcugagcagcaacuucggcgccaucagcucagugcugaaugacauccugagcaggcuggaucccccagaggccgaggugcagaucgaccggcugaucaccggccggcugcagagccugcagaccuacgugacccagcagcugauccgggccgccgagauccgggccagcgccaaccuggcagccaccaagaugagcgagugcgugcugggccagagcaagcggguggacuuuugcggcaagggcuaccaccugaugagcuucccccagagcgcuccccacggcgugguguuccuccacgugacauacgugcccgcccaggagaagaacuucaccaccgcccccgccauuugccacgacggcaaggcccacuucccccgggagggagucuucgugagcaacggcacccacugguucgugacccagcggaacuucuacgagccucagaucaucaccaccgacaacaccuucgugagcggcaacugcgacguggugaucggcaucgugaacaacaccguguacgacccccugcagcccgagcuggacagcuucaaggaggagcuggacaaguacuucaagaaccacaccagcccagacguggaccugggcgacaucagcggcaucaacgccagcguggugaacauccagaaggagaucgaccggcugaacgagguggccaagaaccugaacgagagccugaucgaccugcaggagcugggcaaguacgagcaguacaucaaguggcccugguacaucuggcugggcuucaucgccggccugaucgccaucgugauggugaccaucaugcugugcugcaugaccagcugcuguagcugccugaagggcugcugcagcugcggcagcugcugcaaguucgacgaggacgacagcgagcccgugcugaagggcgugaagcugcacuacaccugaggacuagucccuguucccagagcccacuuuuuuuucuuuuuuugaaauaaaauagccugucuuucagaucucaaaggcucuuuucagagccaccaaaaaaaaaaaaaaaaaaaaaaaaaaaaaaaaaaaaaaaaaaaaaaaaaaaaaaaaaaaaaaaaaaaaaaaaaaaaaaaaaaaaaaaaaaaaaaaaaaaaa

SEQ ID NO: 23578 - RNA, 4094 nt, Artificial Sequence
  SARS-CoV-2/Wuhan/WIV05/2019__EPI_ISL_402128 spike protein mRNA gc (1-1273)(K986P_V987P_Y453F_D614G)
aggagagucccgcagucggcguccagcggcucugcuuguucgugugugugucguugcaggccuuauucaagcuuaccauguucguguuccuggugcugcugccccuggugagcagccagugcgugaaccugaccacccggacccagcugcccccugccuacaccaacagcuucacccggggcguguacuaccccgacaagguguuccggagcagcgugcugcacagcacccaggaccuguuccugcccuucuucagcaacgugaccugguuccacgccauccacgugagcggcaccaacggcaccaagcgguucgacaacccagugcugcccuucaacgacggcguguacuucgccagcaccgagaagucaaacaucauccggggcuggaucuucggcaccacccuggacagcaagacacagagccugcugaucgugaacaacgccaccaacguggugaucaaggugugcgaguuucaguucugcaacgaccccuuccugggcguguacuaccacaagaacaacaagagcuggauggagagcgaguuccgggucuacagcagcgcuaacaauugcaccuucgaguacgugagccagcccuuccugauggaccucgagggcaagcagggcaacuucaagaaccugcgggaguucguguucaagaacaucgauggcuacuucaagaucuacagcaagcacacccccaucaaccuggugcgggaccugccccagggauucagcgcccuggagccucugguggaccugcccaucggcaucaacaucaccagguuccagacccugcuggcccugcaccggagcuaccugacccccggcgacagcagcagcggcuggaccgccggcgccgccgcauacuacgugggcuaccugcagccacggaccuuccugcugaaguacaacgagaacggcaccaucaccgacgccguggacugcgcccuggacccccugagcgagaccaagugcacccuaaagagcuucaccguggagaagggcaucuaccagaccagcaacuuccgggugcagcccacugagagcaucgugcgguuccccaacauuaccaaccugugucccuucggcgagguguucaacgccacccgguucgccagcguguacgccuggaaccggaagcggaucagcaacugcguggccgacuacagcgugcuguacaacagcgccagcuucagcaccuucaagugcuacggcgugagcccuaccaagcugaacgaccugugcuucaccaacguguacgcugacagcuucgugauccggggcgacgaggugcggcagaucgcccccggccagaccggcaagaucgccgacuacaacuacaagcugcccgacgacuucaccggcugcgugaucgccuggaacagcaacaaccuggacagcaaggugggcggcaacuacaacuaccuguuccggcuguuccguaagagcaaccugaagccauuugagcgggacaucagcaccgagaucuaccaggccggcagcacccccugcaacgguguggagggcuucaacugcuacuucccccugcagagcuacggcuuccagcccaccaacggcgugggcuaccagcccuaccgggugguggugcugagcuucgagcugcugcacgcccccgccaccgugugcggcccuaaaaagagcaccaaccuggugaagaacaagugcgugaacuucaauuucaacggccugaccggcaccggcgugcugaccgagagcaacaagaaguuccugcccuuccagcaguucggccgggauaucgccgacaccaccgacgcagugcgggacccccagacccuggagauccuggacaucaccccaugcagcuucggcggcgugagcgucaucacccccggcacaaacaccagcaaccagguggccgugcuguaccagggagugaacugcaccgaggugcccguggccauccacgccgaccagcugacccccaccuggcggguguacagcaccggcagcaacguguuccagacccgggccggcugccugaucggcgccgagcacgugaacaacuccuacgagugcgacauccccaucggcgcuggcaucugcgccagcuaccagacccagaccaacagcccccggcgggcccggagcguggccagccagagcaucaucgccuacaccaugagcuuaggcgccgagaacagcguggccuacagcaacaacagcaucgcgaucccuaccaacuucaccaucagcgugaccaccgagauacugcccgugagcaugaccaagaccagcguggacuguaccauguacaucugcggcgacagcaccgagugcagcaaccugcugcugcaguacggcagcuucugcacccagcugaaccgggcccugaccggcaucgccguggagcaggacaagaacacccaagagguguucgcccaggugaagcagaucuacaagacucccccaaucaaggacuucggcggcuucaacuucagccagauccugcccgaccccagcaagcccagcaagcggagcuucaucgaggaccugcuguucaacaaggugacccuggccgacgccggcuucaucaagcaguacggcgacugccugggggauaucgccgcucgggaccugaucugcgcccagaaguucaacggccugaccgugcugcccccucugcugaccgacgagaugaucgcccaguacaccagcgcccugcuugccggcaccaucaccagcggcuggaccuucggcgccggcgcagcccugcagauccccuucgccaugcagauggccuaccgguucaacggcaucggcgugacccagaacgugcuguacgagaaccagaagcugaucgccaaccaguucaacagcgccaucggcaagauccaggacagccugagcagcaccgccagcgcccugggcaagcugcaggacguggugaaccagaacgcucaggcccugaacacccuggugaagcagcugagcagcaacuuuggcgccaucagcucagugcugaaugacauccugagcaggcuggaucccccagaggccgaggugcagaucgaccggcugaucaccggccggcugcagagccugcagaccuacgugacccagcagcugauccgggccgccgagauccgggccagcgccaaccuggcagccaccaagaugagcgagugcgugcugggccagagcaagcggguggacuucugcggcaagggcuaccaccugaugagcuucccccagagcgcuccccacggcgugguguuccuccacgugacauacguccccgcccaggagaagaacuucaccaccgcccccgccauuugccacgacggcaaggcccacuucccccgggagggaguguucgugagcaacggcacccacugguucgugacccagcggaacuucuacgagccucagaucaucaccaccgacaacaccuucgugagcggcaacugcgacguggugaucggcaucgugaacaacaccguguacgacccccugcagcccgagcuggacagcuucaaggaggagcuggacaaguacuucaagaaccacaccagcccagacguggaccugggcgacaucagcggcaucaacgccagcguggugaacauccagaaggagaucgaccggcugaacgagguggccaagaaccugaacgagagccugaucgaccugcaggagcugggcaaguacgagcaguacaucaaguggcccugguacaucuggcugggcuucaucgccggccugaucgccaucgugauggugaccaucaugcugugcugcaugaccagcugcuguagcugccugaagggcugcugcagcugcggcagcugcugcaaguucgacgaggacgacagcgagcccgugcugaagggcgugaagcugcacuacaccugaggacuagucccuguucccagagcccacuuuuuuuucuuuuuuugaaauaaaauagccugucuuucagaucucaaaggcucuuuucagagccaccaaaaaaaaaaaaaaaaaaaaaaaaaaaaaaaaaaaaaaaaaaaaaaaaaaaaaaaaaaaaaaaaaaaaaaaaaaaaaaaaaaaaaaaaaaaaaaaaaaaaa

SEQ ID NO: 23579 - RNA, 4094 nt, Artificial Sequence
  SARS-CoV-2/Wuhan/WIV05/2019__EPI_ISL_402128 spike protein mRNA gc (1-1273)(K986P_V987P_D614G_I692V)
aggagagucccgcagucggcguccagcggcucugcuuguucgugugugugucguugcaggccuuauucaagcuuaccauguucguguuccuggugcugcugccccuggugagcagccagugcgugaaccugaccacccggacccagcugcccccugccuacaccaacagcuucacccggggcguguacuaccccgacaagguguuccggagcagcgugcugcacagcacccaggaccuguuccugcccuucuucagcaacgugaccugguuccacgccauccacgugagcggcaccaacggcaccaagcgguucgacaacccagugcugcccuucaacgacggcguguacuucgccagcaccgagaagucaaacaucauccggggcuggaucuucggcaccacccuggacagcaagacacagagccugcugaucgugaacaacgccaccaacguggugaucaaggugugcgaguuucaguucugcaacgaccccuuccugggcguguacuaccacaagaacaacaagagcuggauggagagcgaguuccgggucuacagcagcgcuaacaauugcaccuucgaguacgugagccagcccuuccugauggaccucgagggcaagcagggcaacuucaagaaccugcgggaguucguguucaagaacaucgauggcuacuucaagaucuacagcaagcacacccccaucaaccuggugcgggaccugccccagggauucagcgcccuggagccucugguggaccugcccaucggcaucaacaucaccagguuccagacccugcuggcccugcaccggagcuaccugacccccggcgacagcagcagcggcuggaccgccggcgccgccgcauacuacgugggcuaccugcagccacggaccuuccugcugaaguacaacgagaacggcaccaucaccgacgccguggacugcgcccuggacccccugagcgagaccaagugcacccuaaagagcuucaccguggagaagggcaucuaccagaccagcaacuuccgggugcagcccacugagagcaucgugcgguuccccaacauuaccaaccugugucccuucggcgagguguucaacgccacccgguucgccagcguguacgccuggaaccggaagcggaucagcaacugcguggccgacuacagcgugcuguacaacagcgccagcuucagcaccuucaagugcuacggcgugagcccuaccaagcugaacgaccugugcuucaccaacguguacgcugacagcuucgugauccggggcgacgaggugcggcagaucgcccccggccagaccggcaagaucgccgacuacaacuacaagcugcccgacgacuucaccggcugcgugaucgccuggaacagcaacaaccuggacagcaaggugggcggcaacuacaacuaccuguaccggcuguuccguaagagcaaccugaagccauucgagcgggacaucagcaccgagaucuaccaggccggcagcacccccugcaacgguguggagggcuuuaacugcuacuucccccugcagagcuacggcuuccagcccaccaacggcgugggcuaccagcccuaccgggugguggugcugagcuucgagcugcugcacgcccccgccaccgugugcggcccuaaaaagagcaccaaccuggugaagaacaagugcgugaacuucaauuucaacggccugaccggcaccggcgugcugaccgagagcaacaagaaguuccugcccuuccagcaguucggccgggauaucgccgacaccaccgacgcagugcgggacccccagacccuggagauccuggacaucaccccaugcagcuucggcggcgugagcgucaucacccccggcacaaacaccagcaaccagguggccgugcuguaccagggagugaacugcaccgaggugcccguggccauccacgccgaccagcugacccccaccuggcggguguacagcaccggcagcaacguguuccagacccgggccggcugccugaucggcgccgagcacgugaacaacuccuacgagugcgacauccccaucggcgcuggcaucugcgccagcuaccagacccagaccaacagcccccggcgggcccggagcguggccagccagagcgugaucgccuacaccaugagcuuaggcgccgagaacagcguggccuacagcaacaacagcaucgcgaucccuaccaacuucaccaucagcgugaccaccgagauccugcccgugagcaugaccaagaccagcguggacuguaccauguacauaugcggcgacagcaccgagugcagcaaccugcugcugcaguacggcagcuucugcacccagcugaaccgggcccugaccggcaucgccguggagcaggacaagaacacccaagagguguucgcccaggugaagcagaucuacaagacucccccaaucaaggacuucggcggcuucaacuucagccagauccugcccgaccccagcaagcccagcaagcggagcuucaucgaggaccugcuguucaacaaggugacccuggccgacgccggcuucaucaagcaguacggcgacugccugggggauaucgccgcucgggaccugaucugcgcccagaaguucaacggccugaccgugcugcccccucugcugaccgacgagaugaucgcccaguacaccagcgcccugcuugccggcaccaucaccagcggcuggaccuucggcgccggcgcagcccugcagauccccuucgccaugcagauggccuaccgguucaacggcaucggcgugacccagaacgugcuguacgagaaccagaagcugaucgccaaccaguucaacagcgccaucggcaagauccaggacagccugagcagcaccgccagcgcccugggcaagcugcaggacguggugaaccagaacgcucaggcccugaacacccuggugaagcagcugagcagcaacuucggcgccaucagcucagugcugaaugacauccugagcaggcuggaucccccagaggccgaggugcagaucgaccggcugaucaccggccggcugcagagccugcagaccuacgugacccagcagcugauccgggccgccgagauccgggccagcgccaaccuggcagccaccaagaugagcgagugcgugcugggccagagcaagcggguggacuuuugcggcaagggcuaccaccugaugagcuucccccagagcgcuccccacggcgugguguuccuccacgucacauacgugcccgcccaggagaagaacuucaccaccgcccccgccaucugccacgacggcaaggcccacuucccccgggagggaguguucgugagcaacggcacccacugguucgugacccagcggaacuucuacgagccucagauuaucaccaccgacaacaccuucgugagcggcaacugcgacguggugaucggcaucgugaacaacaccguguacgacccccugcagcccgagcuggacagcuucaaggaggagcuggacaaguacuucaagaaccacaccagcccagacguggaccugggcgacaucagcggcaucaacgccagcguggugaacauccagaaggagaucgaccggcugaacgagguggccaagaaccugaacgagagccugaucgaccugcaggagcugggcaaguacgagcaguacaucaaguggcccugguacaucuggcugggcuucaucgccggccugaucgccaucgugauggugaccaucaugcugugcugcaugaccagcugcuguagcugccugaagggcugcugcagcugcggcagcugcugcaaguucgacgaggacgacagcgagcccgugcugaagggcgugaagcugcacuacaccugaggacuagucccuguucccagagcccacuuuuuuuucuuuuuuugaaauaaaauagccugucuuucagaucucaaaggcucuuuucagagccaccaaaaaaaaaaaaaaaaaaaaaaaaaaaaaaaaaaaaaaaaaaaaaaaaaaaaaaaaaaaaaaaaaaaaaaaaaaaaaaaaaaaaaaaaaaaaaaaaaaaaa

SEQ ID NO: 23580 - RNA, 4094 nt, Artificial Sequence
  SARS-CoV-2/Wuhan/WIV05/2019__EPI_ISL_402128 spike protein mRNA gc (1-1273)(K986P_V987P_D614G_M1229I)
aggagagucccgcagucggcguccagcggcucugcuuguucgugugugugucguugcaggccuuauucaagcuuaccauguucguguuccuggugcugcugccccuggugagcagccagugcgugaaccugaccacccggacccagcugcccccugccuacaccaacagcuucacccggggcguguacuaccccgacaagguguuccggagcagcgugcugcacagcacccaggaccuguuccugcccuucuucagcaacgugaccugguuccacgccauccacgugagcggcaccaacggcaccaagcgguucgacaacccagugcugcccuucaacgacggcguguacuucgccagcaccgagaagucaaacaucauccggggcuggaucuucggcaccacccuggacagcaagacacagagccugcugaucgugaacaacgccaccaacguggugaucaaggugugcgaguuucaguucugcaacgaccccuuccugggcguguacuaccacaagaacaacaagagcuggauggagagcgaguuccgggucuacagcagcgcuaacaauugcaccuucgaguacgugagccagcccuuccugauggaccucgagggcaagcagggcaacuucaagaaccugcgggaguucguguucaagaacaucgauggcuacuucaagaucuacagcaagcacacccccaucaaccuggugcgggaccugccccagggauucagcgcccuggagccucugguggaccugcccaucggcaucaacaucaccagguuccagacccugcuggcccugcaccggagcuaccugacccccggcgacagcagcagcggcuggaccgccggcgccgccgcauacuacgugggcuaccugcagccacggaccuuccugcugaaguacaacgagaacggcaccaucaccgacgccguggacugcgcccuggacccccugagcgagaccaagugcacccuaaagagcuucaccguggagaagggcaucuaccagaccagcaacuuccgggugcagcccacugagagcaucgugcgguuccccaacauuaccaaccugugucccuucggcgagguguucaacgccacccgguucgccagcguguacgccuggaaccggaagcggaucagcaacugcguggccgacuacagcgugcuguacaacagcgccagcuucagcaccuucaagugcuacggcgugagcccuaccaagcugaacgaccugugcuucaccaacguguacgcugacagcuucgugauccggggcgacgaggugcggcagaucgcccccggccagaccggcaagaucgccgacuacaacuacaagcugcccgacgacuucaccggcugcgugaucgccuggaacagcaacaaccuggacagcaaggugggcggcaacuacaacuaccuguaccggcuguuccguaagagcaaccugaagccauucgagcgggacaucagcaccgagaucuaccaggccggcagcacccccugcaacgguguggagggcuuuaacugcuacuucccccugcagagcuacggcuuccagcccaccaacggcgugggcuaccagcccuaccgggugguggugcugagcuucgagcugcugcacgcccccgccaccgugugcggcccuaaaaagagcaccaaccuggugaagaacaagugcgugaacuucaauuucaacggccugaccggcaccggcgugcugaccgagagcaacaagaaguuccugcccuuccagcaguucggccgggauaucgccgacaccaccgacgcagugcgggacccccagacccuggagauccuggacaucaccccaugcagcuucggcggcgugagcgucaucacccccggcacaaacaccagcaaccagguggccgugcuguaccagggagugaacugcaccgaggugcccguggccauccacgccgaccagcugacccccaccuggcggguguacagcaccggcagcaacguguuccagacccgggccggcugccugaucggcgccgagcacgugaacaacuccuacgagugcgacauccccaucggcgcuggcaucugcgccagcuaccagacccagaccaacagcccccggcgggcccggagcguggccagccagagcaucaucgccuacaccaugagcuuaggcgccgagaacagcguggccuacagcaacaacagcaucgcgaucccuaccaacuucaccaucagcgugaccaccgagauacugcccgugagcaugaccaagaccagcguggacuguaccauguacaucugcggcgacagcaccgagugcagcaaccugcugcugcaguacggcagcuucugcacccagcugaaccgggcccugaccggcaucgccguggagcaggacaagaacacccaagagguguucgcccaggugaagcagaucuacaagacucccccaaucaaggacuucggcggcuucaacuucagccagauccugcccgaccccagcaagcccagcaagcggagcuucaucgaggaccugcuguucaacaaggugacccuggccgacgccggcuucaucaagcaguacggcgacugccugggggauaucgccgcucgggaccugaucugcgcccagaaguucaacggccugaccgugcugcccccucugcugaccgacgagaugaucgcccaguacaccagcgcccugcuugccggcaccaucaccagcggcuggaccuucggcgccggcgcagcccugcagauccccuucgccaugcagauggccuaccgguucaacggcaucggcgugacccagaacgugcuguacgagaaccagaagcugaucgccaaccaguucaacagcgccaucggcaagauccaggacagccugagcagcaccgccagcgcccugggcaagcugcaggacguggugaaccagaacgcucaggcccugaacacccuggugaagcagcugagcagcaacuucggcgccaucagcucagugcugaaugacauccugagcaggcuggaucccccagaggccgaggugcagaucgaccggcugaucaccggccggcugcagagccugcagaccuacgugacccagcagcugauccgggccgccgagauccgggccagcgccaaccuggcagccaccaagaugagcgagugcgugcugggccagagcaagcggguggacuuuugcggcaagggcuaccaccugaugagcuucccccagagcgcuccccacggcgugguguuccuccacgugacauacguccccgcccaggagaagaacuucaccaccgcccccgccauuugccacgacggcaaggcccacuucccccgggagggaguguucgugagcaacggcacccacugguucgugacccagcggaacuucuacgagccucagaucaucaccaccgacaacaccuucgugagcggcaacugcgacguggugaucggcaucgugaacaacaccguguacgacccccugcagcccgagcuggacagcuucaaggaggagcuggacaaguacuucaagaaccacaccagcccagacguggaccugggcgacaucagcggcaucaacgccagcguggugaacauccagaaggagaucgaccggcugaacgagguggccaagaaccugaacgagagccugaucgaccugcaggagcugggcaaguacgagcaguacaucaaguggcccugguacaucuggcugggcuucaucgccggccugaucgccaucgugaucgugaccaucaugcugugcugcaugaccagcugcuguagcugccugaagggcugcugcagcugcggcagcugcugcaaguucgacgaggacgacagcgagcccgugcugaagggcgugaagcugcacuacaccugaggacuagucccuguucccagagcccacuuuuuuuucuuuuuuugaaauaaaauagccugucuuucagaucucaaaggcucuuuucagagccaccaaaaaaaaaaaaaaaaaaaaaaaaaaaaaaaaaaaaaaaaaaaaaaaaaaaaaaaaaaaaaaaaaaaaaaaaaaaaaaaaaaaaaaaaaaaaaaaaaaaaa

SEQ ID NO: 23581 - RNA, 4088 nt, Artificial Sequence
  SARS-CoV-2/Wuhan/WIV05/2019__EPI_ISL_402128 spike protein mRNA gc (1-1273)(K986P_V987P_H69del_V70del_A222V_Y453F_S477N_D614G_I692V)
aggagagucccgcagucggcguccagcggcucugcuuguucgugugugugucguugcaggccuuauucaagcuuaccauguucguguuccuggugcugcugccccuggugagcagccagugcgugaaccugaccacccggacccagcugcccccugccuacaccaacagcuucacccggggcguguacuaccccgacaagguguuccggagcagcgugcugcacagcacccaggaccuguuccugcccuucuucagcaacgugaccugguuccacgccaucagcggcaccaacggcaccaagcgguucgacaacccagugcugcccuucaacgacggcguguacuucgccagcaccgagaagucaaacaucauccggggcuggaucuucggcaccacccuggacagcaagacacagagccugcugaucgugaacaacgccaccaacguggugaucaaggugugcgaguuucaguucugcaacgaccccuuccugggcguguacuaccacaagaacaacaagagcuggauggagagcgaguuccggguguacagcagcgcuaacaauugcaccuucgaguacgucagccagcccuuccugauggaccucgagggcaagcagggcaacuucaagaaccugcgggaguucguguucaagaacaucgauggcuacuucaagaucuacagcaagcacacccccaucaaccuggugcgggaccugccccagggauucagcgugcuggagccucugguggaccugcccaucggcaucaacaucaccagguuccagacccugcuggcccugcaccggagcuaccugacccccggcgacagcagcagcggcuggaccgccggcgccgccgccuacuacgugggcuaccugcagccacggaccuuccugcugaaguacaacgagaacggcaccaucaccgacgcaguggacugcgcccuggacccccugagcgagaccaagugcacccuaaagagcuucaccguggagaagggcaucuaccagaccagcaacuuccgggugcagcccacugagagcaucgugcgguuccccaacauuaccaaccugugucccuucggcgagguguucaacgccacccgguucgccagcguguacgccuggaaccggaagcggaucagcaacugcguggccgacuacagcgugcuguacaacagcgccagcuucagcaccuucaagugcuacggcgugagcccuaccaagcugaacgaccugugcuucaccaacguguacgccgacagcuucgugauccggggcgacgaggugcggcagaucgcucccggccagaccggcaagaucgccgacuacaacuacaagcugcccgacgacuucaccggcugcgugaucgccuggaacagcaacaaccuggacagcaaggugggcggcaacuacaacuaccuguuccggcuguuccguaagagcaaccugaagccauuugagcgggacaucagcaccgagaucuaccaggccggcaacacccccugcaacgguguggagggcuucaacugcuacuucccccugcagagcuacggcuuccagcccaccaacggcgugggcuaccagcccuaccgggugguggugcugagcuucgagcugcugcacgcccccgccaccgugugcggcccuaaaaagagcaccaaccuggugaagaacaagugcgugaauuucaacuucaacggccugaccggcaccggcgugcugaccgagagcaacaagaaguuccugcccuuccagcaguucggccgggauaucgccgacaccaccgacgccgugcgggacccccagacccuggagauccuggacaucaccccaugcagcuucggcggcgugagcgucaucacccccggcacaaacaccagcaaccagguggcagugcuguaccagggagugaacugcaccgaggugcccguggccauccacgccgaccagcugacccccaccuggcggguguacagcaccggcagcaacguguuccagacccgggccggcugccugaucggcgccgagcacgugaacaacagcuacgagugcgacauccccaucggcgccggcaucugcgcuuccuaccagacccagaccaacagcccccggcgggcccggagcguggccagccagagcgugaucgccuacaccaugagcuuaggcgccgagaacagcguggccuacagcaacaacagcaucgccaucccuaccaacuucaccaucagcgugaccaccgagauccugcccgugagcaugaccaagaccagcguggacuguaccauguacauaugcggcgacagcaccgagugcagcaaccugcugcugcaguacggcagcuucugcacccagcugaaccgggcgcugaccggcaucgccguggagcaggacaagaacacccaagagguguucgcccaggugaagcagaucuacaagacucccccaaucaaggacuucggcggcuucaacuucagccagauccugcccgaccccagcaagcccagcaagcggagcuucaucgaggaccugcuguucaacaaggugacccuggccgacgccggcuucaucaagcaguacggcgacugccugggggauaucgccgcccgggaccugaucugcgcucagaaguucaacggccugaccgugcugcccccucugcugaccgacgagaugaucgcccaguacaccagcgcccugcuugccggcaccaucaccagcggcuggaccuucggcgccggcgccgcacugcagauccccuucgccaugcagauggccuaccgguucaacggcaucggcgugacccagaacgugcuguacgagaaccagaagcugaucgccaaccaguucaacagcgccaucggcaagauccaggacagccugagcagcaccgccagcgcccugggcaagcugcaggacguggugaaccagaacgcccaggcucugaacacccuggugaagcagcugagcagcaauuuuggcgccaucagcagcgugcugaacgacauccugucaaggcuggaucccccagaggccgaggugcagaucgaccggcugaucaccggccggcugcagagccugcagaccuacgugacccagcagcugauccgggccgccgagauccgggccagcgccaaccuggccgcaaccaagaugagcgagugcgugcugggccagagcaagcggguggacuucugcggcaagggcuaccaccugaugagcuucccccagagcgcuccccacggcgugguguuccuccacgucacauacgugcccgcccaggagaagaacuucaccaccgcccccgccaucugccacgacggcaaggcccacuucccccgggagggaguguucgugagcaacggcacccacugguucgugacccagcggaacuucuacgagccucagauuaucaccaccgacaacaccuucgugagcggcaacugcgacguggugaucggcaucgugaacaacaccguguacgacccccugcagcccgagcuggacagcuucaaggaggagcuggacaaguacuucaagaaccacaccagcccagacguggaccugggcgacaucagcggcaucaacgccagcguggugaacauccagaaggagaucgaccggcugaacgagguggccaagaaccugaacgagagccugaucgaccugcaggagcugggcaaguacgagcaguacaucaaguggcccugguacaucuggcugggcuucaucgccggccugaucgccaucgugauggugaccaucaugcugugcugcaugaccagcugcuguagcugccugaagggcugcugcagcugcggcagcugcugcaaguucgacgaggacgacagcgagcccgugcugaagggcgugaagcugcacuacaccugaggacuagucccuguucccagagcccacuuuuuuuucuuuuuuugaaauaaaauagccugucuuucagaucucaaaggcucuuuucagagccaccaaaaaaaaaaaaaaaaaaaaaaaaaaaaaaaaaaaaaaaaaaaaaaaaaaaaaaaaaaaaaaaaaaaaaaaaaaaaaaaaaaaaaaaaaaaaaaaaaaaaa

SEQ ID NO: 23582 - RNA, 4088 nt, Artificial Sequence
  SARS-CoV-2/Wuhan/WIV05/2019__EPI_ISL_402128 spike protein mRNA gc (1-1273)(K986P_V987P_H69del_V70del_Y453F_D614G_I692V_M1229I)
aggagagucccgcagucggcguccagcggcucugcuuguucgugugugugucguugcaggccuuauucaagcuuaccauguucguguuccuggugcugcugccccuggugagcagccagugcgugaaccugaccacccggacccagcugcccccugccuacaccaacagcuucacccggggcguguacuaccccgacaagguguuccggagcagcgugcugcacagcacccaggaccuguuccugcccuucuucagcaacgugaccugguuccacgccaucagcggcaccaacggcaccaagcgguucgacaacccagugcugcccuucaacgacggcguguacuucgccagcaccgagaagucaaacaucauccggggcuggaucuucggcaccacccuggacagcaagacacagagccugcugaucgugaacaacgccaccaacguggugaucaaggugugcgaguuucaguucugcaacgaccccuuccugggcguguacuaccacaagaacaacaagagcuggauggagagcgaguuccggguguacagcagcgcuaacaauugcaccuucgaguacgucagccagcccuuccugauggaccucgagggcaagcagggcaacuucaagaaccugcgggaguucguguucaagaacaucgauggcuacuucaagaucuacagcaagcacacccccaucaaccuggugcgggaccugccccagggauucagcgcccuggagccucugguggaccugcccaucggcaucaacaucaccagguuccagacccugcuggcccugcaccggagcuaccugacccccggcgacagcagcagcggcuggaccgccggcgccgccgcauacuacgugggcuaccugcagccacggaccuuccugcugaaguacaacgagaacggcaccaucaccgacgccguggacugcgcccuggacccccugagcgagaccaagugcacccuaaagagcuucaccguggagaagggcaucuaccagaccagcaacuuccgggugcagcccacugagagcaucgugcgguuccccaacauuaccaaccugugucccuucggcgagguguucaacgccacccgguucgccagcguguacgccuggaaccggaagcggaucagcaacugcguggccgacuacagcgugcuguacaacagcgccagcuucagcaccuucaagugcuacggcgugagcccuaccaagcugaacgaccugugcuucaccaacguguacgcugacagcuucgugauccggggcgacgaggugcggcagaucgcccccggccagaccggcaagaucgccgacuacaacuacaagcugcccgacgacuucaccggcugcgugaucgccuggaacagcaacaaccuggacagcaaggugggcggcaacuacaacuaccuguuccggcuguuccguaagagcaaccugaagccauuugagcgggacaucagcaccgagaucuaccaggccggcagcacccccugcaacgguguggagggcuucaacugcuacuucccccugcagagcuacggcuuccagcccaccaacggcgugggcuaccagcccuaccgggugguggugcugagcuucgagcugcugcacgcccccgccaccgugugcggcccuaaaaagagcaccaaccuggugaagaacaagugcgugaacuucaauuucaacggccugaccggcaccggcgugcugaccgagagcaacaagaaguuccugcccuuccagcaguucggccgggauaucgccgacaccaccgacgcagugcgggacccccagacccuggagauccuggacaucaccccaugcagcuucggcggcgugagcgugaucacccccggcacaaacaccagcaaccaggucgccgugcuguaccagggagugaacugcaccgaggugcccguggccauccacgccgaccagcugacccccaccuggcggguguacagcaccggcagcaacguguuccagacccgggccggcugccugaucggcgccgagcacgugaacaacuccuacgagugcgacauccccaucggcgcuggcaucugcgccagcuaccagacccagaccaacagcccccggcgggcccggagcguggccagccagagcgugaucgccuacaccaugagcuuaggcgccgagaacagcguggccuacagcaacaacagcaucgcgaucccuaccaacuucaccaucagcgugaccaccgagauccugcccgugagcaugaccaagaccagcguggacuguaccauguacauaugcggcgacagcaccgagugcagcaaccugcugcugcaguacggcagcuucugcacccagcugaaccgggcccugaccggcaucgccguggagcaggacaagaacacccaagagguguucgcccaggugaagcagaucuacaagacucccccaaucaaggacuucggcggcuucaacuucagccagauccugcccgaccccagcaagcccagcaagcggagcuucaucgaggaccugcuguucaacaaggugacccuggccgacgccggcuucaucaagcaguacggcgacugccugggggauaucgccgcucgggaccugaucugcgcccagaaguucaacggccugaccgugcugcccccucugcugaccgacgagaugaucgcccaguacaccagcgcccugcuugccggcaccaucaccagcggcuggaccuucggcgccggcgcagcccugcagauccccuucgccaugcagauggccuaccgguucaacggcaucggcgugacccagaacgugcuguacgagaaccagaagcugaucgccaaccaguucaacagcgccaucggcaagauccaggacagccugagcagcaccgccagcgcccugggcaagcugcaggacguggugaaccagaacgcucaggcccugaacacccuggugaagcagcugagcagcaacuuuggcgccaucagcucagugcugaaugacauccugagcaggcuggaucccccagaggccgaggugcagaucgaccggcugaucaccggccggcugcagagccugcagaccuacgugacccagcagcugauccgggccgccgagauccgggccagcgccaaccuggcagccaccaagaugagcgagugcgugcugggccagagcaagcggguggacuucugcggcaagggcuaccaccugaugagcuucccccagagcgcuccccacggcgugguguuccuccacgugacauacguccccgcccaggagaagaacuucaccaccgcccccgccaucugccacgacggcaaggcccacuucccccgggagggaguguucgugagcaacggcacccacugguucgugacccagcggaacuucuacgagccucagauuaucaccaccgacaacaccuucgugagcggcaacugcgacguggugaucggcaucgugaacaacaccguguacgacccccugcagcccgagcuggacagcuucaaggaggagcuggacaaguacuucaagaaccacaccagcccagacguggaccugggcgacaucagcggcaucaacgccagcguggugaacauccagaaggagaucgaccggcugaacgagguggccaagaaccugaacgagagccugaucgaccugcaggagcugggcaaguacgagcaguacaucaaguggcccugguacaucuggcugggcuucaucgccggccugaucgccaucgugaucgugaccaucaugcugugcugcaugaccagcugcuguagcugccugaagggcugcugcagcugcggcagcugcugcaaguucgacgaggacgacagcgagcccgugcugaagggcgugaagcugcacuacaccugaggacuagucccuguucccagagcccacuuuuuuuucuuuuuuugaaauaaaauagccugucuuucagaucucaaaggcucuuuucagagccaccaaaaaaaaaaaaaaaaaaaaaaaaaaaaaaaaaaaaaaaaaaaaaaaaaaaaaaaaaaaaaaaaaaaaaaaaaaaaaaaaaaaaaaaaaaaaaaaaaaaaa

SEQ ID NO: 23583 - RNA, 4085 nt, Artificial Sequence
  SARS-CoV-2/Wuhan/WIV05/2019__EPI_ISL_402128 spike protein mRNA gc (1-1273)(K986P_V987P_K986P_V987P_H69del_V70del_Y144del_N501Y_A570 D_D614G_P681H_T716I_S982A_D1118H)
aggagagucccgcagucggcguccagcggcucugcuuguucgugugugugucguugcaggccuuauucaagcuuaccauguucguguuccuggugcugcugccccuggugagcagccagugcgugaaccugaccacccggacccagcugcccccugccuacaccaacagcuucacccggggcguguacuaccccgacaagguguuccggagcagcgugcugcacagcacccaggaccuguuccugcccuucuucagcaacgugaccugguuccacgccaucagcggcaccaacggcaccaagcgguucgacaacccagugcugcccuucaacgacggcguguacuucgccagcaccgagaagucaaacaucauccggggcuggaucuucggcaccacccuggacagcaagacacagagccugcugaucgugaacaacgccaccaacguggugaucaaggugugcgaguuucaguucugcaacgaccccuuccugggcguguaccacaagaacaacaagagcuggauggagagcgaguuccggguguacagcagcgcuaacaauugcaccuucgaguacgucagccagcccuuccugauggaccucgagggcaagcagggcaacuucaagaaccugcgggaguucguguucaagaacaucgauggcuacuucaagaucuacagcaagcacacccccaucaaccuggugcgggaccugccccagggauucagcgcccuggagccucugguggaccugcccaucggcaucaacaucaccagguuccagacccugcuggcccugcaccggagcuaccugacccccggcgacagcagcagcggcuggaccgccggcgccgccgcauacuacgugggcuaccugcagccacggaccuuccugcugaaguacaacgagaacggcaccaucaccgacgccguggacugcgcccuggacccccugagcgagaccaagugcacccuaaagagcuucaccguggagaagggcaucuaccagaccagcaacuuccgggugcagcccacugagagcaucgugcgguuccccaacauuaccaaccugugucccuucggcgagguguucaacgccacccgguucgccagcguguacgccuggaaccggaagcggaucagcaacugcguggccgacuacagcgugcuguacaacagcgccagcuucagcaccuucaagugcuacggcgugagcccuaccaagcugaacgaccugugcuucaccaacguguacgcugacagcuucgugauccggggcgacgaggugcggcagaucgcccccggccagaccggcaagaucgccgacuacaacuacaagcugcccgacgacuucaccggcugcgugaucgccuggaacagcaacaaccuggacagcaaggugggcggcaacuacaacuaccuguaccggcuguuccguaagagcaaccugaagccauucgagcgggacaucagcaccgagaucuaccaggccggcagcacccccugcaacgguguggagggcuuuaacugcuacuucccccugcagagcuacggcuuccagcccaccuacggcgugggcuaccagcccuaccgggugguggugcugagcuucgagcugcugcacgcccccgccaccgugugcggcccuaaaaagagcaccaaccuggugaagaacaagugcgugaacuucaacuucaauggccugaccggcaccggcgugcugaccgagagcaacaagaaguuccugcccuuccagcaguucggccgggauaucgacgacaccaccgacgccgugcgggacccccagacccuggagauccuggacaucaccccaugcagcuucggcggcgugagcgugaucacccccggcacaaacaccagcaaccaggucgcagugcuguaccagggagugaacugcaccgaggugcccguggccauccacgccgaccagcugacccccaccuggcggguguacagcaccggcagcaacguguuccagacccgggccggcugccugaucggcgccgagcacgugaacaacuccuacgagugcgacauccccaucggcgccggcaucugcgcuagcuaccagacccagaccaacagccaccggcgggcccggagcguggccagccagagcaucaucgccuacaccaugagcuuaggcgccgagaacagcguggccuacagcaacaacagcaucgccauccccaucaacuucaccauaagcgugaccaccgagauccugccugugagcaugaccaagaccagcguggacuguaccauguacaucugcggcgacagcaccgagugcagcaaccugcugcugcaguacggcagcuucugcacccagcugaaccgggcgcugaccggcaucgccguggagcaggacaagaacacccaagagguguucgcccaggugaagcagaucuacaagaccccacccaucaaggacuucggcggcuucaacuucagccagauccugcccgaccccagcaagcccagcaagcggagcuucaucgaggaccugcuguucaacaaggugacucuggccgacgccggcuucaucaagcaguacggcgauugccugggggacaucgccgcccgggaccugaucugcgcucagaaguucaacggccugaccgugcugccuccccugcugaccgacgagaugaucgcccaguacaccagcgcccugcuugccggcaccaucaccagcggcuggaccuucggcgccggcgccgcacugcagauccccuucgccaugcagauggccuaccgguucaacggcaucggcgugacccagaacgugcuguacgagaaccagaagcugaucgccaaccaguucaacagcgccaucggcaagauccaggacagccugagcagcaccgccagcgcccugggcaagcugcaggacguggugaaccagaacgcccaggcucugaacacccuggugaagcagcugagcagcaacuucggcgccaucagcucagugcugaacgacauccuggccaggcuggacccacccgaggccgaggugcagaucgaccggcugaucaccggccggcugcagagccugcagaccuacgugacccagcagcugauccgggccgccgagauucgggccagcgccaaucuggcagccaccaagaugagcgagugcgugcugggccagagcaagcggguggacuuuugcggcaagggcuaccaccugaugagcuucccccagagcgcuccccacggcgugguguuccuccacgugaccuacgugcccgcccaggagaagaacuucacaaccgcccccgccaucugccacgacggcaaggcccacuucccccgggagggagucuucgugagcaacggcacccacugguucgugacccagcggaacuucuacgagccccagaucaucaccacccacaacaccuucgugagcggcaacugcgacguggugaucggcaucgugaacaacaccguguacgacccucugcagcccgagcuggacagcuucaaggaggagcuggacaaguacuucaagaaccacaccagccccgacguggaucugggcgacaucagcggcaucaacgccagcguggugaacauccagaaggagaucgaccggcugaacgagguggccaagaaccugaacgagagccugaucgaccugcaggagcugggcaaguacgagcaguacaucaaguggccaugguacaucuggcugggcuucaucgccggccugaucgccaucgugauggugaccaucaugcugugcugcaugaccagcugcuguagcugccugaagggcugcugcagcugcggcagcugcugcaaguucgacgaggacgacagcgagcccgugcugaagggcgugaagcugcacuacaccugaggacuagucccuguucccagagcccacuuuuuuuucuuuuuuugaaauaaaauagccugucuuucagaucucaaaggcucuuuucagagccaccaaaaaaaaaaaaaaaaaaaaaaaaaaaaaaaaaaaaaaaaaaaaaaaaaaaaaaaaaaaaaaaaaaaaaaaaaaaaaaaaaaaaaaaaaaaaaaaaaaaaa

SEQ ID NO: 23584 - RNA, 4094 nt, Artificial Sequence
  SARS-CoV-2/Wuhan/WIV05/2019__EPI_ISL_402128 spike protein mRNA gc (1-1273)(K986P_V987P_K986P_V987P_K417N_E484K_N501Y_D614G)
aggagagucccgcagucggcguccagcggcucugcuuguucgugugugugucguugcaggccuuauucaagcuuaccauguucguguuccuggugcugcugccccuggugagcagccagugcgugaaccugaccacccggacccagcugcccccugccuacaccaacagcuucacccggggcguguacuaccccgacaagguguuccggagcagcgugcugcacagcacccaggaccuguuccugcccuucuucagcaacgugaccugguuccacgccauccacgugagcggcaccaacggcaccaagcgguucgacaacccagugcugcccuucaacgacggcguguacuucgccagcaccgagaagucaaacaucauccggggcuggaucuucggcaccacccuggacagcaagacacagagccugcugaucgugaacaacgccaccaacguggugaucaaggugugcgaguuucaguucugcaacgaccccuuccugggcguguacuaccacaagaacaacaagagcuggauggagagcgaguuccgggucuacagcagcgcuaacaauugcaccuucgaguacgugagccagcccuuccugauggaccucgagggcaagcagggcaacuucaagaaccugcgggaguucguguucaagaacaucgauggcuacuucaagaucuacagcaagcacacccccaucaaccuggugcgggaccugccccagggauucagcgcccuggagccucugguggaccugcccaucggcaucaacaucaccagguuccagacccugcuggcccugcaccggagcuaccugacccccggcgacagcagcagcggcuggaccgccggcgccgccgcauacuacgugggcuaccugcagccacggaccuuccugcugaaguacaacgagaacggcaccaucaccgacgccguggacugcgcccuggacccccugagcgagaccaagugcacccuaaagagcuucaccguggagaagggcaucuaccagaccagcaacuuccgggugcagcccacugagagcaucgugcgguuccccaacauuaccaaccugugucccuucggcgagguguucaacgccacccgguucgccagcguguacgccuggaaccggaagcggaucagcaacugcguggccgacuacagcgugcuguacaacagcgccagcuucagcaccuucaagugcuacggcgugagcccuaccaagcugaacgaccugugcuucaccaacguguacgcugacagcuucgugauccggggcgacgaggugcggcagaucgcccccggccagaccggcaacaucgccgacuacaacuacaagcugcccgacgacuucaccggcugcgugaucgccuggaacagcaacaaccuggacagcaaggugggcggcaacuacaacuaccuguaccggcuguuccguaagagcaaccugaagccauucgagcgggacaucagcaccgagaucuaccaggccggcagcacccccugcaacggugugaagggcuuuaacugcuacuucccccugcagagcuacggcuuccagcccaccuacggcgugggcuaccagcccuaccgggugguggugcugagcuucgagcugcugcacgcccccgccaccgugugcggcccuaaaaagagcaccaaccuggugaagaacaagugcgugaacuucaauuucaacggccugaccggcaccggcgugcugaccgagagcaacaagaaguuccugcccuuccagcaguucggccgggauaucgccgacaccaccgacgcagugcgggacccccagacccuggagauccuggacaucaccccaugcagcuucggcggcgugagcgucaucacccccggcacaaacaccagcaaccagguggccgugcuguaccagggagugaacugcaccgaggugcccguggccauccacgccgaccagcugacccccaccuggcggguguacagcaccggcagcaacguguuccagacccgggccggcugccugaucggcgccgagcacgugaacaacuccuacgagugcgacauccccaucggcgcuggcaucugcgccagcuaccagacccagaccaacagcccccggcgggcccggagcguggccagccagagcaucaucgccuacaccaugagcuuaggcgccgagaacagcguggccuacagcaacaacagcaucgcgaucccuaccaacuucaccaucagcgugaccaccgagauacugcccgugagcaugaccaagaccagcguggacuguaccauguacaucugcggcgacagcaccgagugcagcaaccugcugcugcaguacggcagcuucugcacccagcugaaccgggcccugaccggcaucgccguggagcaggacaagaacacccaagagguguucgcccaggugaagcagaucuacaagacucccccaaucaaggacuucggcggcuucaacuucagccagauccugcccgaccccagcaagcccagcaagcggagcuucaucgaggaccugcuguucaacaaggugacccuggccgacgccggcuucaucaagcaguacggcgacugccugggggauaucgccgcucgggaccugaucugcgcccagaaguucaacggccugaccgugcugcccccucugcugaccgacgagaugaucgcccaguacaccagcgcccugcuugccggcaccaucaccagcggcuggaccuucggcgccggcgcagcccugcagauccccuucgccaugcagauggccuaccgguucaacggcaucggcgugacccagaacgugcuguacgagaaccagaagcugaucgccaaccaguucaacagcgccaucggcaagauccaggacagccugagcagcaccgccagcgcccugggcaagcugcaggacguggugaaccagaacgcucaggcccugaacacccuggugaagcagcugagcagcaacuucggcgccaucagcucagugcugaaugacauccugagcaggcuggaucccccagaggccgaggugcagaucgaccggcugaucaccggccggcugcagagccugcagaccuacgugacccagcagcugauccgggccgccgagauccgggccagcgccaaccuggcagccaccaagaugagcgagugcgugcugggccagagcaagcggguggacuuuugcggcaagggcuaccaccugaugagcuucccccagagcgcuccccacggcgugguguuccuccacgugacauacguccccgcccaggagaagaacuucaccaccgcccccgccauuugccacgacggcaaggcccacuucccccgggagggaguguucgugagcaacggcacccacugguucgugacccagcggaacuucuacgagccucagaucaucaccaccgacaacaccuucgugagcggcaacugcgacguggugaucggcaucgugaacaacaccguguacgacccccugcagcccgagcuggacagcuucaaggaggagcuggacaaguacuucaagaaccacaccagcccagacguggaccugggcgacaucagcggcaucaacgccagcguggugaacauccagaaggagaucgaccggcugaacgagguggccaagaaccugaacgagagccugaucgaccugcaggagcugggcaaguacgagcaguacaucaaguggcccugguacaucuggcugggcuucaucgccggccugaucgccaucgugauggugaccaucaugcugugcugcaugaccagcugcuguagcugccugaagggcugcugcagcugcggcagcugcugcaaguucgacgaggacgacagcgagcccgugcugaagggcgugaagcugcacuacaccugaggacuagucccuguucccagagcccacuuuuuuuucuuuuuuugaaauaaaauagccugucuuucagaucucaaaggcucuuuucagagccaccaaaaaaaaaaaaaaaaaaaaaaaaaaaaaaaaaaaaaaaaaaaaaaaaaaaaaaaaaaaaaaaaaaaaaaaaaaaaaaaaaaaaaaaaaaaaaaaaaaaaa

SEQ ID NO: 23585 - RNA, 4085 nt, Artificial Sequence
  SARS-CoV-2/Wuhan/WIV05/2019__EPI_ISL_402128 spike protein mRNA gc (1-1273)(K986P_V987P_K986P_V987P_L18F_D80A_D215G_L242del_A243del_ L244del_R246I_K417N_E484K_N501Y_D614G_A701V)
aggagagucccgcagucggcguccagcggcucugcuuguucgugugugugucguugcaggccuuauucaagcuuaccauguucguguuccuggugcugcugccccuggugagcagccagugcgugaacuucaccacccggacccagcugcccccugccuacaccaacagcuucacccggggcguguacuaccccgacaagguguuccggagcagcgugcugcacagcacccaggaccuguuccugcccuucuucagcaacgugaccugguuccacgccauccacgugagcggcaccaacggcaccaagcgguucgccaacccagugcugcccuucaacgacggcguguacuucgccagcaccgagaagucaaacaucauccggggcuggaucuuuggcaccacccuggacagcaagacacagagccugcugaucgugaacaacgcuaccaacguggugaucaaggugugcgaguuccaguucugcaacgaccccuuccugggcguguacuaccacaagaacaacaagagcuggauggagagcgaguuccgggucuacagcagcgccaacaauugcaccuucgaguacgugagccagcccuuccugauggaccuggagggcaagcagggcaacuucaagaaccuccgggaguucguguucaagaacaucgacggcuacuucaagaucuacagcaagcacacccccaucaaccuggugcggggacugccccagggcuucagcgcccuggagccucugguggaucugcccaucggcaucaacaucaccagguuccagacccugcacaucagcuaccugacccccggcgacagcagcagcggcuggaccgccggcgccgccgcauacuacgugggcuaccugcagccacggaccuuccugcugaaguacaacgagaacggcaccaucaccgacgccguggacugcgcccuggacccccugagcgagaccaagugcacccuuaagagcuucaccguggagaagggcaucuaccagaccagcaacuuccgggugcagcccacugagagcauugugcgguuccccaacaucaccaaccugugucccuucggcgagguguucaacgccacccgguucgccagcguguacgccuggaaccggaagcggaucagcaacugcguggccgacuacagcgugcuguacaacagcgccagcuucagcaccuucaagugcuacggcgugagcccuaccaagcugaacgaccugugcuucaccaacguguacgcugacagcuucgugauccggggcgacgaggugcggcagaucgcccccggccagaccggcaacaucgccgacuacaacuacaagcugcccgacgacuucaccggcugcgugaucgccuggaacagcaacaaccuggacagcaaggugggcggcaacuacaacuaccuguaccggcuauuccguaagagcaaccugaagccauuugagcgggacaucagcaccgagaucuaccaggccgguagcacccccugcaacggcgugaagggcuucaacugcuacuucccccugcagagcuacggcuuccagcccaccuacggcgugggcuaccagcccuaccgggugguggugcugagcuucgagcugcugcacgcccccgccaccgugugcggcccuaaaaagagcaccaaccuggugaagaacaagugcgugaacuucaauuucaacggccugaccggcaccggcgugcugaccgagagcaacaagaaguuccugcccuuccagcaguucggccgggacaucgccgacaccaccgaugcagugcgggacccccagacccuggagauccuggacaucaccccaugcagcuucggcggcgugagcgucaucacccccggaacaaacaccagcaaccagguggccgugcuguaccagggcgugaacugcaccgaggugcccguggccauccacgccgaccagcugacccccaccuggcggguguacagcaccggcagcaacguguuccagacccgggccggcugccugaucggcgccgagcacgugaacaacuccuacgagugcgacauccccaucggcgcuggcaucugcgccagcuaccagacccagaccaacagcccccggcgggcccggagcguggccagccagagcaucaucgccuacaccaugagccugggcguggagaacagcguggccuacagcaacaacagcaucgccaucccuaccaacuucaccauaagcgugaccaccgagauccugcccgugagcaugaccaagaccagcguggacuguaccauguacaucugcggcgacagcaccgagugcagcaaccuguuacugcaguacggcagcuucugcacccagcugaaccgggcgcugaccggcaucgccguggagcaggacaagaacacccaagagguguucgcccaggugaagcagaucuacaagacucccccaaucaaggacuucggcggcuucaacuucagccagauccugcccgaccccagcaagcccagcaagcggagcuucaucgaggaccugcuguucaacaaggugacccuggccgacgccggcuucaucaagcaguacggggacugccugggcgacaucgccgcccgggaccugaucugcgcucagaaguucaacggccugaccgugcugcccccucugcugaccgaugagaugaucgcccaguacaccagcgcccugcuggccggcaccaucaccagcggcuggaccuucggcgccggcgccgcacugcagauccccuucgccaugcagauggccuaccgguucaacggcaucggcgugacccagaacgugcuguacgagaaccagaagcugaucgccaaccaguucaacagcgccaucggcaagauccaggacagccugagcagcaccgccagcgcccugggcaagcugcaggacguggugaaccagaacgcccaggcucugaacacccuggugaagcagcugagcagcaacuuuggcgccaucagcucagugcugaaugacauccugagccggcuggaucccccagaggccgaggugcagaucgacaggcugaucaccggccggcugcagagccugcagaccuacgugacccagcagcugauccgggccgccgagauucgggccagcgccaaccuggccgcaaccaagaugagcgagugcgugcugggccagagcaagcggguggacuucugcggcaagggcuaccaccugaugagcuucccccagagcgcuccccacggcgugguguuccugcacgucacauacgugcccgcccaggagaagaacuucaccaccgcccccgccaucugccacgacggaaaggcccacuucccccgggagggcguguucgugagcaacggcacccacugguucgugacccagcggaacuucuacgagccucagaucaucaccaccgacaacaccuucgugagcggcaacugcgacguggugaucggcaucgugaacaacaccguguacgacccccugcagcccgagcuggacagcuucaaggaggagcucgacaaguacuucaagaaccacaccagcccagacguggaccugggcgacaucagcggcaucaacgccagcguggugaacauccagaaggagaucgaccggcugaacgagguggccaagaaccugaacgagagccugaucgaccugcaggagcugggcaaguacgagcaguacaucaaguggcccugguacaucuggcugggcuucaucgccggccugaucgccaucgugauggugaccaucaugcugugcugcaugaccagcugcuguagcugccugaagggcugcugcagcugcggcagcugcugcaaguucgacgaggacgacagcgagcccgugcugaagggcgugaagcugcacuacaccugaggacuagucccuguucccagagcccacuuuuuuuucuuuuuuugaaauaaaauagccugucuuucagaucucaaaggcucuuuucagagccaccaaaaaaaaaaaaaaaaaaaaaaaaaaaaaaaaaaaaaaaaaaaaaaaaaaaaaaaaaaaaaaaaaaaaaaaaaaaaaaaaaaaaaaaaaaaaaaaaaaaaa

SEQ ID NO: 23586 - RNA, 4094 nt, Artificial Sequence
  SARS-CoV-2/Wuhan/WIV05/2019__EPI_ISL_402128 spike protein mRNA gc (1-1273)(K986P_V987P_K986P_V987P_E484K_D614G)
aggagagucccgcagucggcguccagcggcucugcuuguucgugugugugucguugcaggccuuauucaagcuuaccauguucguguuccuggugcugcugccccuggugagcagccagugcgugaaccugaccacccggacccagcugcccccugccuacaccaacagcuucacccggggcguguacuaccccgacaagguguuccggagcagcgugcugcacagcacccaggaccuguuccugcccuucuucagcaacgugaccugguuccacgccauccacgugagcggcaccaacggcaccaagcgguucgacaacccagugcugcccuucaacgacggcguguacuucgccagcaccgagaagucaaacaucauccggggcuggaucuucggcaccacccuggacagcaagacacagagccugcugaucgugaacaacgccaccaacguggugaucaaggugugcgaguuucaguucugcaacgaccccuuccugggcguguacuaccacaagaacaacaagagcuggauggagagcgaguuccgggucuacagcagcgcuaacaauugcaccuucgaguacgugagccagcccuuccugauggaccucgagggcaagcagggcaacuucaagaaccugcgggaguucguguucaagaacaucgauggcuacuucaagaucuacagcaagcacacccccaucaaccuggugcgggaccugccccagggauucagcgcccuggagccucugguggaccugcccaucggcaucaacaucaccagguuccagacccugcuggcccugcaccggagcuaccugacccccggcgacagcagcagcggcuggaccgccggcgccgccgcauacuacgugggcuaccugcagccacggaccuuccugcugaaguacaacgagaacggcaccaucaccgacgccguggacugcgcccuggacccccugagcgagaccaagugcacccuaaagagcuucaccguggagaagggcaucuaccagaccagcaacuuccgggugcagcccacugagagcaucgugcgguuccccaacauuaccaaccugugucccuucggcgagguguucaacgccacccgguucgccagcguguacgccuggaaccggaagcggaucagcaacugcguggccgacuacagcgugcuguacaacagcgccagcuucagcaccuucaagugcuacggcgugagcccuaccaagcugaacgaccugugcuucaccaacguguacgcugacagcuucgugauccggggcgacgaggugcggcagaucgcccccggccagaccggcaagaucgccgacuacaacuacaagcugcccgacgacuucaccggcugcgugaucgccuggaacagcaacaaccuggacagcaaggugggcggcaacuacaacuaccuguaccggcuguuccguaagagcaaccugaagccauucgagcgggacaucagcaccgagaucuaccaggccggcagcacccccugcaacggugugaagggcuuuaacugcuacuucccccugcagagcuacggcuuccagcccaccaacggcgugggcuaccagcccuaccgggugguggugcugagcuucgagcugcugcacgcccccgccaccgugugcggcccuaaaaagagcaccaaccuggugaagaacaagugcgugaacuucaauuucaacggccugaccggcaccggcgugcugaccgagagcaacaagaaguuccugcccuuccagcaguucggccgggauaucgccgacaccaccgacgcagugcgggacccccagacccuggagauccuggacaucaccccaugcagcuucggcggcgugagcgucaucacccccggcacaaacaccagcaaccagguggccgugcuguaccagggagugaacugcaccgaggugcccguggccauccacgccgaccagcugacccccaccuggcggguguacagcaccggcagcaacguguuccagacccgggccggcugccugaucggcgccgagcacgugaacaacuccuacgagugcgacauccccaucggcgcuggcaucugcgccagcuaccagacccagaccaacagcccccggcgggcccggagcguggccagccagagcaucaucgccuacaccaugagcuuaggcgccgagaacagcguggccuacagcaacaacagcaucgcgaucccuaccaacuucaccaucagcgugaccaccgagauacugcccgugagcaugaccaagaccagcguggacuguaccauguacaucugcggcgacagcaccgagugcagcaaccugcugcugcaguacggcagcuucugcacccagcugaaccgggcccugaccggcaucgccguggagcaggacaagaacacccaagagguguucgcccaggugaagcagaucuacaagacucccccaaucaaggacuucggcggcuucaacuucagccagauccugcccgaccccagcaagcccagcaagcggagcuucaucgaggaccugcuguucaacaaggugacccuggccgacgccggcuucaucaagcaguacggcgacugccugggggauaucgccgcucgggaccugaucugcgcccagaaguucaacggccugaccgugcugcccccucugcugaccgacgagaugaucgcccaguacaccagcgcccugcuugccggcaccaucaccagcggcuggaccuucggcgccggcgcagcccugcagauccccuucgccaugcagauggccuaccgguucaacggcaucggcgugacccagaacgugcuguacgagaaccagaagcugaucgccaaccaguucaacagcgccaucggcaagauccaggacagccugagcagcaccgccagcgcccugggcaagcugcaggacguggugaaccagaacgcucaggcccugaacacccuggugaagcagcugagcagcaacuucggcgccaucagcucagugcugaaugacauccugagcaggcuggaucccccagaggccgaggugcagaucgaccggcugaucaccggccggcugcagagccugcagaccuacgugacccagcagcugauccgggccgccgagauccgggccagcgccaaccuggcagccaccaagaugagcgagugcgugcugggccagagcaagcggguggacuuuugcggcaagggcuaccaccugaugagcuucccccagagcgcuccccacggcgugguguuccuccacgugacauacguccccgcccaggagaagaacuucaccaccgcccccgccauuugccacgacggcaaggcccacuucccccgggagggaguguucgugagcaacggcacccacugguucgugacccagcggaacuucuacgagccucagaucaucaccaccgacaacaccuucgugagcggcaacugcgacguggugaucggcaucgugaacaacaccguguacgacccccugcagcccgagcuggacagcuucaaggaggagcuggacaaguacuucaagaaccacaccagcccagacguggaccugggcgacaucagcggcaucaacgccagcguggugaacauccagaaggagaucgaccggcugaacgagguggccaagaaccugaacgagagccugaucgaccugcaggagcugggcaaguacgagcaguacaucaaguggcccugguacaucuggcugggcuucaucgccggccugaucgccaucgugauggugaccaucaugcugugcugcaugaccagcugcuguagcugccugaagggcugcugcagcugcggcagcugcugcaaguucgacgaggacgacagcgagcccgugcugaagggcgugaagcugcacuacaccugaggacuagucccuguucccagagcccacuuuuuuuucuuuuuuugaaauaaaauagccugucuuucagaucucaaaggcucuuuucagagccaccaaaaaaaaaaaaaaaaaaaaaaaaaaaaaaaaaaaaaaaaaaaaaaaaaaaaaaaaaaaaaaaaaaaaaaaaaaaaaaaaaaaaaaaaaaaaaaaaaaaaa

SEQ ID NO: 23587 - RNA, 4094 nt, Artificial Sequence
  SARS-CoV-2/Wuhan/WIV05/2019__EPI_ISL_402128 spike protein mRNA gc (1-1273)(K986P_V987P_K986P_V987P_L18F_T20N_P26S_D138Y_R190S_K417T _E484K_N501Y_D614G_H655Y_T1027I)
aggagagucccgcagucggcguccagcggcucugcuuguucgugugugugucguugcaggccuuauucaagcuuaccauguucguguuccuggugcugcugccccuggugagcagccagugcgugaacuucaccaaccggacccagcugcccagcgccuacaccaacagcuucacccggggcguguacuacccugacaagguguuccggagcagcgugcugcacagcacccaggaccuguuccugcccuucuucagcaacgugaccugguuccacgccauccacgugagcggcaccaacggcaccaagcgguucgacaaccccgugcugccauucaacgacggcguguacuucgccagcaccgagaagucaaacaucauccggggcuggaucuuuggcaccacccuggacagcaagacccagagccugcugaucgugaacaacgccacaaacguggugaucaaggugugcgaguuccaguucugcaacuaccccuuccugggcguguacuaccacaagaacaacaagagcuggauggagagcgaguuccgggucuacagcagcgcuaauaacugcaccuucgaguacgugagccagcccuuccugauggaccuggagggcaagcagggcaacuucaagaaccucagcgaguucguguucaagaacaucgacggcuacuucaagaucuacagcaagcacacccccaucaaccuggugcgggaucugccccagggauucagcgcccuggagccccugguggaccugccuaucggcaucaacaucacccgguuccagacccugcuggcccugcacaggagcuaccugacccccggcgacagcagcagcggcuggaccgccggcgccgccgcauacuacgugggcuaccugcagccccggaccuuccugcugaaguacaacgagaacggcaccaucaccgacgccguggacugcgcccuggacccacugagcgagaccaagugcacccuaaagagcuucaccguggagaagggcaucuaccagaccagcaacuuccgggugcagcccaccgagagcaucgugcgguuccccaacauuacuaaccugugucccuucggcgagguguucaacgccacccgguucgccagcguguacgccuggaaccggaagcggaucagcaacugcguggccgacuacagcgugcuguacaacagcgccagcuucagcaccuucaagugcuacggcgugagccccaccaagcugaacgaccugugcuucaccaacguguacgcugacagcuucgugauccggggcgacgaggugcggcagaucgccccuggccagaccggcaccaucgccgacuacaacuacaagcugcccgacgacuucaccggcugcgugaucgccuggaacagcaacaaccuggacagcaaggugggcggcaacuacaacuaccuguaccggcuguuccguaagagcaaccugaagcccuuugagcgggacaucagcaccgagaucuaccaggccggcagcaccccaugcaacggugugaagggcuucaacugcuacuucccccugcagagcuacggcuuccagcccaccuacggcgugggcuaccagcccuaccgggugguggugcugagcuucgagcugcugcacgcccccgccaccgugugcggccccaaaaagagcaccaaccuggugaagaacaagugcgugaacuucaauuucaacggccugaccggcaccggcgugcugaccgagagcaacaagaaguuccugccuuuccagcaguucggccgggacaucgccgauaccaccgacgcagugcgggacccccagacccuggagauccuggacaucacccccugcagcuucggcggcgugagcgucaucaccccaggcacaaacaccagcaaccagguggccgugcuguaccagggagugaacugcaccgaggugcccguggccauccacgccgaccagcugacccccaccuggcggguguacuccaccggcagcaacguguuccagacccgggccggcugccugaucggcgccgaguacgugaacaacagcuacgagugcgacauccccaucggcgcuggcaucugcgccagcuaccagacccagaccaacagcccccggcgggcccggagcguggccagccagagcaucaucgccuacaccaugagccugggcgccgagaacagcguggccuacagcaacaacagcaucgcgauccccaccaacuucaccaucagcgugaccaccgagauauuaccugugagcaugaccaagaccagcguggacuguaccauguacaucugcggcgacagcaccgagugcagcaaccugcugcugcaguacggcagcuucugcacccagcugaaccgggcccugaccggcaucgccguggagcaggacaagaacacccaagagguguucgcccaggugaagcagaucuacaagacuccacccaucaaggacuucggcggcuucaacuucagccagauccugcccgaccccagcaagcccagcaagcggagcuucaucgaggaccugcuguucaacaaggugacccuggccgacgccggcuucaucaagcaguacggcgacugccugggggacaucgccgcucgggaucugaucugcgcccagaaguucaacggccugaccgugcugccuccccugcugaccgacgagaugaucgcccaguacaccagcgcccugcuggccggcaccaucaccagcggcuggaccuucggcgccggcgcagcccuucagauccccuucgccaugcagauggccuaccgguucaacggcaucggcgugacccagaacgugcuguacgagaaccagaagcugaucgccaaccaguucaacagcgccaucggcaagauccaggacagccugagcagcaccgccagcgcccugggcaagcugcaggacguggugaaccagaacgcucaggcccugaacacccuggugaagcagcugagcucaaacuuuggcgccaucagcagcgugcugaaugacauccugagccggcuggacccacccgaggccgaggugcagaucgacaggcugaucaccggccggcugcagagccugcagaccuacgugacccagcagcugauccgggccgccgagauccgggccagcgccaaccuggcagccauuaagaugagcgagugcgugcugggccagagcaagcggguggacuucugcggcaagggcuaccaccugaugagcuucccccagagcgcuccccacggcgugguguuccugcacgugaccuacguccccgcccaggagaagaacuucacaaccgcccccgccaucugccacgacggcaaggcccacuucccccgggagggaguguucgugagcaacggcacccacugguucgugacccagcggaacuucuacgagccccagaucaucaccaccgacaacaccuucgugagcggcaacugcgacguggugaucggcaucgugaacaacaccguguacgacccucuccagcccgagcuggacagcuucaaggaggagcuggacaaguacuucaagaaccacaccagccccgacguggaccugggcgauaucagcggcaucaacgccagcguggugaacauccagaaggagaucgaccggcugaacgagguggccaagaaccugaacgagagccugaucgaccugcaggagcugggcaaguacgagcaguacaucaaguggccaugguacaucuggcugggcuucaucgccggccugaucgccaucgugauggugaccaucaugcugugcugcaugaccagcugcuguagcugccugaagggcugcugcagcugcggcagcugcugcaaguucgacgaggacgacagcgagcccgugcugaagggcgugaagcugcacuacaccugaggacuagucccuguucccagagcccacuuuuuuuucuuuuuuugaaauaaaauagccugucuuucagaucucaaaggcucuuuucagagccaccaaaaaaaaaaaaaaaaaaaaaaaaaaaaaaaaaaaaaaaaaaaaaaaaaaaaaaaaaaaaaaaaaaaaaaaaaaaaaaaaaaaaaaaaaaaaaaaaaaaaa

SEQ ID NO: 23588 - RNA, 4094 nt, Artificial Sequence
  SARS-CoV-2/Wuhan/WIV05/2019__EPI_ISL_402128 spike protein mRNA gc (1-1273)(K986P_V987P_K986P_V987P_S13I_W152C_L452R_D614G)
aggagagucccgcagucggcguccagcggcucugcuuguucgugugugugucguugcaggccuuauucaagcuuaccauguucguguuccuggugcugcugccccuggugagcauccagugcgugaaccugaccacccggacccagcugcccccugccuacaccaacagcuucacccggggcguguacuaccccgacaagguguuccggagcagcgugcugcacagcacccaggaccuguuccugcccuucuucagcaacgugaccugguuccacgccauccacgugagcggcaccaacggcaccaagcgguucgacaacccagugcugcccuucaacgacggcguguacuucgccagcaccgagaagucaaacaucauccggggcuggaucuucggcaccacccuggacagcaagacacagagccugcugaucgugaacaacgccaccaacguggugaucaaggugugcgaguuucaguucugcaacgaccccuuccugggcguguacuaccacaagaacaacaagagcugcauggagagcgaguuccgggucuacagcagcgcuaacaauugcaccuucgaguacgugagccagcccuuccugauggaccucgagggcaagcagggcaacuucaagaaccugcgggaguucguguucaagaacaucgauggcuacuucaagaucuacagcaagcacacccccaucaaccuggugcgggaccugccccagggauucagcgcccuggagccucugguggaccugcccaucggcaucaacaucaccagguuccagacccugcuggcccugcaccggagcuaccugacccccggcgacagcagcagcggcuggaccgccggcgccgccgcauacuacgugggcuaccugcagccacggaccuuccugcugaaguacaacgagaacggcaccaucaccgacgccguggacugcgcccuggacccccugagcgagaccaaguguacccuaaagagcuucaccguggagaagggcaucuaccagaccagcaacuuccgggugcagcccacugagagcauugugcgguuccccaacaucaccaaccugugccccuucggcgagguguucaacgccacccgguucgccagcguguacgccuggaaccggaagcggaucagcaacugcguggccgacuacagcgugcuguacaacagcgccagcuucagcaccuucaagugcuacggcgugagcccuaccaagcugaacgaccugugcuucaccaacguguacgcugacagcuucgugauccggggcgacgaggugcggcagaucgcccccggccagaccggcaagaucgccgacuacaacuacaagcugcccgacgacuucaccggcugcgugaucgccuggaacagcaacaaccuggacagcaaggugggcggcaacuacaacuaccgguaccggcuguuccguaagagcaaccugaagccauucgagcgggacaucagcaccgagaucuaccaggccggcagcacccccugcaacgguguggagggcuuuaacugcuacuucccccugcagagcuacggcuuccagcccaccaacggcgugggcuaccagcccuaccgggugguggugcugagcuucgagcugcugcacgcccccgccaccgugugcggcccuaaaaagagcaccaaccuggugaagaacaagugcgugaacuucaauuucaacggccugaccggcaccggcgugcugaccgagagcaacaagaaguuccugcccuuccagcaguucggccgggauaucgccgacaccaccgacgcagugcgggacccccagacccuggagauccuggacaucaccccaugcagcuucggcggcgugagcgucaucacccccggcacaaacaccagcaaccagguggccgugcuguaccagggagugaacugcaccgaggugcccguggccauccacgccgaccagcugacccccaccuggcggguguacagcaccggcagcaacguguuccagacccgggccggcugccugaucggcgccgagcacgugaacaacagcuacgagugcgacauccccaucggcgcuggcaucugugccuccuaccagacccagaccaacagcccccggcgggcccggagcguggccagccagagcaucaucgccuacaccaugagccugggcgccgagaacagcguggccuacagcaacaacagcaucgcgaucccuaccaacuucaccauaagcgugaccaccgagaucuuacccgugagcaugaccaagaccagcguggacugcaccauguacaucugcggcgacagcaccgagugcagcaaccugcugcugcaguacggcagcuucugcacccagcugaaccgggcccugaccggcaucgccguggagcaggacaagaacacccaagagguguucgcccaggugaagcagaucuacaagacucccccaaucaaggacuucggcggcuucaacuucagccagauccugcccgaccccagcaagcccagcaagcggagcuucaucgaggaccugcuguucaacaaggugacccuggccgacgccggcuucaucaagcaguacggcgacugccugggggauaucgccgcucgggaccugaucugcgcccagaaguucaacggccugaccgugcugcccccucugcugaccgacgagaugaucgcccaguacaccagcgcccugcuggccggcaccaucaccagcggcuggaccuucggcgccggcgcagcccuucagauccccuucgccaugcagauggccuacagguucaacggcaucggcgugacccagaacgugcuguacgagaaccagaagcugaucgccaaccaguucaacagcgccaucggcaagauccaggacagccugagcagcaccgccagcgcccugggcaagcugcaggacguggugaaccagaacgcucaggcccugaacacccuggugaagcagcugagcagcaacuucggcgccaucagcagcgugcugaaugacauccugucacggcuggaucccccagaggccgaggugcagaucgaccggcugaucaccggccggcugcagagccugcagaccuacgugacccagcagcugauccgggccgccgagauucgggccagcgccaaccuggcagccaccaagaugagcgagugcgugcugggccagagcaagcggguggacuuuugcggcaagggcuaccaccugaugagcuucccccagagcgcuccccacggcgugguguuccugcacgugacauacguccccgcccaggagaagaacuucaccaccgcccccgccaucugccacgacggcaaggcccacuucccccgggagggaguguucgugagcaacggcacccacugguucgugacccagcggaacuucuacgagccucagaucaucaccaccgacaacaccuucgugagcggcaacugcgacguggugaucggcaucgugaacaacaccguguacgacccccuccagcccgagcuggacagcuucaaggaggagcuggacaaguacuucaagaaccacaccagcccagacguggaccugggcgacaucagcggcaucaacgccagcguggugaacauccagaaggagaucgaccggcugaacgagguggccaagaaccugaacgagagccugaucgaccugcaggagcugggcaaguacgagcaguacaucaaguggcccugguacaucuggcugggcuucaucgccggccugaucgccaucgugauggugaccaucaugcugugcugcaugaccagcuguugcagcugccugaagggcugcugcagcugcggcagcugcugcaaguucgacgaggacgacagcgagcccgugcugaagggcgugaagcugcacuacaccugaggacuagucccuguucccagagcccacuuuuuuuucuuuuuuugaaauaaaauagccugucuuucagaucucaaaggcucuuuucagagccaccaaaaaaaaaaaaaaaaaaaaaaaaaaaaaaaaaaaaaaaaaaaaaaaaaaaaaaaaaaaaaaaaaaaaaaaaaaaaaaaaaaaaaaaaaaaaaaaaaaaaa

SEQ ID NO: 23589 - RNA, 4094 nt, Artificial Sequence; identical to SEQ ID NO: 151
  SARS-CoV-2/Wuhan/WIV05/2019__EPI_ISL_402128 spike protein mRNA gc mod (1-1273)(K986P_V987P) R10162

SEQ ID NO: 23590 - RNA, 4094 nt, Artificial Sequence
  SARS-CoV-2/Wuhan/WIV05/2019__EPI_ISL_402128 spike protein mRNA gc mod (1-1273)(K986P_V987P_ D614G)
aggagagucccgcagucggcguccagcggcucugcuuguucgugugugugucguugcaggccuuauucaagcuuaccauguucguguuucuggugcugcugccccugguguccagccagugugugaaccugaccaccagaacacagcugccuccagccuacaccaacagcuucaccagaggcguguacuaccccgacaagguguucagauccagcgugcugcacucuacccaggaccuguuccugccuuucuucagcaacgugaccugguuccacgccauccacguguccggcaccaauggcaccaagagauucgacaaccccgugcugcccuucaacgacgggguguacuuugccagcaccgagaaguccaacaucaucagaggcuggaucuucggcaccacacuggacagcaagacccagagccugcugaucgugaacaacgccaccaacguggucaucaaagugugcgaguuccaguucugcaacgaccccuuccugggcgucuacuaccacaagaacaacaagagcuggauggaaagcgaguuccggguguacagcagcgccaacaacugcaccuucgaguacgugucccagccuuuccugauggaccuggaaggcaagcagggcaacuucaagaaccugcgcgaguucguguucaagaacaucgacggcuacuucaaaaucuacagcaagcacaccccuaucaaccucgugcgggaucugccucagggcuucucugcucuggaaccccugguggaucugcccaucggcaucaacaucacccgguuucagacacugcuggcccugcacagaagcuaccugacaccuggcgauagcagcagcggauggacagcuggugccgccgcuuacuaugugggcuaccugcagccuagaaccuuccugcugaaguacaacgagaacggcaccaucaccgacgccguggauugugcucuggauccucugagcgagacaaagugcacccugaaguccuucaccguggaaaagggcaucuaccagaccagcaacuuccgggugcagcccaccgaauccaucgugcgguuccccaauaucaccaaucugugccccuucggcgagguguucaaugccaccagauucgccucuguguacgccuggaaccggaagcggaucagcaauugcguggccgacuacuccgugcuguacaacuccgccagcuucagcaccuucaagugcuacggcguguccccuaccaagcugaacgaccugugcuucacaaacguguacgccgacagcuucgugauccggggagaugaagugcggcagauugccccuggacagacaggcaagaucgccgacuacaacuacaagcugcccgacgacuucaccggcugugugauugccuggaacagcaacaaccuggacuccaaagucggcggcaacuacaauuaccuguaccggcuguuccggaaguccaaucugaagcccuucgagcgggacaucagcaccgaaaucuaucaggccggcagcaccccuugcaacggcguggaaggcuucaacugcuacuucccacugcaguccuacggcuuucagcccacaaauggcgugggcuaucagcccuacagagugguggugcugagcuucgaacugcugcaugcuccugccacagugugcggcccuaagaaaagcaccaaucucgugaagaacaaaugcgugaacuucaacuucaacggccugaccggcaccggcgugcugacagagagcaacaagaaguuccugccauuccagcaguuuggccgggauaucgccgauaccacagacgccguuagagauccccagacacuggaaauccuggacaucaccccaugcagcuucggcggagugucugugaucaccccuggcaccaacaccagcaaucagguggcagugcuguaccagggcgugaacuguaccgaagugcccguggccauucacgccgaucagcugacaccuacauggcggguguacuccaccggcagcaauguguuucagaccagagccggcugucugaucggagccgagcacgugaacaauagcuacgagugcgacauccccaucggcgcuggcaucugugccagcuaccagacacagacaaacagccccagacgggcuagaagcguggccagccagagcaucauugccuacacaaugucucugggcgccgagaacagcguggccuacuccaacaacucuaucgcuauccccaccaacuucaccaucagcgugaccaccgagauccugccuguguccaugaccaagaccagcguggacugcaccauguacaucugcggcgauuccaccgagugcuccaaccugcugcugcaguacggcagcuucugcacccagcugaauagagcccugacagggaucgccguggaacaggacaagaacacccaagagguguucgcccaagugaagcaaaucuacaagaccccuccuaucaaggacuucggcggcuucaauuucagccagauucugcccgauccuagcaagcccagcaagcggagcuucaucgaggaccugcuguucaacaaagugacacuggccgacgccggcuucaucaagcaguauggcgauugucugggcgacauugccgccagggaucugauuugcgcccagaaguuuaacggacugacagugcugccuccucugcugaccgaugagaugaucgcccaguacacaucugcccugcuggccggcacaaucacaagcggcuggacauuuggagcuggcgccgcucugcagauccccuuugcuaugcagauggccuaccgguucaacggcaucggagugacccagaaugugcuguacgagaaccagaagcugaucgccaaccaguucaacagcgccaucggcaagauccaggacagccugagcagcacagcaagcgcccugggaaagcugcaggacguggucaaccagaaugcccaggcacugaacacccuggucaagcagcuguccuccaacuucggcgccaucagcucugugcugaacgauauccugagcagacuggacccuccugaggccgaggugcagaucgacagacugaucacaggcagacugcagagccuccagacauacgugacccagcagcugaucagagccgccgagauuagagccucugccaaucuggccgccaccaagaugucugagugugugcugggccagagcaagagaguggacuuuugcggcaagggcuaccaccugaugagcuucccucagucugccccucacggcgugguguuucugcacgugacauaugugcccgcucaagagaagaauuucaccaccgcuccagccaucugccacgacggcaaagcccacuuuccuagagaaggcguguucguguccaacggcacccauugguucgugacacagcggaacuucuacgagccccagaucaucaccaccgacaacaccuucgugucuggcaacugcgacguugugaucggcauugugaacaauaccguguacgacccucugcagcccgagcuggacagcuucaaagaggaacuggacaaguacuuuaagaaccacacaagccccgacguggaccugggcgauaucagcggaaucaaugccagcgucgugaacauccagaaagagaucgaccggcugaacgagguggccaagaaucugaacgagagccugaucgaccugcaagaacuggggaaguacgagcaguacaucaaguggcccugguacaucuggcugggcuuuaucgccggacugauugccaucgugauggucacaaucaugcuguguugcaugaccagcugcuguagcugccugaagggcuguuguagcuguggcagcugcugcaaguucgacgaggacgauucugagcccgugcugaagggcgugaaacugcacuacaccugaggacuagucccuguucccagagcccacuuuuuuuucuuuuuuugaaauaaaauagccugucuuucagaucucaaaggcucuuuucagagccaccaaaaaaaaaaaaaaaaaaaaaaaaaaaaaaaaaaaaaaaaaaaaaaaaaaaaaaaaaaaaaaaaaaaaaaaaaaaaaaaaaaaaaaaaaaaaaaaaaaaaa

SEQ ID NO: 23591 - RNA, 4094 nt, Artificial Sequence
  SARS-CoV-2/Wuhan/WIV05/2019__EPI_ISL_402128 spike protein mRNA gc mod (1-1273)(K986P_V987P_A222V_D614G)
aggagagucccgcagucggcguccagcggcucugcuuguucgugugugugucguugcaggccuuauucaagcuuaccauguucguguuucuggugcugcugccccugguguccagccagugugugaaccugaccaccagaacacagcugccuccagccuacaccaacagcuucaccagaggcguguacuaccccgacaagguguucagauccagcgugcugcacucuacccaggaccuguuccugccuuucuucagcaacgugaccugguuccacgccauccacguguccggcaccaauggcaccaagagauucgacaaccccgugcugcccuucaacgacgggguguacuuugccagcaccgagaaguccaacaucaucagaggcuggaucuucggcaccacacuggacagcaagacccagagccugcugaucgugaacaacgccaccaacguggucaucaaagugugcgaguuccaguucugcaacgaccccuuccugggcgucuacuaccacaagaacaacaagagcuggauggaaagcgaguuccggguguacagcagcgccaacaacugcaccuucgaguacgugucccagccuuuccugauggaccuggaaggcaagcagggcaacuucaagaaccugcgcgaguucguguucaagaacaucgacggcuacuucaaaaucuacagcaagcacaccccuaucaaccucgugcgggaucugccucagggcuucucugugcuggaaccccugguggaucugcccaucggcaucaacaucacccgguuucagacacugcuggcccugcacagaagcuaccugacaccuggcgauagcagcagcggauggacagcuggugccgccgcuuacuaugugggcuaccugcagccuagaaccuuccugcugaaguacaacgagaacggcaccaucaccgacgccguggauugugcucuggauccucugagcgagacaaagugcacccugaaguccuucaccguggaaaagggcaucuaccagaccagcaacuuccgggugcagcccaccgaauccaucgugcgguuccccaauaucaccaaucugugccccuucggcgagguguucaaugccaccagauucgccucuguguacgccuggaaccggaagcggaucagcaauugcguggccgacuacuccgugcuguacaacuccgccagcuucagcaccuucaagugcuacggcguguccccuaccaagcugaacgaccugugcuucacaaacguguacgccgacagcuucgugauccggggagaugaagugcggcagauugccccuggacagacaggcaagaucgccgacuacaacuacaagcugcccgacgacuucaccggcugugugauugccuggaacagcaacaaccuggacuccaaagucggcggcaacuacaauuaccuguaccggcuguuccggaaguccaaucugaagcccuucgagcgggacaucagcaccgaaaucuaucaggccggcagcaccccuugcaacggcguggaaggcuucaacugcuacuucccacugcaguccuacggcuuucagcccacaaauggcgugggcuaucagcccuacagagugguggugcugagcuucgaacugcugcaugcuccugccacagugugcggcccuaagaaaagcaccaaucucgugaagaacaaaugcgugaacuucaacuucaacggccugaccggcaccggcgugcugacagagagcaacaagaaguuccugccauuccagcaguuuggccgggauaucgccgauaccacagacgccguuagagauccccagacacuggaaauccuggacaucaccccaugcagcuucggcggagugucugugaucaccccuggcaccaacaccagcaaucagguggcagugcuguaccagggcgugaacuguaccgaagugcccguggccauucacgccgaucagcugacaccuacauggcggguguacuccaccggcagcaauguguuucagaccagagccggcugucugaucggagccgagcacgugaacaauagcuacgagugcgacauccccaucggcgcuggcaucugugccagcuaccagacacagacaaacagccccagacgggcuagaagcguggccagccagagcaucauugccuacacaaugucucugggcgccgagaacagcguggccuacuccaacaacucuaucgcuauccccaccaacuucaccaucagcgugaccaccgagauccugccuguguccaugaccaagaccagcguggacugcaccauguacaucugcggcgauuccaccgagugcuccaaccugcugcugcaguacggcagcuucugcacccagcugaauagagcccugacagggaucgccguggaacaggacaagaacacccaagagguguucgcccaagugaagcaaaucuacaagaccccuccuaucaaggacuucggcggcuucaauuucagccagauucugcccgauccuagcaagcccagcaagcggagcuucaucgaggaccugcuguucaacaaagugacacuggccgacgccggcuucaucaagcaguauggcgauugucugggcgacauugccgccagggaucugauuugcgcccagaaguuuaacggacugacagugcugccuccucugcugaccgaugagaugaucgcccaguacacaucugcccugcuggccggcacaaucacaagcggcuggacauuuggagcuggcgccgcucugcagauccccuuugcuaugcagauggccuaccgguucaacggcaucggagugacccagaaugugcuguacgagaaccagaagcugaucgccaaccaguucaacagcgccaucggcaagauccaggacagccugagcagcacagcaagcgcccugggaaagcugcaggacguggucaaccagaaugcccaggcacugaacacccuggucaagcagcuguccuccaacuucggcgccaucagcucugugcugaacgauauccugagcagacuggacccuccugaggccgaggugcagaucgacagacugaucacaggcagacugcagagccuccagacauacgugacccagcagcugaucagagccgccgagauuagagccucugccaaucuggccgccaccaagaugucugagugugugcugggccagagcaagagaguggacuuuugcggcaagggcuaccaccugaugagcuucccucagucugccccucacggcgugguguuucugcacgugacauaugugcccgcucaagagaagaauuucaccaccgcuccagccaucugccacgacggcaaagcccacuuuccuagagaaggcguguucguguccaacggcacccauugguucgugacacagcggaacuucuacgagccccagaucaucaccaccgacaacaccuucgugucuggcaacugcgacguugugaucggcauugugaacaauaccguguacgacccucugcagcccgagcuggacagcuucaaagaggaacuggacaaguacuuuaagaaccacacaagccccgacguggaccugggcgauaucagcggaaucaaugccagcgucgugaacauccagaaagagaucgaccggcugaacgagguggccaagaaucugaacgagagccugaucgaccugcaagaacuggggaaguacgagcaguacaucaaguggcccugguacaucuggcugggcuuuaucgccggacugauugccaucgugauggucacaaucaugcuguguugcaugaccagcugcuguagcugccugaagggcuguuguagcuguggcagcugcugcaaguucgacgaggacgauucugagcccgugcugaagggcgugaaacugcacuacaccugaggacuagucccuguucccagagcccacuuuuuuuucuuuuuuugaaauaaaauagccugucuuucagaucucaaaggcucuuuucagagccaccaaaaaaaaaaaaaaaaaaaaaaaaaaaaaaaaaaaaaaaaaaaaaaaaaaaaaaaaaaaaaaaaaaaaaaaaaaaaaaaaaaaaaaaaaaaaaaaaaaaaa

SEQ ID NO: 23592 - RNA, 4094 nt, Artificial Sequence
  SARS-CoV-2/Wuhan/WIV05/2019__EPI_ISL_402128 spike protein mRNA gc mod (1-1273)(K986P_V987P_N439K_D614G)
aggagagucccgcagucggcguccagcggcucugcuuguucgugugugugucguugcaggccuuauucaagcuuaccauguucguguuucuggugcugcugccccugguguccagccagugugugaaccugaccaccagaacacagcugccuccagccuacaccaacagcuucaccagaggcguguacuaccccgacaagguguucagauccagcgugcugcacucuacccaggaccuguuccugccuuucuucagcaacgugaccugguuccacgccauccacguguccggcaccaauggcaccaagagauucgacaaccccgugcugcccuucaacgacgggguguacuuugccagcaccgagaaguccaacaucaucagaggcuggaucuucggcaccacacuggacagcaagacccagagccugcugaucgugaacaacgccaccaacguggucaucaaagugugcgaguuccaguucugcaacgaccccuuccugggcgucuacuaccacaagaacaacaagagcuggauggaaagcgaguuccggguguacagcagcgccaacaacugcaccuucgaguacgugucccagccuuuccugauggaccuggaaggcaagcagggcaacuucaagaaccugcgcgaguucguguucaagaacaucgacggcuacuucaaaaucuacagcaagcacaccccuaucaaccucgugcgggaucugccucagggcuucucugcucuggaaccccugguggaucugcccaucggcaucaacaucacccgguuucagacacugcuggcccugcacagaagcuaccugacaccuggcgauagcagcagcggauggacagcuggugccgccgcuuacuaugugggcuaccugcagccuagaaccuuccugcugaaguacaacgagaacggcaccaucaccgacgccguggauugugcucuggauccucugagcgagacaaagugcacccugaaguccuucaccguggaaaagggcaucuaccagaccagcaacuuccgggugcagcccaccgaauccaucgugcgguuccccaauaucaccaaucugugccccuucggcgagguguucaaugccaccagauucgccucuguguacgccuggaaccggaagcggaucagcaauugcguggccgacuacuccgugcuguacaacuccgccagcuucagcaccuucaagugcuacggcguguccccuaccaagcugaacgaccugugcuucacaaacguguacgccgacagcuucgugauccggggagaugaagugcggcagauugccccuggacagacaggcaagaucgccgacuacaacuacaagcugcccgacgacuucaccggcugugugauugccuggaacagcaagaaccuggacuccaaagucggcggcaacuacaauuaccuguaccggcuguuccggaaguccaaucugaagcccuucgagcgggacaucagcaccgaaaucuaucaggccggcagcaccccuugcaacggcguggaaggcuucaacugcuacuucccacugcaguccuacggcuuucagcccacaaauggcgugggcuaucagcccuacagagugguggugcugagcuucgaacugcugcaugcuccugccacagugugcggcccuaagaaaagcaccaaucucgugaagaacaaaugcgugaacuucaacuucaacggccugaccggcaccggcgugcugacagagagcaacaagaaguuccugccauuccagcaguuuggccgggauaucgccgauaccacagacgccguuagagauccccagacacuggaaauccuggacaucaccccaugcagcuucggcggagugucugugaucaccccuggcaccaacaccagcaaucagguggcagugcuguaccagggcgugaacuguaccgaagugcccguggccauucacgccgaucagcugacaccuacauggcggguguacuccaccggcagcaauguguuucagaccagagccggcugucugaucggagccgagcacgugaacaauagcuacgagugcgacauccccaucggcgcuggcaucugugccagcuaccagacacagacaaacagccccagacgggcuagaagcguggccagccagagcaucauugccuacacaaugucucugggcgccgagaacagcguggccuacuccaacaacucuaucgcuauccccaccaacuucaccaucagcgugaccaccgagauccugccuguguccaugaccaagaccagcguggacugcaccauguacaucugcggcgauuccaccgagugcuccaaccugcugcugcaguacggcagcuucugcacccagcugaauagagcccugacagggaucgccguggaacaggacaagaacacccaagagguguucgcccaagugaagcaaaucuacaagaccccuccuaucaaggacuucggcggcuucaauuucagccagauucugcccgauccuagcaagcccagcaagcggagcuucaucgaggaccugcuguucaacaaagugacacuggccgacgccggcuucaucaagcaguauggcgauugucugggcgacauugccgccagggaucugauuugcgcccagaaguuuaacggacugacagugcugccuccucugcugaccgaugagaugaucgcccaguacacaucugcccugcuggccggcacaaucacaagcggcuggacauuuggagcuggcgccgcucugcagauccccuuugcuaugcagauggccuaccgguucaacggcaucggagugacccagaaugugcuguacgagaaccagaagcugaucgccaaccaguucaacagcgccaucggcaagauccaggacagccugagcagcacagcaagcgcccugggaaagcugcaggacguggucaaccagaaugcccaggcacugaacacccuggucaagcagcuguccuccaacuucggcgccaucagcucugugcugaacgauauccugagcagacuggacccuccugaggccgaggugcagaucgacagacugaucacaggcagacugcagagccuccagacauacgugacccagcagcugaucagagccgccgagauuagagccucugccaaucuggccgccaccaagaugucugagugugugcugggccagagcaagagaguggacuuuugcggcaagggcuaccaccugaugagcuucccucagucugccccucacggcgugguguuucugcacgugacauaugugcccgcucaagagaagaauuucaccaccgcuccagccaucugccacgacggcaaagcccacuuuccuagagaaggcguguucguguccaacggcacccauugguucgugacacagcggaacuucuacgagccccagaucaucaccaccgacaacaccuucgugucuggcaacugcgacguugugaucggcauugugaacaauaccguguacgacccucugcagcccgagcuggacagcuucaaagaggaacuggacaaguacuuuaagaaccacacaagccccgacguggaccugggcgauaucagcggaaucaaugccagcgucgugaacauccagaaagagaucgaccggcugaacgagguggccaagaaucugaacgagagccugaucgaccugcaagaacuggggaaguacgagcaguacaucaaguggcccugguacaucuggcugggcuuuaucgccggacugauugccaucgugauggucacaaucaugcuguguugcaugaccagcugcuguagcugccugaagggcuguuguagcuguggcagcugcugcaaguucgacgaggacgauucugagcccgugcugaagggcgugaaacugcacuacaccugaggacuagucccuguucccagagcccacuuuuuuuucuuuuuuugaaauaaaauagccugucuuucagaucucaaaggcucuuuucagagccaccaaaaaaaaaaaaaaaaaaaaaaaaaaaaaaaaaaaaaaaaaaaaaaaaaaaaaaaaaaaaaaaaaaaaaaaaaaaaaaaaaaaaaaaaaaaaaaaaaaaaa

SEQ ID NO: 23593 - RNA, 4094 nt, Artificial Sequence
  SARS-CoV-2/Wuhan/WIV05/2019__EPI_ISL_402128 spike protein mRNA gc mod (1-1273)(K986P_V987P_S477N_D614G)
aggagagucccgcagucggcguccagcggcucugcuuguucgugugugugucguugcaggccuuauucaagcuuaccauguucguguuucuggugcugcugccccugguguccagccagugugugaaccugaccaccagaacacagcugccuccagccuacaccaacagcuucaccagaggcguguacuaccccgacaagguguucagauccagcgugcugcacucuacccaggaccuguuccugccuuucuucagcaacgugaccugguuccacgccauccacguguccggcaccaauggcaccaagagauucgacaaccccgugcugcccuucaacgacgggguguacuuugccagcaccgagaaguccaacaucaucagaggcuggaucuucggcaccacacuggacagcaagacccagagccugcugaucgugaacaacgccaccaacguggucaucaaagugugcgaguuccaguucugcaacgaccccuuccugggcgucuacuaccacaagaacaacaagagcuggauggaaagcgaguuccggguguacagcagcgccaacaacugcaccuucgaguacgugucccagccuuuccugauggaccuggaaggcaagcagggcaacuucaagaaccugcgcgaguucguguucaagaacaucgacggcuacuucaaaaucuacagcaagcacaccccuaucaaccucgugcgggaucugccucagggcuucucugcucuggaaccccugguggaucugcccaucggcaucaacaucacccgguuucagacacugcuggcccugcacagaagcuaccugacaccuggcgauagcagcagcggauggacagcuggugccgccgcuuacuaugugggcuaccugcagccuagaaccuuccugcugaaguacaacgagaacggcaccaucaccgacgccguggauugugcucuggauccucugagcgagacaaagugcacccugaaguccuucaccguggaaaagggcaucuaccagaccagcaacuuccgggugcagcccaccgaauccaucgugcgguuccccaauaucaccaaucugugccccuucggcgagguguucaaugccaccagauucgccucuguguacgccuggaaccggaagcggaucagcaauugcguggccgacuacuccgugcuguacaacuccgccagcuucagcaccuucaagugcuacggcguguccccuaccaagcugaacgaccugugcuucacaaacguguacgccgacagcuucgugauccggggagaugaagugcggcagauugccccuggacagacaggcaagaucgccgacuacaacuacaagcugcccgacgacuucaccggcugugugauugccuggaacagcaacaaccuggacuccaaagucggcggcaacuacaauuaccuguaccggcuguuccggaaguccaaucugaagcccuucgagcgggacaucagcaccgaaaucuaucaggccggcaacaccccuugcaacggcguggaaggcuucaacugcuacuucccacugcaguccuacggcuuucagcccacaaauggcgugggcuaucagcccuacagagugguggugcugagcuucgaacugcugcaugcuccugccacagugugcggcccuaagaaaagcaccaaucucgugaagaacaaaugcgugaacuucaacuucaacggccugaccggcaccggcgugcugacagagagcaacaagaaguuccugccauuccagcaguuuggccgggauaucgccgauaccacagacgccguuagagauccccagacacuggaaauccuggacaucaccccaugcagcuucggcggagugucugugaucaccccuggcaccaacaccagcaaucagguggcagugcuguaccagggcgugaacuguaccgaagugcccguggccauucacgccgaucagcugacaccuacauggcggguguacuccaccggcagcaauguguuucagaccagagccggcugucugaucggagccgagcacgugaacaauagcuacgagugcgacauccccaucggcgcuggcaucugugccagcuaccagacacagacaaacagccccagacgggcuagaagcguggccagccagagcaucauugccuacacaaugucucugggcgccgagaacagcguggccuacuccaacaacucuaucgcuauccccaccaacuucaccaucagcgugaccaccgagauccugccuguguccaugaccaagaccagcguggacugcaccauguacaucugcggcgauuccaccgagugcuccaaccugcugcugcaguacggcagcuucugcacccagcugaauagagcccugacagggaucgccguggaacaggacaagaacacccaagagguguucgcccaagugaagcaaaucuacaagaccccuccuaucaaggacuucggcggcuucaauuucagccagauucugcccgauccuagcaagcccagcaagcggagcuucaucgaggaccugcuguucaacaaagugacacuggccgacgccggcuucaucaagcaguauggcgauugucugggcgacauugccgccagggaucugauuugcgcccagaaguuuaacggacugacagugcugccuccucugcugaccgaugagaugaucgcccaguacacaucugcccugcuggccggcacaaucacaagcggcuggacauuuggagcuggcgccgcucugcagauccccuuugcuaugcagauggccuaccgguucaacggcaucggagugacccagaaugugcuguacgagaaccagaagcugaucgccaaccaguucaacagcgccaucggcaagauccaggacagccugagcagcacagcaagcgcccugggaaagcugcaggacguggucaaccagaaugcccaggcacugaacacccuggucaagcagcuguccuccaacuucggcgccaucagcucugugcugaacgauauccugagcagacuggacccuccugaggccgaggugcagaucgacagacugaucacaggcagacugcagagccuccagacauacgugacccagcagcugaucagagccgccgagauuagagccucugccaaucuggccgccaccaagaugucugagugugugcugggccagagcaagagaguggacuuuugcggcaagggcuaccaccugaugagcuucccucagucugccccucacggcgugguguuucugcacgugacauaugugcccgcucaagagaagaauuucaccaccgcuccagccaucugccacgacggcaaagcccacuuuccuagagaaggcguguucguguccaacggcacccauugguucgugacacagcggaacuucuacgagccccagaucaucaccaccgacaacaccuucgugucuggcaacugcgacguugugaucggcauugugaacaauaccguguacgacccucugcagcccgagcuggacagcuucaaagaggaacuggacaaguacuuuaagaaccacacaagccccgacguggaccugggcgauaucagcggaaucaaugccagcgucgugaacauccagaaagagaucgaccggcugaacgagguggccaagaaucugaacgagagccugaucgaccugcaagaacuggggaaguacgagcaguacaucaaguggcccugguacaucuggcugggcuuuaucgccggacugauugccaucgugauggucacaaucaugcuguguugcaugaccagcugcuguagcugccugaagggcuguuguagcuguggcagcugcugcaaguucgacgaggacgauucugagcccgugcugaagggcgugaaacugcacuacaccugaggacuagucccuguucccagagcccacuuuuuuuucuuuuuuugaaauaaaauagccugucuuucagaucucaaaggcucuuuucagagccaccaaaaaaaaaaaaaaaaaaaaaaaaaaaaaaaaaaaaaaaaaaaaaaaaaaaaaaaaaaaaaaaaaaaaaaaaaaaaaaaaaaaaaaaaaaaaaaaaaaaaa

SEQ ID NO: 23594 - RNA, 4094 nt, Artificial Sequence
  SARS-CoV-2/Wuhan/WIV05/2019__EPI_ISL_402128 spike protein mRNA gc mod (1-1273)(K986P_V987P_N501Y_D614G)
aggagagucccgcagucggcguccagcggcucugcuuguucgugugugugucguugcaggccuuauucaagcuuaccauguucguguuucuggugcugcugccccugguguccagccagugugugaaccugaccaccagaacacagcugccuccagccuacaccaacagcuucaccagaggcguguacuaccccgacaagguguucagauccagcgugcugcacucuacccaggaccuguuccugccuuucuucagcaacgugaccugguuccacgccauccacguguccggcaccaauggcaccaagagauucgacaaccccgugcugcccuucaacgacgggguguacuuugccagcaccgagaaguccaacaucaucagaggcuggaucuucggcaccacacuggacagcaagacccagagccugcugaucgugaacaacgccaccaacguggucaucaaagugugcgaguuccaguucugcaacgaccccuuccugggcgucuacuaccacaagaacaacaagagcuggauggaaagcgaguuccggguguacagcagcgccaacaacugcaccuucgaguacgugucccagccuuuccugauggaccuggaaggcaagcagggcaacuucaagaaccugcgcgaguucguguucaagaacaucgacggcuacuucaaaaucuacagcaagcacaccccuaucaaccucgugcgggaucugccucagggcuucucugcucuggaaccccugguggaucugcccaucggcaucaacaucacccgguuucagacacugcuggcccugcacagaagcuaccugacaccuggcgauagcagcagcggauggacagcuggugccgccgcuuacuaugugggcuaccugcagccuagaaccuuccugcugaaguacaacgagaacggcaccaucaccgacgccguggauugugcucuggauccucugagcgagacaaagugcacccugaaguccuucaccguggaaaagggcaucuaccagaccagcaacuuccgggugcagcccaccgaauccaucgugcgguuccccaauaucaccaaucugugccccuucggcgagguguucaaugccaccagauucgccucuguguacgccuggaaccggaagcggaucagcaauugcguggccgacuacuccgugcuguacaacuccgccagcuucagcaccuucaagugcuacggcguguccccuaccaagcugaacgaccugugcuucacaaacguguacgccgacagcuucgugauccggggagaugaagugcggcagauugccccuggacagacaggcaagaucgccgacuacaacuacaagcugcccgacgacuucaccggcugugugauugccuggaacagcaacaaccuggacuccaaagucggcggcaacuacaauuaccuguaccggcuguuccggaaguccaaucugaagcccuucgagcgggacaucagcaccgaaaucuaucaggccggcagcaccccuugcaacggcguggaaggcuucaacugcuacuucccacugcaguccuacggcuuucagcccacauacggcgugggcuaucagcccuacagagugguggugcugagcuucgaacugcugcaugcuccugccacagugugcggcccuaagaaaagcaccaaucucgugaagaacaaaugcgugaacuucaacuucaacggccugaccggcaccggcgugcugacagagagcaacaagaaguuccugccauuccagcaguuuggccgggauaucgccgauaccacagacgccguuagagauccccagacacuggaaauccuggacaucaccccaugcagcuucggcggagugucugugaucaccccuggcaccaacaccagcaaucagguggcagugcuguaccagggcgugaacuguaccgaagugcccguggccauucacgccgaucagcugacaccuacauggcggguguacuccaccggcagcaauguguuucagaccagagccggcugucugaucggagccgagcacgugaacaauagcuacgagugcgacauccccaucggcgcuggcaucugugccagcuaccagacacagacaaacagccccagacgggcuagaagcguggccagccagagcaucauugccuacacaaugucucugggcgccgagaacagcguggccuacuccaacaacucuaucgcuauccccaccaacuucaccaucagcgugaccaccgagauccugccuguguccaugaccaagaccagcguggacugcaccauguacaucugcggcgauuccaccgagugcuccaaccugcugcugcaguacggcagcuucugcacccagcugaauagagcccugacagggaucgccguggaacaggacaagaacacccaagagguguucgcccaagugaagcaaaucuacaagaccccuccuaucaaggacuucggcggcuucaauuucagccagauucugcccgauccuagcaagcccagcaagcggagcuucaucgaggaccugcuguucaacaaagugacacuggccgacgccggcuucaucaagcaguauggcgauugucugggcgacauugccgccagggaucugauuugcgcccagaaguuuaacggacugacagugcugccuccucugcugaccgaugagaugaucgcccaguacacaucugcccugcuggccggcacaaucacaagcggcuggacauuuggagcuggcgccgcucugcagauccccuuugcuaugcagauggccuaccgguucaacggcaucggagugacccagaaugugcuguacgagaaccagaagcugaucgccaaccaguucaacagcgccaucggcaagauccaggacagccugagcagcacagcaagcgcccugggaaagcugcaggacguggucaaccagaaugcccaggcacugaacacccuggucaagcagcuguccuccaacuucggcgccaucagcucugugcugaacgauauccugagcagacuggacccuccugaggccgaggugcagaucgacagacugaucacaggcagacugcagagccuccagacauacgugacccagcagcugaucagagccgccgagauuagagccucugccaaucuggccgccaccaagaugucugagugugugcugggccagagcaagagaguggacuuuugcggcaagggcuaccaccugaugagcuucccucagucugccccucacggcgugguguuucugcacgugacauaugugcccgcucaagagaagaauuucaccaccgcuccagccaucugccacgacggcaaagcccacuuuccuagagaaggcguguucguguccaacggcacccauugguucgugacacagcggaacuucuacgagccccagaucaucaccaccgacaacaccuucgugucuggcaacugcgacguugugaucggcauugugaacaauaccguguacgacccucugcagcccgagcuggacagcuucaaagaggaacuggacaaguacuuuaagaaccacacaagccccgacguggaccugggcgauaucagcggaaucaaugccagcgucgugaacauccagaaagagaucgaccggcugaacgagguggccaagaaucugaacgagagccugaucgaccugcaagaacuggggaaguacgagcaguacaucaaguggcccugguacaucuggcugggcuuuaucgccggacugauugccaucgugauggucacaaucaugcuguguugcaugaccagcugcuguagcugccugaagggcuguuguagcuguggcagcugcugcaaguucgacgaggacgauucugagcccgugcugaagggcgugaaacugcacuacaccugaggacuagucccuguucccagagcccacuuuuuuuucuuuuuuugaaauaaaauagccugucuuucagaucucaaaggcucuuuucagagccaccaaaaaaaaaaaaaaaaaaaaaaaaaaaaaaaaaaaaaaaaaaaaaaaaaaaaaaaaaaaaaaaaaaaaaaaaaaaaaaaaaaaaaaaaaaaaaaaaaaaaa

SEQ ID NO: 23595 - RNA, 4088 nt, Artificial Sequence
  SARS-CoV-2/Wuhan/WIV05/2019__EPI_ISL_402128 spike protein mRNA gc mod (1-1273)(K986P_V987P_H69del_V70del_D614G)
aggagagucccgcagucggcguccagcggcucugcuuguucgugugugugucguugcaggccuuauucaagcuuaccauguucguguuucuggugcugcugccccugguguccagccagugugugaaccugaccaccagaacacagcugccuccagccuacaccaacagcuucaccagaggcguguacuaccccgacaagguguucagauccagcgugcugcacucuacccaggaccuguuccugccuuucuucagcaacgugaccugguuccacgccaucuccggcaccaauggcaccaagagauucgacaaccccgugcugcccuucaacgacgggguguacuuugccagcaccgagaaguccaacaucaucagaggcuggaucuucggcaccacacuggacagcaagacccagagccugcugaucgugaacaacgccaccaacguggucaucaaagugugcgaguuccaguucugcaacgaccccuuccugggcgucuacuaccacaagaacaacaagagcuggauggaaagcgaguuccggguguacagcagcgccaacaacugcaccuucgaguacgugucccagccuuuccugauggaccuggaaggcaagcagggcaacuucaagaaccugcgcgaguucguguucaagaacaucgacggcuacuucaaaaucuacagcaagcacaccccuaucaaccucgugcgggaucugccucagggcuucucugcucuggaaccccugguggaucugcccaucggcaucaacaucacccgguuucagacacugcuggcccugcacagaagcuaccugacaccuggcgauagcagcagcggauggacagcuggugccgccgcuuacuaugugggcuaccugcagccuagaaccuuccugcugaaguacaacgagaacggcaccaucaccgacgccguggauugugcucuggauccucugagcgagacaaagugcacccugaaguccuucaccguggaaaagggcaucuaccagaccagcaacuuccgggugcagcccaccgaauccaucgugcgguuccccaauaucaccaaucugugccccuucggcgagguguucaaugccaccagauucgccucuguguacgccuggaaccggaagcggaucagcaauugcguggccgacuacuccgugcuguacaacuccgccagcuucagcaccuucaagugcuacggcguguccccuaccaagcugaacgaccugugcuucacaaacguguacgccgacagcuucgugauccggggagaugaagugcggcagauugccccuggacagacaggcaagaucgccgacuacaacuacaagcugcccgacgacuucaccggcugugugauugccuggaacagcaacaaccuggacuccaaagucggcggcaacuacaauuaccuguaccggcuguuccggaaguccaaucugaagcccuucgagcgggacaucagcaccgaaaucuaucaggccggcagcaccccuugcaacggcguggaaggcuucaacugcuacuucccacugcaguccuacggcuuucagcccacaaauggcgugggcuaucagcccuacagagugguggugcugagcuucgaacugcugcaugcuccugccacagugugcggcccuaagaaaagcaccaaucucgugaagaacaaaugcgugaacuucaacuucaacggccugaccggcaccggcgugcugacagagagcaacaagaaguuccugccauuccagcaguuuggccgggauaucgccgauaccacagacgccguuagagauccccagacacuggaaauccuggacaucaccccaugcagcuucggcggagugucugugaucaccccuggcaccaacaccagcaaucagguggcagugcuguaccagggcgugaacuguaccgaagugcccguggccauucacgccgaucagcugacaccuacauggcggguguacuccaccggcagcaauguguuucagaccagagccggcugucugaucggagccgagcacgugaacaauagcuacgagugcgacauccccaucggcgcuggcaucugugccagcuaccagacacagacaaacagccccagacgggcuagaagcguggccagccagagcaucauugccuacacaaugucucugggcgccgagaacagcguggccuacuccaacaacucuaucgcuauccccaccaacuucaccaucagcgugaccaccgagauccugccuguguccaugaccaagaccagcguggacugcaccauguacaucugcggcgauuccaccgagugcuccaaccugcugcugcaguacggcagcuucugcacccagcugaauagagcccugacagggaucgccguggaacaggacaagaacacccaagagguguucgcccaagugaagcaaaucuacaagaccccuccuaucaaggacuucggcggcuucaauuucagccagauucugcccgauccuagcaagcccagcaagcggagcuucaucgaggaccugcuguucaacaaagugacacuggccgacgccggcuucaucaagcaguauggcgauugucugggcgacauugccgccagggaucugauuugcgcccagaaguuuaacggacugacagugcugccuccucugcugaccgaugagaugaucgcccaguacacaucugcccugcuggccggcacaaucacaagcggcuggacauuuggagcuggcgccgcucugcagauccccuuugcuaugcagauggccuaccgguucaacggcaucggagugacccagaaugugcuguacgagaaccagaagcugaucgccaaccaguucaacagcgccaucggcaagauccaggacagccugagcagcacagcaagcgcccugggaaagcugcaggacguggucaaccagaaugcccaggcacugaacacccuggucaagcagcuguccuccaacuucggcgccaucagcucugugcugaacgauauccugagcagacuggacccuccugaggccgaggugcagaucgacagacugaucacaggcagacugcagagccuccagacauacgugacccagcagcugaucagagccgccgagauuagagccucugccaaucuggccgccaccaagaugucugagugugugcugggccagagcaagagaguggacuuuugcggcaagggcuaccaccugaugagcuucccucagucugccccucacggcgugguguuucugcacgugacauaugugcccgcucaagagaagaauuucaccaccgcuccagccaucugccacgacggcaaagcccacuuuccuagagaaggcguguucguguccaacggcacccauugguucgugacacagcggaacuucuacgagccccagaucaucaccaccgacaacaccuucgugucuggcaacugcgacguugugaucggcauugugaacaauaccguguacgacccucugcagcccgagcuggacagcuucaaagaggaacuggacaaguacuuuaagaaccacacaagccccgacguggaccugggcgauaucagcggaaucaaugccagcgucgugaacauccagaaagagaucgaccggcugaacgagguggccaagaaucugaacgagagccugaucgaccugcaagaacuggggaaguacgagcaguacaucaaguggcccugguacaucuggcugggcuuuaucgccggacugauugccaucgugauggucacaaucaugcuguguugcaugaccagcugcuguagcugccugaagggcuguuguagcuguggcagcugcugcaaguucgacgaggacgauucugagcccgugcugaagggcgugaaacugcacuacaccugaggacuagucccuguucccagagcccacuuuuuuuucuuuuuuugaaauaaaauagccugucuuucagaucucaaaggcucuuuucagagccaccaaaaaaaaaaaaaaaaaaaaaaaaaaaaaaaaaaaaaaaaaaaaaaaaaaaaaaaaaaaaaaaaaaaaaaaaaaaaaaaaaaaaaaaaaaaaaaaaaaaaa

SEQ ID NO: 23596 - RNA, 4094 nt, Artificial Sequence
  SARS-CoV-2/Wuhan/WIV05/2019__EPI_ISL_402128 spike protein mRNA gc mod (1-1273)(K986P_V987P_Y453F_D614G)
aggagagucccgcagucggcguccagcggcucugcuuguucgugugugugucguugcaggccuuauucaagcuuaccauguucguguuucuggugcugcugccccugguguccagccagugugugaaccugaccaccagaacacagcugccuccagccuacaccaacagcuucaccagaggcguguacuaccccgacaagguguucagauccagcgugcugcacucuacccaggaccuguuccugccuuucuucagcaacgugaccugguuccacgccauccacguguccggcaccaauggcaccaagagauucgacaaccccgugcugcccuucaacgacgggguguacuuugccagcaccgagaaguccaacaucaucagaggcuggaucuucggcaccacacuggacagcaagacccagagccugcugaucgugaacaacgccaccaacguggucaucaaagugugcgaguuccaguucugcaacgaccccuuccugggcgucuacuaccacaagaacaacaagagcuggauggaaagcgaguuccggguguacagcagcgccaacaacugcaccuucgaguacgugucccagccuuuccugauggaccuggaaggcaagcagggcaacuucaagaaccugcgcgaguucguguucaagaacaucgacggcuacuucaaaaucuacagcaagcacaccccuaucaaccucgugcgggaucugccucagggcuucucugcucuggaaccccugguggaucugcccaucggcaucaacaucacccgguuucagacacugcuggcccugcacagaagcuaccugacaccuggcgauagcagcagcggauggacagcuggugccgccgcuuacuaugugggcuaccugcagccuagaaccuuccugcugaaguacaacgagaacggcaccaucaccgacgccguggauugugcucuggauccucugagcgagacaaagugcacccugaaguccuucaccguggaaaagggcaucuaccagaccagcaacuuccgggugcagcccaccgaauccaucgugcgguuccccaauaucaccaaucugugccccuucggcgagguguucaaugccaccagauucgccucuguguacgccuggaaccggaagcggaucagcaauugcguggccgacuacuccgugcuguacaacuccgccagcuucagcaccuucaagugcuacggcguguccccuaccaagcugaacgaccugugcuucacaaacguguacgccgacagcuucgugauccggggagaugaagugcggcagauugccccuggacagacaggcaagaucgccgacuacaacuacaagcugcccgacgacuucaccggcugugugauugccuggaacagcaacaaccuggacuccaaagucggcggcaacuacaauuaccuguuccggcuguuccggaaguccaaucugaagcccuucgagcgggacaucagcaccgaaaucuaucaggccggcagcaccccuugcaacggcguggaaggcuucaacugcuacuucccacugcaguccuacggcuuucagcccacaaauggcgugggcuaucagcccuacagagugguggugcugagcuucgaacugcugcaugcuccugccacagugugcggcccuaagaaaagcaccaaucucgugaagaacaaaugcgugaacuucaacuucaacggccugaccggcaccggcgugcugacagagagcaacaagaaguuccugccauuccagcaguuuggccgggauaucgccgauaccacagacgccguuagagauccccagacacuggaaauccuggacaucaccccaugcagcuucggcggagugucugugaucaccccuggcaccaacaccagcaaucagguggcagugcuguaccagggcgugaacuguaccgaagugcccguggccauucacgccgaucagcugacaccuacauggcggguguacuccaccggcagcaauguguuucagaccagagccggcugucugaucggagccgagcacgugaacaauagcuacgagugcgacauccccaucggcgcuggcaucugugccagcuaccagacacagacaaacagccccagacgggcuagaagcguggccagccagagcaucauugccuacacaaugucucugggcgccgagaacagcguggccuacuccaacaacucuaucgcuauccccaccaacuucaccaucagcgugaccaccgagauccugccuguguccaugaccaagaccagcguggacugcaccauguacaucugcggcgauuccaccgagugcuccaaccugcugcugcaguacggcagcuucugcacccagcugaauagagcccugacagggaucgccguggaacaggacaagaacacccaagagguguucgcccaagugaagcaaaucuacaagaccccuccuaucaaggacuucggcggcuucaauuucagccagauucugcccgauccuagcaagcccagcaagcggagcuucaucgaggaccugcuguucaacaaagugacacuggccgacgccggcuucaucaagcaguauggcgauugucugggcgacauugccgccagggaucugauuugcgcccagaaguuuaacggacugacagugcugccuccucugcugaccgaugagaugaucgcccaguacacaucugcccugcuggccggcacaaucacaagcggcuggacauuuggagcuggcgccgcucugcagauccccuuugcuaugcagauggccuaccgguucaacggcaucggagugacccagaaugugcuguacgagaaccagaagcugaucgccaaccaguucaacagcgccaucggcaagauccaggacagccugagcagcacagcaagcgcccugggaaagcugcaggacguggucaaccagaaugcccaggcacugaacacccuggucaagcagcuguccuccaacuucggcgccaucagcucugugcugaacgauauccugagcagacuggacccuccugaggccgaggugcagaucgacagacugaucacaggcagacugcagagccuccagacauacgugacccagcagcugaucagagccgccgagauuagagccucugccaaucuggccgccaccaagaugucugagugugugcugggccagagcaagagaguggacuuuugcggcaagggcuaccaccugaugagcuucccucagucugccccucacggcgugguguuucugcacgugacauaugugcccgcucaagagaagaauuucaccaccgcuccagccaucugccacgacggcaaagcccacuuuccuagagaaggcguguucguguccaacggcacccauugguucgugacacagcggaacuucuacgagccccagaucaucaccaccgacaacaccuucgugucuggcaacugcgacguugugaucggcauugugaacaauaccguguacgacccucugcagcccgagcuggacagcuucaaagaggaacuggacaaguacuuuaagaaccacacaagccccgacguggaccugggcgauaucagcggaaucaaugccagcgucgugaacauccagaaagagaucgaccggcugaacgagguggccaagaaucugaacgagagccugaucgaccugcaagaacuggggaaguacgagcaguacaucaaguggcccugguacaucuggcugggcuuuaucgccggacugauugccaucgugauggucacaaucaugcuguguugcaugaccagcugcuguagcugccugaagggcuguuguagcuguggcagcugcugcaaguucgacgaggacgauucugagcccgugcugaagggcgugaaacugcacuacaccugaggacuagucccuguucccagagcccacuuuuuuuucuuuuuuugaaauaaaauagccugucuuucagaucucaaaggcucuuuucagagccaccaaaaaaaaaaaaaaaaaaaaaaaaaaaaaaaaaaaaaaaaaaaaaaaaaaaaaaaaaaaaaaaaaaaaaaaaaaaaaaaaaaaaaaaaaaaaaaaaaaaaa

SEQ ID NO: 23597 - RNA, 4094 nt, Artificial Sequence
  SARS-CoV-2/Wuhan/WIV05/2019__EPI_ISL_402128 spike protein mRNA gc mod (1-1273)(K986P_V987P_D614G_I692V)
aggagagucccgcagucggcguccagcggcucugcuuguucgugugugugucguugcaggccuuauucaagcuuaccauguucguguuucuggugcugcugccccugguguccagccagugugugaaccugaccaccagaacacagcugccuccagccuacaccaacagcuucaccagaggcguguacuaccccgacaagguguucagauccagcgugcugcacucuacccaggaccuguuccugccuuucuucagcaacgugaccugguuccacgccauccacguguccggcaccaauggcaccaagagauucgacaaccccgugcugcccuucaacgacgggguguacuuugccagcaccgagaaguccaacaucaucagaggcuggaucuucggcaccacacuggacagcaagacccagagccugcugaucgugaacaacgccaccaacguggucaucaaagugugcgaguuccaguucugcaacgaccccuuccugggcgucuacuaccacaagaacaacaagagcuggauggaaagcgaguuccggguguacagcagcgccaacaacugcaccuucgaguacgugucccagccuuuccugauggaccuggaaggcaagcagggcaacuucaagaaccugcgcgaguucguguucaagaacaucgacggcuacuucaaaaucuacagcaagcacaccccuaucaaccucgugcgggaucugccucagggcuucucugcucuggaaccccugguggaucugcccaucggcaucaacaucacccgguuucagacacugcuggcccugcacagaagcuaccugacaccuggcgauagcagcagcggauggacagcuggugccgccgcuuacuaugugggcuaccugcagccuagaaccuuccugcugaaguacaacgagaacggcaccaucaccgacgccguggauugugcucuggauccucugagcgagacaaagugcacccugaaguccuucaccguggaaaagggcaucuaccagaccagcaacuuccgggugcagcccaccgaauccaucgugcgguuccccaauaucaccaaucugugccccuucggcgagguguucaaugccaccagauucgccucuguguacgccuggaaccggaagcggaucagcaauugcguggccgacuacuccgugcuguacaacuccgccagcuucagcaccuucaagugcuacggcguguccccuaccaagcugaacgaccugugcuucacaaacguguacgccgacagcuucgugauccggggagaugaagugcggcagauugccccuggacagacaggcaagaucgccgacuacaacuacaagcugcccgacgacuucaccggcugugugauugccuggaacagcaacaaccuggacuccaaagucggcggcaacuacaauuaccuguaccggcuguuccggaaguccaaucugaagcccuucgagcgggacaucagcaccgaaaucuaucaggccggcagcaccccuugcaacggcguggaaggcuucaacugcuacuucccacugcaguccuacggcuuucagcccacaaauggcgugggcuaucagcccuacagagugguggugcugagcuucgaacugcugcaugcuccugccacagugugcggcccuaagaaaagcaccaaucucgugaagaacaaaugcgugaacuucaacuucaacggccugaccggcaccggcgugcugacagagagcaacaagaaguuccugccauuccagcaguuuggccgggauaucgccgauaccacagacgccguuagagauccccagacacuggaaauccuggacaucaccccaugcagcuucggcggagugucugugaucaccccuggcaccaacaccagcaaucagguggcagugcuguaccagggcgugaacuguaccgaagugcccguggccauucacgccgaucagcugacaccuacauggcggguguacuccaccggcagcaauguguuucagaccagagccggcugucugaucggagccgagcacgugaacaauagcuacgagugcgacauccccaucggcgcuggcaucugugccagcuaccagacacagacaaacagccccagacgggcuagaagcguggccagccagagcgugauugccuacacaaugucucugggcgccgagaacagcguggccuacuccaacaacucuaucgcuauccccaccaacuucaccaucagcgugaccaccgagauccugccuguguccaugaccaagaccagcguggacugcaccauguacaucugcggcgauuccaccgagugcuccaaccugcugcugcaguacggcagcuucugcacccagcugaauagagcccugacagggaucgccguggaacaggacaagaacacccaagagguguucgcccaagugaagcaaaucuacaagaccccuccuaucaaggacuucggcggcuucaauuucagccagauucugcccgauccuagcaagcccagcaagcggagcuucaucgaggaccugcuguucaacaaagugacacuggccgacgccggcuucaucaagcaguauggcgauugucugggcgacauugccgccagggaucugauuugcgcccagaaguuuaacggacugacagugcugccuccucugcugaccgaugagaugaucgcccaguacacaucugcccugcuggccggcacaaucacaagcggcuggacauuuggagcuggcgccgcucugcagauccccuuugcuaugcagauggccuaccgguucaacggcaucggagugacccagaaugugcuguacgagaaccagaagcugaucgccaaccaguucaacagcgccaucggcaagauccaggacagccugagcagcacagcaagcgcccugggaaagcugcaggacguggucaaccagaaugcccaggcacugaacacccuggucaagcagcuguccuccaacuucggcgccaucagcucugugcugaacgauauccugagcagacuggacccuccugaggccgaggugcagaucgacagacugaucacaggcagacugcagagccuccagacauacgugacccagcagcugaucagagccgccgagauuagagccucugccaaucuggccgccaccaagaugucugagugugugcugggccagagcaagagaguggacuuuugcggcaagggcuaccaccugaugagcuucccucagucugccccucacggcgugguguuucugcacgugacauaugugcccgcucaagagaagaauuucaccaccgcuccagccaucugccacgacggcaaagcccacuuuccuagagaaggcguguucguguccaacggcacccauugguucgugacacagcggaacuucuacgagccccagaucaucaccaccgacaacaccuucgugucuggcaacugcgacguugugaucggcauugugaacaauaccguguacgacccucugcagcccgagcuggacagcuucaaagaggaacuggacaaguacuuuaagaaccacacaagccccgacguggaccugggcgauaucagcggaaucaaugccagcgucgugaacauccagaaagagaucgaccggcugaacgagguggccaagaaucugaacgagagccugaucgaccugcaagaacuggggaaguacgagcaguacaucaaguggcccugguacaucuggcugggcuuuaucgccggacugauugccaucgugauggucacaaucaugcuguguugcaugaccagcugcuguagcugccugaagggcuguuguagcuguggcagcugcugcaaguucgacgaggacgauucugagcccgugcugaagggcgugaaacugcacuacaccugaggacuagucccuguucccagagcccacuuuuuuuucuuuuuuugaaauaaaauagccugucuuucagaucucaaaggcucuuuucagagccaccaaaaaaaaaaaaaaaaaaaaaaaaaaaaaaaaaaaaaaaaaaaaaaaaaaaaaaaaaaaaaaaaaaaaaaaaaaaaaaaaaaaaaaaaaaaaaaaaaaaaa

SEQ ID NO: 23598 - RNA, 4094 nt, Artificial Sequence
  SARS-CoV-2/Wuhan/WIV05/2019__EPI_ISL_402128 spike protein mRNA gc mod (1-1273)(K986P_V987P_D614G_M1229I)
aggagagucccgcagucggcguccagcggcucugcuuguucgugugugugucguugcaggccuuauucaagcuuaccauguucguguuucuggugcugcugccccugguguccagccagugugugaaccugaccaccagaacacagcugccuccagccuacaccaacagcuucaccagaggcguguacuaccccgacaagguguucagauccagcgugcugcacucuacccaggaccuguuccugccuuucuucagcaacgugaccugguuccacgccauccacguguccggcaccaauggcaccaagagauucgacaaccccgugcugcccuucaacgacgggguguacuuugccagcaccgagaaguccaacaucaucagaggcuggaucuucggcaccacacuggacagcaagacccagagccugcugaucgugaacaacgccaccaacguggucaucaaagugugcgaguuccaguucugcaacgaccccuuccugggcgucuacuaccacaagaacaacaagagcuggauggaaagcgaguuccggguguacagcagcgccaacaacugcaccuucgaguacgugucccagccuuuccugauggaccuggaaggcaagcagggcaacuucaagaaccugcgcgaguucguguucaagaacaucgacggcuacuucaaaaucuacagcaagcacaccccuaucaaccucgugcgggaucugccucagggcuucucugcucuggaaccccugguggaucugcccaucggcaucaacaucacccgguuucagacacugcuggcccugcacagaagcuaccugacaccuggcgauagcagcagcggauggacagcuggugccgccgcuuacuaugugggcuaccugcagccuagaaccuuccugcugaaguacaacgagaacggcaccaucaccgacgccguggauugugcucuggauccucugagcgagacaaagugcacccugaaguccuucaccguggaaaagggcaucuaccagaccagcaacuuccgggugcagcccaccgaauccaucgugcgguuccccaauaucaccaaucugugccccuucggcgagguguucaaugccaccagauucgccucuguguacgccuggaaccggaagcggaucagcaauugcguggccgacuacuccgugcuguacaacuccgccagcuucagcaccuucaagugcuacggcguguccccuaccaagcugaacgaccugugcuucacaaacguguacgccgacagcuucgugauccggggagaugaagugcggcagauugccccuggacagacaggcaagaucgccgacuacaacuacaagcugcccgacgacuucaccggcugugugauugccuggaacagcaacaaccuggacuccaaagucggcggcaacuacaauuaccuguaccggcuguuccggaaguccaaucugaagcccuucgagcgggacaucagcaccgaaaucuaucaggccggcagcaccccuugcaacggcguggaaggcuucaacugcuacuucccacugcaguccuacggcuuucagcccacaaauggcgugggcuaucagcccuacagagugguggugcugagcuucgaacugcugcaugcuccugccacagugugcggcccuaagaaaagcaccaaucucgugaagaacaaaugcgugaacuucaacuucaacggccugaccggcaccggcgugcugacagagagcaacaagaaguuccugccauuccagcaguuuggccgggauaucgccgauaccacagacgccguuagagauccccagacacuggaaauccuggacaucaccccaugcagcuucggcggagugucugugaucaccccuggcaccaacaccagcaaucagguggcagugcuguaccagggcgugaacuguaccgaagugcccguggccauucacgccgaucagcugacaccuacauggcggguguacuccaccggcagcaauguguuucagaccagagccggcugucugaucggagccgagcacgugaacaauagcuacgagugcgacauccccaucggcgcuggcaucugugccagcuaccagacacagacaaacagccccagacgggcuagaagcguggccagccagagcaucauugccuacacaaugucucugggcgccgagaacagcguggccuacuccaacaacucuaucgcuauccccaccaacuucaccaucagcgugaccaccgagauccugccuguguccaugaccaagaccagcguggacugcaccauguacaucugcggcgauuccaccgagugcuccaaccugcugcugcaguacggcagcuucugcacccagcugaauagagcccugacagggaucgccguggaacaggacaagaacacccaagagguguucgcccaagugaagcaaaucuacaagaccccuccuaucaaggacuucggcggcuucaauuucagccagauucugcccgauccuagcaagcccagcaagcggagcuucaucgaggaccugcuguucaacaaagugacacuggccgacgccggcuucaucaagcaguauggcgauugucugggcgacauugccgccagggaucugauuugcgcccagaaguuuaacggacugacagugcugccuccucugcugaccgaugagaugaucgcccaguacacaucugcccugcuggccggcacaaucacaagcggcuggacauuuggagcuggcgccgcucugcagauccccuuugcuaugcagauggccuaccgguucaacggcaucggagugacccagaaugugcuguacgagaaccagaagcugaucgccaaccaguucaacagcgccaucggcaagauccaggacagccugagcagcacagcaagcgcccugggaaagcugcaggacguggucaaccagaaugcccaggcacugaacacccuggucaagcagcuguccuccaacuucggcgccaucagcucugugcugaacgauauccugagcagacuggacccuccugaggccgaggugcagaucgacagacugaucacaggcagacugcagagccuccagacauacgugacccagcagcugaucagagccgccgagauuagagccucugccaaucuggccgccaccaagaugucugagugugugcugggccagagcaagagaguggacuuuugcggcaagggcuaccaccugaugagcuucccucagucugccccucacggcgugguguuucugcacgugacauaugugcccgcucaagagaagaauuucaccaccgcuccagccaucugccacgacggcaaagcccacuuuccuagagaaggcguguucguguccaacggcacccauugguucgugacacagcggaacuucuacgagccccagaucaucaccaccgacaacaccuucgugucuggcaacugcgacguugugaucggcauugugaacaauaccguguacgacccucugcagcccgagcuggacagcuucaaagaggaacuggacaaguacuuuaagaaccacacaagccccgacguggaccugggcgauaucagcggaaucaaugccagcgucgugaacauccagaaagagaucgaccggcugaacgagguggccaagaaucugaacgagagccugaucgaccugcaagaacuggggaaguacgagcaguacaucaaguggcccugguacaucuggcugggcuuuaucgccggacugauugccaucgugaucgucacaaucaugcuguguugcaugaccagcugcuguagcugccugaagggcuguuguagcuguggcagcugcugcaaguucgacgaggacgauucugagcccgugcugaagggcgugaaacugcacuacaccugaggacuagucccuguucccagagcccacuuuuuuuucuuuuuuugaaauaaaauagccugucuuucagaucucaaaggcucuuuucagagccaccaaaaaaaaaaaaaaaaaaaaaaaaaaaaaaaaaaaaaaaaaaaaaaaaaaaaaaaaaaaaaaaaaaaaaaaaaaaaaaaaaaaaaaaaaaaaaaaaaaaaa

SEQ ID NO: 23599 - RNA, 4088 nt, Artificial Sequence
  SARS-CoV-2/Wuhan/WIV05/2019__EPI_ISL_402128 spike protein mRNA gc mod (1-1273)(K986P_V987P_H69del_V70del_A222V_Y453F_S477N_D614G_I692V)
aggagagucccgcagucggcguccagcggcucugcuuguucgugugugugucguugcaggccuuauucaagcuuaccauguucguguuucuggugcugcugccccugguguccagccagugugugaaccugaccaccagaacacagcugccuccagccuacaccaacagcuucaccagaggcguguacuaccccgacaagguguucagauccagcgugcugcacucuacccaggaccuguuccugccuuucuucagcaacgugaccugguuccacgccaucuccggcaccaauggcaccaagagauucgacaaccccgugcugcccuucaacgacgggguguacuuugccagcaccgagaaguccaacaucaucagaggcuggaucuucggcaccacacuggacagcaagacccagagccugcugaucgugaacaacgccaccaacguggucaucaaagugugcgaguuccaguucugcaacgaccccuuccugggcgucuacuaccacaagaacaacaagagcuggauggaaagcgaguuccggguguacagcagcgccaacaacugcaccuucgaguacgugucccagccuuuccugauggaccuggaaggcaagcagggcaacuucaagaaccugcgcgaguucguguucaagaacaucgacggcuacuucaaaaucuacagcaagcacaccccuaucaaccucgugcgggaucugccucagggcuucucugugcuggaaccccugguggaucugcccaucggcaucaacaucacccgguuucagacacugcuggcccugcacagaagcuaccugacaccuggcgauagcagcagcggauggacagcuggugccgccgcuuacuaugugggcuaccugcagccuagaaccuuccugcugaaguacaacgagaacggcaccaucaccgacgccguggauugugcucuggauccucugagcgagacaaagugcacccugaaguccuucaccguggaaaagggcaucuaccagaccagcaacuuccgggugcagcccaccgaauccaucgugcgguuccccaauaucaccaaucugugccccuucggcgagguguucaaugccaccagauucgccucuguguacgccuggaaccggaagcggaucagcaauugcguggccgacuacuccgugcuguacaacuccgccagcuucagcaccuucaagugcuacggcguguccccuaccaagcugaacgaccugugcuucacaaacguguacgccgacagcuucgugauccggggagaugaagugcggcagauugccccuggacagacaggcaagaucgccgacuacaacuacaagcugcccgacgacuucaccggcugugugauugccuggaacagcaacaaccuggacuccaaagucggcggcaacuacaauuaccuguuccggcuguuccggaaguccaaucugaagcccuucgagcgggacaucagcaccgaaaucuaucaggccggcaacaccccuugcaacggcguggaaggcuucaacugcuacuucccacugcaguccuacggcuuucagcccacaaauggcgugggcuaucagcccuacagagugguggugcugagcuucgaacugcugcaugcuccugccacagugugcggcccuaagaaaagcaccaaucucgugaagaacaaaugcgugaacuucaacuucaacggccugaccggcaccggcgugcugacagagagcaacaagaaguuccugccauuccagcaguuuggccgggauaucgccgauaccacagacgccguuagagauccccagacacuggaaauccuggacaucaccccaugcagcuucggcggagugucugugaucaccccuggcaccaacaccagcaaucagguggcagugcuguaccagggcgugaacuguaccgaagugcccguggccauucacgccgaucagcugacaccuacauggcggguguacuccaccggcagcaauguguuucagaccagagccggcugucugaucggagccgagcacgugaacaauagcuacgagugcgacauccccaucggcgcuggcaucugugccagcuaccagacacagacaaacagccccagacgggcuagaagcguggccagccagagcgugauugccuacacaaugucucugggcgccgagaacagcguggccuacuccaacaacucuaucgcuauccccaccaacuucaccaucagcgugaccaccgagauccugccuguguccaugaccaagaccagcguggacugcaccauguacaucugcggcgauuccaccgagugcuccaaccugcugcugcaguacggcagcuucugcacccagcugaauagagcccugacagggaucgccguggaacaggacaagaacacccaagagguguucgcccaagugaagcaaaucuacaagaccccuccuaucaaggacuucggcggcuucaauuucagccagauucugcccgauccuagcaagcccagcaagcggagcuucaucgaggaccugcuguucaacaaagugacacuggccgacgccggcuucaucaagcaguauggcgauugucugggcgacauugccgccagggaucugauuugcgcccagaaguuuaacggacugacagugcugccuccucugcugaccgaugagaugaucgcccaguacacaucugcccugcuggccggcacaaucacaagcggcuggacauuuggagcuggcgccgcucugcagauccccuuugcuaugcagauggccuaccgguucaacggcaucggagugacccagaaugugcuguacgagaaccagaagcugaucgccaaccaguucaacagcgccaucggcaagauccaggacagccugagcagcacagcaagcgcccugggaaagcugcaggacguggucaaccagaaugcccaggcacugaacacccuggucaagcagcuguccuccaacuucggcgccaucagcucugugcugaacgauauccugagcagacuggacccuccugaggccgaggugcagaucgacagacugaucacaggcagacugcagagccuccagacauacgugacccagcagcugaucagagccgccgagauuagagccucugccaaucuggccgccaccaagaugucugagugugugcugggccagagcaagagaguggacuuuugcggcaagggcuaccaccugaugagcuucccucagucugccccucacggcgugguguuucugcacgugacauaugugcccgcucaagagaagaauuucaccaccgcuccagccaucugccacgacggcaaagcccacuuuccuagagaaggcguguucguguccaacggcacccauugguucgugacacagcggaacuucuacgagccccagaucaucaccaccgacaacaccuucgugucuggcaacugcgacguugugaucggcauugugaacaauaccguguacgacccucugcagcccgagcuggacagcuucaaagaggaacuggacaaguacuuuaagaaccacacaagccccgacguggaccugggcgauaucagcggaaucaaugccagcgucgugaacauccagaaagagaucgaccggcugaacgagguggccaagaaucugaacgagagccugaucgaccugcaagaacuggggaaguacgagcaguacaucaaguggcccugguacaucuggcugggcuuuaucgccggacugauugccaucgugauggucacaaucaugcuguguugcaugaccagcugcuguagcugccugaagggcuguuguagcuguggcagcugcugcaaguucgacgaggacgauucugagcccgugcugaagggcgugaaacugcacuacaccugaggacuagucccuguucccagagcccacuuuuuuuucuuuuuuugaaauaaaauagccugucuuucagaucucaaaggcucuuuucagagccaccaaaaaaaaaaaaaaaaaaaaaaaaaaaaaaaaaaaaaaaaaaaaaaaaaaaaaaaaaaaaaaaaaaaaaaaaaaaaaaaaaaaaaaaaaaaaaaaaaaaaa

SEQ ID NO: 23600 - RNA, 4088 nt, Artificial Sequence
  SARS-CoV-2/Wuhan/WIV05/2019__EPI_ISL_402128 spike protein mRNA gc mod (1-1273)(K986P_V987P_H69del_V70del_Y453F_D614G_I692V_M1229I)
aggagagucccgcagucggcguccagcggcucugcuuguucgugugugugucguugcaggccuuauucaagcuuaccauguucguguuucuggugcugcugccccugguguccagccagugugugaaccugaccaccagaacacagcugccuccagccuacaccaacagcuucaccagaggcguguacuaccccgacaagguguucagauccagcgugcugcacucuacccaggaccuguuccugccuuucuucagcaacgugaccugguuccacgccaucuccggcaccaauggcaccaagagauucgacaaccccgugcugcccuucaacgacgggguguacuuugccagcaccgagaaguccaacaucaucagaggcuggaucuucggcaccacacuggacagcaagacccagagccugcugaucgugaacaacgccaccaacguggucaucaaagugugcgaguuccaguucugcaacgaccccuuccugggcgucuacuaccacaagaacaacaagagcuggauggaaagcgaguuccggguguacagcagcgccaacaacugcaccuucgaguacgugucccagccuuuccugauggaccuggaaggcaagcagggcaacuucaagaaccugcgcgaguucguguucaagaacaucgacggcuacuucaaaaucuacagcaagcacaccccuaucaaccucgugcgggaucugccucagggcuucucugcucuggaaccccugguggaucugcccaucggcaucaacaucacccgguuucagacacugcuggcccugcacagaagcuaccugacaccuggcgauagcagcagcggauggacagcuggugccgccgcuuacuaugugggcuaccugcagccuagaaccuuccugcugaaguacaacgagaacggcaccaucaccgacgccguggauugugcucuggauccucugagcgagacaaagugcacccugaaguccuucaccguggaaaagggcaucuaccagaccagcaacuuccgggugcagcccaccgaauccaucgugcgguuccccaauaucaccaaucugugccccuucggcgagguguucaaugccaccagauucgccucuguguacgccuggaaccggaagcggaucagcaauugcguggccgacuacuccgugcuguacaacuccgccagcuucagcaccuucaagugcuacggcguguccccuaccaagcugaacgaccugugcuucacaaacguguacgccgacagcuucgugauccggggagaugaagugcggcagauugccccuggacagacaggcaagaucgccgacuacaacuacaagcugcccgacgacuucaccggcugugugauugccuggaacagcaacaaccuggacuccaaagucggcggcaacuacaauuaccuguuccggcuguuccggaaguccaaucugaagcccuucgagcgggacaucagcaccgaaaucuaucaggccggcagcaccccuugcaacggcguggaaggcuucaacugcuacuucccacugcaguccuacggcuuucagcccacaaauggcgugggcuaucagcccuacagagugguggugcugagcuucgaacugcugcaugcuccugccacagugugcggcccuaagaaaagcaccaaucucgugaagaacaaaugcgugaacuucaacuucaacggccugaccggcaccggcgugcugacagagagcaacaagaaguuccugccauuccagcaguuuggccgggauaucgccgauaccacagacgccguuagagauccccagacacuggaaauccuggacaucaccccaugcagcuucggcggagugucugugaucaccccuggcaccaacaccagcaaucagguggcagugcuguaccagggcgugaacuguaccgaagugcccguggccauucacgccgaucagcugacaccuacauggcggguguacuccaccggcagcaauguguuucagaccagagccggcugucugaucggagccgagcacgugaacaauagcuacgagugcgacauccccaucggcgcuggcaucugugccagcuaccagacacagacaaacagccccagacgggcuagaagcguggccagccagagcgugauugccuacacaaugucucugggcgccgagaacagcguggccuacuccaacaacucuaucgcuauccccaccaacuucaccaucagcgugaccaccgagauccugccuguguccaugaccaagaccagcguggacugcaccauguacaucugcggcgauuccaccgagugcuccaaccugcugcugcaguacggcagcuucugcacccagcugaauagagcccugacagggaucgccguggaacaggacaagaacacccaagagguguucgcccaagugaagcaaaucuacaagaccccuccuaucaaggacuucggcggcuucaauuucagccagauucugcccgauccuagcaagcccagcaagcggagcuucaucgaggaccugcuguucaacaaagugacacuggccgacgccggcuucaucaagcaguauggcgauugucugggcgacauugccgccagggaucugauuugcgcccagaaguuuaacggacugacagugcugccuccucugcugaccgaugagaugaucgcccaguacacaucugcccugcuggccggcacaaucacaagcggcuggacauuuggagcuggcgccgcucugcagauccccuuugcuaugcagauggccuaccgguucaacggcaucggagugacccagaaugugcuguacgagaaccagaagcugaucgccaaccaguucaacagcgccaucggcaagauccaggacagccugagcagcacagcaagcgcccugggaaagcugcaggacguggucaaccagaaugcccaggcacugaacacccuggucaagcagcuguccuccaacuucggcgccaucagcucugugcugaacgauauccugagcagacuggacccuccugaggccgaggugcagaucgacagacugaucacaggcagacugcagagccuccagacauacgugacccagcagcugaucagagccgccgagauuagagccucugccaaucuggccgccaccaagaugucugagugugugcugggccagagcaagagaguggacuuuugcggcaagggcuaccaccugaugagcuucccucagucugccccucacggcgugguguuucugcacgugacauaugugcccgcucaagagaagaauuucaccaccgcuccagccaucugccacgacggcaaagcccacuuuccuagagaaggcguguucguguccaacggcacccauugguucgugacacagcggaacuucuacgagccccagaucaucaccaccgacaacaccuucgugucuggcaacugcgacguugugaucggcauugugaacaauaccguguacgacccucugcagcccgagcuggacagcuucaaagaggaacuggacaaguacuuuaagaaccacacaagccccgacguggaccugggcgauaucagcggaaucaaugccagcgucgugaacauccagaaagagaucgaccggcugaacgagguggccaagaaucugaacgagagccugaucgaccugcaagaacuggggaaguacgagcaguacaucaaguggcccugguacaucuggcugggcuuuaucgccggacugauugccaucgugaucgucacaaucaugcuguguugcaugaccagcugcuguagcugccugaagggcuguuguagcuguggcagcugcugcaaguucgacgaggacgauucugagcccgugcugaagggcgugaaacugcacuacaccugaggacuagucccuguucccagagcccacuuuuuuuucuuuuuuugaaauaaaauagccugucuuucagaucucaaaggcucuuuucagagccaccaaaaaaaaaaaaaaaaaaaaaaaaaaaaaaaaaaaaaaaaaaaaaaaaaaaaaaaaaaaaaaaaaaaaaaaaaaaaaaaaaaaaaaaaaaaaaaaaaaaaa

SEQ ID NO: 23601 - RNA, 4085 nt, Artificial Sequence
  SARS-CoV-2/Wuhan/WIV05/2019__EPI_ISL_402128 spike protein mRNA gc mod (1-1273)(K986P_V987P_K986P_V987P_H69del_V70del_Y144del_N501Y_A570 D_D614G_P681H_T716I_S982A_D1118H)
aggagagucccgcagucggcguccagcggcucugcuuguucgugugugugucguugcaggccuuauucaagcuuaccauguucguguuucuggugcugcugccccugguguccagccagugugugaaccugaccaccagaacacagcugccuccagccuacaccaacagcuucaccagaggcguguacuaccccgacaagguguucagauccagcgugcugcacucuacccaggaccuguuccugccuuucuucagcaacgugaccugguuccacgccaucuccggcaccaauggcaccaagagauucgacaaccccgugcugcccuucaacgacgggguguacuuugccagcaccgagaaguccaacaucaucagaggcuggaucuucggcaccacacuggacagcaagacccagagccugcugaucgugaacaacgccaccaacguggucaucaaagugugcgaguuccaguucugcaacgaccccuuccugggcgucuaccacaagaacaacaagagcuggauggaaagcgaguuccggguguacagcagcgccaacaacugcaccuucgaguacgugucccagccuuuccugauggaccuggaaggcaagcagggcaacuucaagaaccugcgcgaguucguguucaagaacaucgacggcuacuucaaaaucuacagcaagcacaccccuaucaaccucgugcgggaucugccucagggcuucucugcucuggaaccccugguggaucugcccaucggcaucaacaucacccgguuucagacacugcuggcccugcacagaagcuaccugacaccuggcgauagcagcagcggauggacagcuggugccgccgcuuacuaugugggcuaccugcagccuagaaccuuccugcugaaguacaacgagaacggcaccaucaccgacgccguggauugugcucuggauccucugagcgagacaaagugcacccugaaguccuucaccguggaaaagggcaucuaccagaccagcaacuuccgggugcagcccaccgaauccaucgugcgguuccccaauaucaccaaucugugccccuucggcgagguguucaaugccaccagauucgccucuguguacgccuggaaccggaagcggaucagcaauugcguggccgacuacuccgugcuguacaacuccgccagcuucagcaccuucaagugcuacggcguguccccuaccaagcugaacgaccugugcuucacaaacguguacgccgacagcuucgugauccggggagaugaagugcggcagauugccccuggacagacaggcaagaucgccgacuacaacuacaagcugcccgacgacuucaccggcugugugauugccuggaacagcaacaaccuggacuccaaagucggcggcaacuacaauuaccuguaccggcuguuccggaaguccaaucugaagcccuucgagcgggacaucagcaccgaaaucuaucaggccggcagcaccccuugcaacggcguggaaggcuucaacugcuacuucccacugcaguccuacggcuuucagcccacauacggcgugggcuaucagcccuacagagugguggugcugagcuucgaacugcugcaugcuccugccacagugugcggcccuaagaaaagcaccaaucucgugaagaacaaaugcgugaacuucaacuucaacggccugaccggcaccggcgugcugacagagagcaacaagaaguuccugccauuccagcaguuuggccgggauaucgacgauaccacagacgccguuagagauccccagacacuggaaauccuggacaucaccccaugcagcuucggcggagugucugugaucaccccuggcaccaacaccagcaaucagguggcagugcuguaccagggcgugaacuguaccgaagugcccguggccauucacgccgaucagcugacaccuacauggcggguguacuccaccggcagcaauguguuucagaccagagccggcugucugaucggagccgagcacgugaacaauagcuacgagugcgacauccccaucggcgcuggcaucugugccagcuaccagacacagacaaacagccacagacgggcuagaagcguggccagccagagcaucauugccuacacaaugucucugggcgccgagaacagcguggccuacuccaacaacucuaucgcuauccccaucaacuucaccaucagcgugaccaccgagauccugccuguguccaugaccaagaccagcguggacugcaccauguacaucugcggcgauuccaccgagugcuccaaccugcugcugcaguacggcagcuucugcacccagcugaauagagcccugacagggaucgccguggaacaggacaagaacacccaagagguguucgcccaagugaagcaaaucuacaagaccccuccuaucaaggacuucggcggcuucaauuucagccagauucugcccgauccuagcaagcccagcaagcggagcuucaucgaggaccugcuguucaacaaagugacacuggccgacgccggcuucaucaagcaguauggcgauugucugggcgacauugccgccagggaucugauuugcgcccagaaguuuaacggacugacagugcugccuccucugcugaccgaugagaugaucgcccaguacacaucugcccugcuggccggcacaaucacaagcggcuggacauuuggagcuggcgccgcucugcagauccccuuugcuaugcagauggccuaccgguucaacggcaucggagugacccagaaugugcuguacgagaaccagaagcugaucgccaaccaguucaacagcgccaucggcaagauccaggacagccugagcagcacagcaagcgcccugggaaagcugcaggacguggucaaccagaaugcccaggcacugaacacccuggucaagcagcuguccuccaacuucggcgccaucagcucugugcugaacgauauccuggccagacuggacccuccugaggccgaggugcagaucgacagacugaucacaggcagacugcagagccuccagacauacgugacccagcagcugaucagagccgccgagauuagagccucugccaaucuggccgccaccaagaugucugagugugugcugggccagagcaagagaguggacuuuugcggcaagggcuaccaccugaugagcuucccucagucugccccucacggcgugguguuucugcacgugacauaugugcccgcucaagagaagaauuucaccaccgcuccagccaucugccacgacggcaaagcccacuuuccuagagaaggcguguucguguccaacggcacccauugguucgugacacagcggaacuucuacgagccccagaucaucaccacccacaacaccuucgugucuggcaacugcgacguugugaucggcauugugaacaauaccguguacgacccucugcagcccgagcuggacagcuucaaagaggaacuggacaaguacuuuaagaaccacacaagccccgacguggaccugggcgauaucagcggaaucaaugccagcgucgugaacauccagaaagagaucgaccggcugaacgagguggccaagaaucugaacgagagccugaucgaccugcaagaacuggggaaguacgagcaguacaucaaguggcccugguacaucuggcugggcuuuaucgccggacugauugccaucgugauggucacaaucaugcuguguugcaugaccagcugcuguagcugccugaagggcuguuguagcuguggcagcugcugcaaguucgacgaggacgauucugagcccgugcugaagggcgugaaacugcacuacaccugaggacuagucccuguucccagagcccacuuuuuuuucuuuuuuugaaauaaaauagccugucuuucagaucucaaaggcucuuuucagagccaccaaaaaaaaaaaaaaaaaaaaaaaaaaaaaaaaaaaaaaaaaaaaaaaaaaaaaaaaaaaaaaaaaaaaaaaaaaaaaaaaaaaaaaaaaaaaaaaaaaaaa

SEQ ID NO: 23602 - RNA, 4094 nt, Artificial Sequence
  SARS-CoV-2/Wuhan/WIV05/2019__EPI_ISL_402128 spike protein mRNA gc mod (1-1273)(K986P_V987P_K986P_V987P_K417N_E484K_N501Y_D614G)
aggagagucccgcagucggcguccagcggcucugcuuguucgugugugugucguugcaggccuuauucaagcuuaccauguucguguuucuggugcugcugccccugguguccagccagugugugaaccugaccaccagaacacagcugccuccagccuacaccaacagcuucaccagaggcguguacuaccccgacaagguguucagauccagcgugcugcacucuacccaggaccuguuccugccuuucuucagcaacgugaccugguuccacgccauccacguguccggcaccaauggcaccaagagauucgacaaccccgugcugcccuucaacgacgggguguacuuugccagcaccgagaaguccaacaucaucagaggcuggaucuucggcaccacacuggacagcaagacccagagccugcugaucgugaacaacgccaccaacguggucaucaaagugugcgaguuccaguucugcaacgaccccuuccugggcgucuacuaccacaagaacaacaagagcuggauggaaagcgaguuccggguguacagcagcgccaacaacugcaccuucgaguacgugucccagccuuuccugauggaccuggaaggcaagcagggcaacuucaagaaccugcgcgaguucguguucaagaacaucgacggcuacuucaaaaucuacagcaagcacaccccuaucaaccucgugcgggaucugccucagggcuucucugcucuggaaccccugguggaucugcccaucggcaucaacaucacccgguuucagacacugcuggcccugcacagaagcuaccugacaccuggcgauagcagcagcggauggacagcuggugccgccgcuuacuaugugggcuaccugcagccuagaaccuuccugcugaaguacaacgagaacggcaccaucaccgacgccguggauugugcucuggauccucugagcgagacaaagugcacccugaaguccuucaccguggaaaagggcaucuaccagaccagcaacuuccgggugcagcccaccgaauccaucgugcgguuccccaauaucaccaaucugugccccuucggcgagguguucaaugccaccagauucgccucuguguacgccuggaaccggaagcggaucagcaauugcguggccgacuacuccgugcuguacaacuccgccagcuucagcaccuucaagugcuacggcguguccccuaccaagcugaacgaccugugcuucacaaacguguacgccgacagcuucgugauccggggagaugaagugcggcagauugccccuggacagacaggcaacaucgccgacuacaacuacaagcugcccgacgacuucaccggcugugugauugccuggaacagcaacaaccuggacuccaaagucggcggcaacuacaauuaccuguaccggcuguuccggaaguccaaucugaagcccuucgagcgggacaucagcaccgaaaucuaucaggccggcagcaccccuugcaacggcgugaagggcuucaacugcuacuucccacugcaguccuacggcuuucagcccacauacggcgugggcuaucagcccuacagagugguggugcugagcuucgaacugcugcaugcuccugccacagugugcggcccuaagaaaagcaccaaucucgugaagaacaaaugcgugaacuucaacuucaacggccugaccggcaccggcgugcugacagagagcaacaagaaguuccugccauuccagcaguuuggccgggauaucgccgauaccacagacgccguuagagauccccagacacuggaaauccuggacaucaccccaugcagcuucggcggagugucugugaucaccccuggcaccaacaccagcaaucagguggcagugcuguaccagggcgugaacuguaccgaagugcccguggccauucacgccgaucagcugacaccuacauggcggguguacuccaccggcagcaauguguuucagaccagagccggcugucugaucggagccgagcacgugaacaauagcuacgagugcgacauccccaucggcgcuggcaucugugccagcuaccagacacagacaaacagccccagacgggcuagaagcguggccagccagagcaucauugccuacacaaugucucugggcgccgagaacagcguggccuacuccaacaacucuaucgcuauccccaccaacuucaccaucagcgugaccaccgagauccugccuguguccaugaccaagaccagcguggacugcaccauguacaucugcggcgauuccaccgagugcuccaaccugcugcugcaguacggcagcuucugcacccagcugaauagagcccugacagggaucgccguggaacaggacaagaacacccaagagguguucgcccaagugaagcaaaucuacaagaccccuccuaucaaggacuucggcggcuucaauuucagccagauucugcccgauccuagcaagcccagcaagcggagcuucaucgaggaccugcuguucaacaaagugacacuggccgacgccggcuucaucaagcaguauggcgauugucugggcgacauugccgccagggaucugauuugcgcccagaaguuuaacggacugacagugcugccuccucugcugaccgaugagaugaucgcccaguacacaucugcccugcuggccggcacaaucacaagcggcuggacauuuggagcuggcgccgcucugcagauccccuuugcuaugcagauggccuaccgguucaacggcaucggagugacccagaaugugcuguacgagaaccagaagcugaucgccaaccaguucaacagcgccaucggcaagauccaggacagccugagcagcacagcaagcgcccugggaaagcugcaggacguggucaaccagaaugcccaggcacugaacacccuggucaagcagcuguccuccaacuucggcgccaucagcucugugcugaacgauauccugagcagacuggacccuccugaggccgaggugcagaucgacagacugaucacaggcagacugcagagccuccagacauacgugacccagcagcugaucagagccgccgagauuagagccucugccaaucuggccgccaccaagaugucugagugugugcugggccagagcaagagaguggacuuuugcggcaagggcuaccaccugaugagcuucccucagucugccccucacggcgugguguuucugcacgugacauaugugcccgcucaagagaagaauuucaccaccgcuccagccaucugccacgacggcaaagcccacuuuccuagagaaggcguguucguguccaacggcacccauugguucgugacacagcggaacuucuacgagccccagaucaucaccaccgacaacaccuucgugucuggcaacugcgacguugugaucggcauugugaacaauaccguguacgacccucugcagcccgagcuggacagcuucaaagaggaacuggacaaguacuuuaagaaccacacaagccccgacguggaccugggcgauaucagcggaaucaaugccagcgucgugaacauccagaaagagaucgaccggcugaacgagguggccaagaaucugaacgagagccugaucgaccugcaagaacuggggaaguacgagcaguacaucaaguggcccugguacaucuggcugggcuuuaucgccggacugauugccaucgugauggucacaaucaugcuguguugcaugaccagcugcuguagcugccugaagggcuguuguagcuguggcagcugcugcaaguucgacgaggacgauucugagcccgugcugaagggcgugaaacugcacuacaccugaggacuagucccuguucccagagcccacuuuuuuuucuuuuuuugaaauaaaauagccugucuuucagaucucaaaggcucuuuucagagccaccaaaaaaaaaaaaaaaaaaaaaaaaaaaaaaaaaaaaaaaaaaaaaaaaaaaaaaaaaaaaaaaaaaaaaaaaaaaaaaaaaaaaaaaaaaaaaaaaaaaaa

SEQ ID NO: 23603 - RNA, 4085 nt, Artificial Sequence
  SARS-CoV-2/Wuhan/WIV05/2019__EPI_ISL_402128 spike protein mRNA gc mod (1-1273)(K986P_V987P_K986P_V987P_L18F_D80A_D215G_L242del_A243del_ L244del_R246I_K417N_E484K_N501Y_D614G_A701V)
aggagagucccgcagucggcguccagcggcucugcuuguucgugugugugucguugcaggccuuauucaagcuuaccauguucguguuucuggugcugcugccccugguguccagccagugugugaacuucaccaccagaacacagcugccuccagccuacaccaacagcuucaccagaggcguguacuaccccgacaagguguucagauccagcgugcugcacucuacccaggaccuguuccugccuuucuucagcaacgugaccugguuccacgccauccacguguccggcaccaauggcaccaagagauucgccaaccccgugcugcccuucaacgacgggguguacuuugccagcaccgagaaguccaacaucaucagaggcuggaucuucggcaccacacuggacagcaagacccagagccugcugaucgugaacaacgccaccaacguggucaucaaagugugcgaguuccaguucugcaacgaccccuuccugggcgucuacuaccacaagaacaacaagagcuggauggaaagcgaguuccggguguacagcagcgccaacaacugcaccuucgaguacgugucccagccuuuccugauggaccuggaaggcaagcagggcaacuucaagaaccugcgcgaguucguguucaagaacaucgacggcuacuucaaaaucuacagcaagcacaccccuaucaaccucgugcggggccugccucagggcuucucugcucuggaaccccugguggaucugcccaucggcaucaacaucacccgguuucagacacugcacaucagcuaccugacaccuggcgauagcagcagcggauggacagcuggugccgccgcuuacuaugugggcuaccugcagccuagaaccuuccugcugaaguacaacgagaacggcaccaucaccgacgccguggauugugcucuggauccucugagcgagacaaagugcacccugaaguccuucaccguggaaaagggcaucuaccagaccagcaacuuccgggugcagcccaccgaauccaucgugcgguuccccaauaucaccaaucugugccccuucggcgagguguucaaugccaccagauucgccucuguguacgccuggaaccggaagcggaucagcaauugcguggccgacuacuccgugcuguacaacuccgccagcuucagcaccuucaagugcuacggcguguccccuaccaagcugaacgaccugugcuucacaaacguguacgccgacagcuucgugauccggggagaugaagugcggcagauugccccuggacagacaggcaacaucgccgacuacaacuacaagcugcccgacgacuucaccggcugugugauugccuggaacagcaacaaccuggacuccaaagucggcggcaacuacaauuaccuguaccggcuguuccggaaguccaaucugaagcccuucgagcgggacaucagcaccgaaaucuaucaggccggcagcaccccuugcaacggcgugaagggcuucaacugcuacuucccacugcaguccuacggcuuucagcccacauacggcgugggcuaucagcccuacagagugguggugcugagcuucgaacugcugcaugcuccugccacagugugcggcccuaagaaaagcaccaaucucgugaagaacaaaugcgugaacuucaacuucaacggccugaccggcaccggcgugcugacagagagcaacaagaaguuccugccauuccagcaguuuggccgggauaucgccgauaccacagacgccguuagagauccccagacacuggaaauccuggacaucaccccaugcagcuucggcggagugucugugaucaccccuggcaccaacaccagcaaucagguggcagugcuguaccagggcgugaacuguaccgaagugcccguggccauucacgccgaucagcugacaccuacauggcggguguacuccaccggcagcaauguguuucagaccagagccggcugucugaucggagccgagcacgugaacaauagcuacgagugcgacauccccaucggcgcuggcaucugugccagcuaccagacacagacaaacagccccagacgggcuagaagcguggccagccagagcaucauugccuacacaaugucucugggcguggagaacagcguggccuacuccaacaacucuaucgcuauccccaccaacuucaccaucagcgugaccaccgagauccugccuguguccaugaccaagaccagcguggacugcaccauguacaucugcggcgauuccaccgagugcuccaaccugcugcugcaguacggcagcuucugcacccagcugaauagagcccugacagggaucgccguggaacaggacaagaacacccaagagguguucgcccaagugaagcaaaucuacaagaccccuccuaucaaggacuucggcggcuucaauuucagccagauucugcccgauccuagcaagcccagcaagcggagcuucaucgaggaccugcuguucaacaaagugacacuggccgacgccggcuucaucaagcaguauggcgauugucugggcgacauugccgccagggaucugauuugcgcccagaaguuuaacggacugacagugcugccuccucugcugaccgaugagaugaucgcccaguacacaucugcccugcuggccggcacaaucacaagcggcuggacauuuggagcuggcgccgcucugcagauccccuuugcuaugcagauggccuaccgguucaacggcaucggagugacccagaaugugcuguacgagaaccagaagcugaucgccaaccaguucaacagcgccaucggcaagauccaggacagccugagcagcacagcaagcgcccugggaaagcugcaggacguggucaaccagaaugcccaggcacugaacacccuggucaagcagcuguccuccaacuucggcgccaucagcucugugcugaacgauauccugagcagacuggacccuccugaggccgaggugcagaucgacagacugaucacaggcagacugcagagccuccagacauacgugacccagcagcugaucagagccgccgagauuagagccucugccaaucuggccgccaccaagaugucugagugugugcugggccagagcaagagaguggacuuuugcggcaagggcuaccaccugaugagcuucccucagucugccccucacggcgugguguuucugcacgugacauaugugcccgcucaagagaagaauuucaccaccgcuccagccaucugccacgacggcaaagcccacuuuccuagagaaggcguguucguguccaacggcacccauugguucgugacacagcggaacuucuacgagccccagaucaucaccaccgacaacaccuucgugucuggcaacugcgacguugugaucggcauugugaacaauaccguguacgacccucugcagcccgagcuggacagcuucaaagaggaacuggacaaguacuuuaagaaccacacaagccccgacguggaccugggcgauaucagcggaaucaaugccagcgucgugaacauccagaaagagaucgaccggcugaacgagguggccaagaaucugaacgagagccugaucgaccugcaagaacuggggaaguacgagcaguacaucaaguggcccugguacaucuggcugggcuuuaucgccggacugauugccaucgugauggucacaaucaugcuguguugcaugaccagcugcuguagcugccugaagggcuguuguagcuguggcagcugcugcaaguucgacgaggacgauucugagcccgugcugaagggcgugaaacugcacuacaccugaggacuagucccuguucccagagcccacuuuuuuuucuuuuuuugaaauaaaauagccugucuuucagaucucaaaggcucuuuucagagccaccaaaaaaaaaaaaaaaaaaaaaaaaaaaaaaaaaaaaaaaaaaaaaaaaaaaaaaaaaaaaaaaaaaaaaaaaaaaaaaaaaaaaaaaaaaaaaaaaaaaaa

SEQ ID NO: 23604 - RNA, 4094 nt, Artificial Sequence
  SARS-CoV-2/Wuhan/WIV05/2019__EPI_ISL_402128 spike protein mRNA gc mod (1-1273)(K986P_V987P_K986P_V987P_E484K_D614G)
aggagagucccgcagucggcguccagcggcucugcuuguucgugugugugucguugcaggccuuauucaagcuuaccauguucguguuucuggugcugcugccccugguguccagccagugugugaaccugaccaccagaacacagcugccuccagccuacaccaacagcuucaccagaggcguguacuaccccgacaagguguucagauccagcgugcugcacucuacccaggaccuguuccugccuuucuucagcaacgugaccugguuccacgccauccacguguccggcaccaauggcaccaagagauucgacaaccccgugcugcccuucaacgacgggguguacuuugccagcaccgagaaguccaacaucaucagaggcuggaucuucggcaccacacuggacagcaagacccagagccugcugaucgugaacaacgccaccaacguggucaucaaagugugcgaguuccaguucugcaacgaccccuuccugggcgucuacuaccacaagaacaacaagagcuggauggaaagcgaguuccggguguacagcagcgccaacaacugcaccuucgaguacgugucccagccuuuccugauggaccuggaaggcaagcagggcaacuucaagaaccugcgcgaguucguguucaagaacaucgacggcuacuucaaaaucuacagcaagcacaccccuaucaaccucgugcgggaucugccucagggcuucucugcucuggaaccccugguggaucugcccaucggcaucaacaucacccgguuucagacacugcuggcccugcacagaagcuaccugacaccuggcgauagcagcagcggauggacagcuggugccgccgcuuacuaugugggcuaccugcagccuagaaccuuccugcugaaguacaacgagaacggcaccaucaccgacgccguggauugugcucuggauccucugagcgagacaaagugcacccugaaguccuucaccguggaaaagggcaucuaccagaccagcaacuuccgggugcagcccaccgaauccaucgugcgguuccccaauaucaccaaucugugccccuucggcgagguguucaaugccaccagauucgccucuguguacgccuggaaccggaagcggaucagcaauugcguggccgacuacuccgugcuguacaacuccgccagcuucagcaccuucaagugcuacggcguguccccuaccaagcugaacgaccugugcuucacaaacguguacgccgacagcuucgugauccggggagaugaagugcggcagauugccccuggacagacaggcaagaucgccgacuacaacuacaagcugcccgacgacuucaccggcugugugauugccuggaacagcaacaaccuggacuccaaagucggcggcaacuacaauuaccuguaccggcuguuccggaaguccaaucugaagcccuucgagcgggacaucagcaccgaaaucuaucaggccggcagcaccccuugcaacggcgugaagggcuucaacugcuacuucccacugcaguccuacggcuuucagcccacaaauggcgugggcuaucagcccuacagagugguggugcugagcuucgaacugcugcaugcuccugccacagugugcggcccuaagaaaagcaccaaucucgugaagaacaaaugcgugaacuucaacuucaacggccugaccggcaccggcgugcugacagagagcaacaagaaguuccugccauuccagcaguuuggccgggauaucgccgauaccacagacgccguuagagauccccagacacuggaaauccuggacaucaccccaugcagcuucggcggagugucugugaucaccccuggcaccaacaccagcaaucagguggcagugcuguaccagggcgugaacuguaccgaagugcccguggccauucacgccgaucagcugacaccuacauggcggguguacuccaccggcagcaauguguuucagaccagagccggcugucugaucggagccgagcacgugaacaauagcuacgagugcgacauccccaucggcgcuggcaucugugccagcuaccagacacagacaaacagccccagacgggcuagaagcguggccagccagagcaucauugccuacacaaugucucugggcgccgagaacagcguggccuacuccaacaacucuaucgcuauccccaccaacuucaccaucagcgugaccaccgagauccugccuguguccaugaccaagaccagcguggacugcaccauguacaucugcggcgauuccaccgagugcuccaaccugcugcugcaguacggcagcuucugcacccagcugaauagagcccugacagggaucgccguggaacaggacaagaacacccaagagguguucgcccaagugaagcaaaucuacaagaccccuccuaucaaggacuucggcggcuucaauuucagccagauucugcccgauccuagcaagcccagcaagcggagcuucaucgaggaccugcuguucaacaaagugacacuggccgacgccggcuucaucaagcaguauggcgauugucugggcgacauugccgccagggaucugauuugcgcccagaaguuuaacggacugacagugcugccuccucugcugaccgaugagaugaucgcccaguacacaucugcccugcuggccggcacaaucacaagcggcuggacauuuggagcuggcgccgcucugcagauccccuuugcuaugcagauggccuaccgguucaacggcaucggagugacccagaaugugcuguacgagaaccagaagcugaucgccaaccaguucaacagcgccaucggcaagauccaggacagccugagcagcacagcaagcgcccugggaaagcugcaggacguggucaaccagaaugcccaggcacugaacacccuggucaagcagcuguccuccaacuucggcgccaucagcucugugcugaacgauauccugagcagacuggacccuccugaggccgaggugcagaucgacagacugaucacaggcagacugcagagccuccagacauacgugacccagcagcugaucagagccgccgagauuagagccucugccaaucuggccgccaccaagaugucugagugugugcugggccagagcaagagaguggacuuuugcggcaagggcuaccaccugaugagcuucccucagucugccccucacggcgugguguuucugcacgugacauaugugcccgcucaagagaagaauuucaccaccgcuccagccaucugccacgacggcaaagcccacuuuccuagagaaggcguguucguguccaacggcacccauugguucgugacacagcggaacuucuacgagccccagaucaucaccaccgacaacaccuucgugucuggcaacugcgacguugugaucggcauugugaacaauaccguguacgacccucugcagcccgagcuggacagcuucaaagaggaacuggacaaguacuuuaagaaccacacaagccccgacguggaccugggcgauaucagcggaaucaaugccagcgucgugaacauccagaaagagaucgaccggcugaacgagguggccaagaaucugaacgagagccugaucgaccugcaagaacuggggaaguacgagcaguacaucaaguggcccugguacaucuggcugggcuuuaucgccggacugauugccaucgugauggucacaaucaugcuguguugcaugaccagcugcuguagcugccugaagggcuguuguagcuguggcagcugcugcaaguucgacgaggacgauucugagcccgugcugaagggcgugaaacugcacuacaccugaggacuagucccuguucccagagcccacuuuuuuuucuuuuuuugaaauaaaauagccugucuuucagaucucaaaggcucuuuucagagccaccaaaaaaaaaaaaaaaaaaaaaaaaaaaaaaaaaaaaaaaaaaaaaaaaaaaaaaaaaaaaaaaaaaaaaaaaaaaaaaaaaaaaaaaaaaaaaaaaaaaaa

SEQ ID NO: 23605 - RNA, 4094 nt, Artificial Sequence
  SARS-CoV-2/Wuhan/WIV05/2019__EPI_ISL_402128 spike protein mRNA gc mod (1-1273)(K986P_V987P_K986P_V987P_L18F_T20N_P26S_D138Y_R190S_K417T _E484K_N501Y_D614G_H655Y_T1027I)
aggagagucccgcagucggcguccagcggcucugcuuguucgugugugugucguugcaggccuuauucaagcuuaccauguucguguuucuggugcugcugccccugguguccagccagugugugaacuucaccaacagaacacagcugccuagcgccuacaccaacagcuucaccagaggcguguacuaccccgacaagguguucagauccagcgugcugcacucuacccaggaccuguuccugccuuucuucagcaacgugaccugguuccacgccauccacguguccggcaccaauggcaccaagagauucgacaaccccgugcugcccuucaacgacgggguguacuuugccagcaccgagaaguccaacaucaucagaggcuggaucuucggcaccacacuggacagcaagacccagagccugcugaucgugaacaacgccaccaacguggucaucaaagugugcgaguuccaguucugcaacuaccccuuccugggcgucuacuaccacaagaacaacaagagcuggauggaaagcgaguuccggguguacagcagcgccaacaacugcaccuucgaguacgugucccagccuuuccugauggaccuggaaggcaagcagggcaacuucaagaaccugagcgaguucguguucaagaacaucgacggcuacuucaaaaucuacagcaagcacaccccuaucaaccucgugcgggaucugccucagggcuucucugcucuggaaccccugguggaucugcccaucggcaucaacaucacccgguuucagacacugcuggcccugcacagaagcuaccugacaccuggcgauagcagcagcggauggacagcuggugccgccgcuuacuaugugggcuaccugcagccuagaaccuuccugcugaaguacaacgagaacggcaccaucaccgacgccguggauugugcucuggauccucugagcgagacaaagugcacccugaaguccuucaccguggaaaagggcaucuaccagaccagcaacuuccgggugcagcccaccgaauccaucgugcgguuccccaauaucaccaaucugugccccuucggcgagguguucaaugccaccagauucgccucuguguacgccuggaaccggaagcggaucagcaauugcguggccgacuacuccgugcuguacaacuccgccagcuucagcaccuucaagugcuacggcguguccccuaccaagcugaacgaccugugcuucacaaacguguacgccgacagcuucgugauccggggagaugaagugcggcagauugccccuggacagacaggcaccaucgccgacuacaacuacaagcugcccgacgacuucaccggcugugugauugccuggaacagcaacaaccuggacuccaaagucggcggcaacuacaauuaccuguaccggcuguuccggaaguccaaucugaagcccuucgagcgggacaucagcaccgaaaucuaucaggccggcagcaccccuugcaacggcgugaagggcuucaacugcuacuucccacugcaguccuacggcuuucagcccacauacggcgugggcuaucagcccuacagagugguggugcugagcuucgaacugcugcaugcuccugccacagugugcggcccuaagaaaagcaccaaucucgugaagaacaaaugcgugaacuucaacuucaacggccugaccggcaccggcgugcugacagagagcaacaagaaguuccugccauuccagcaguuuggccgggauaucgccgauaccacagacgccguuagagauccccagacacuggaaauccuggacaucaccccaugcagcuucggcggagugucugugaucaccccuggcaccaacaccagcaaucagguggcagugcuguaccagggcgugaacuguaccgaagugcccguggccauucacgccgaucagcugacaccuacauggcggguguacuccaccggcagcaauguguuucagaccagagccggcugucugaucggagccgaguacgugaacaauagcuacgagugcgacauccccaucggcgcuggcaucugugccagcuaccagacacagacaaacagccccagacgggcuagaagcguggccagccagagcaucauugccuacacaaugucucugggcgccgagaacagcguggccuacuccaacaacucuaucgcuauccccaccaacuucaccaucagcgugaccaccgagauccugccuguguccaugaccaagaccagcguggacugcaccauguacaucugcggcgauuccaccgagugcuccaaccugcugcugcaguacggcagcuucugcacccagcugaauagagcccugacagggaucgccguggaacaggacaagaacacccaagagguguucgcccaagugaagcaaaucuacaagaccccuccuaucaaggacuucggcggcuucaauuucagccagauucugcccgauccuagcaagcccagcaagcggagcuucaucgaggaccugcuguucaacaaagugacacuggccgacgccggcuucaucaagcaguauggcgauugucugggcgacauugccgccagggaucugauuugcgcccagaaguuuaacggacugacagugcugccuccucugcugaccgaugagaugaucgcccaguacacaucugcccugcuggccggcacaaucacaagcggcuggacauuuggagcuggcgccgcucugcagauccccuuugcuaugcagauggccuaccgguucaacggcaucggagugacccagaaugugcuguacgagaaccagaagcugaucgccaaccaguucaacagcgccaucggcaagauccaggacagccugagcagcacagcaagcgcccugggaaagcugcaggacguggucaaccagaaugcccaggcacugaacacccuggucaagcagcuguccuccaacuucggcgccaucagcucugugcugaacgauauccugagcagacuggacccuccugaggccgaggugcagaucgacagacugaucacaggcagacugcagagccuccagacauacgugacccagcagcugaucagagccgccgagauuagagccucugccaaucuggccgccaucaagaugucugagugugugcugggccagagcaagagaguggacuuuugcggcaagggcuaccaccugaugagcuucccucagucugccccucacggcgugguguuucugcacgugacauaugugcccgcucaagagaagaauuucaccaccgcuccagccaucugccacgacggcaaagcccacuuuccuagagaaggcguguucguguccaacggcacccauugguucgugacacagcggaacuucuacgagccccagaucaucaccaccgacaacaccuucgugucuggcaacugcgacguugugaucggcauugugaacaauaccguguacgacccucugcagcccgagcuggacagcuucaaagaggaacuggacaaguacuuuaagaaccacacaagccccgacguggaccugggcgauaucagcggaaucaaugccagcgucgugaacauccagaaagagaucgaccggcugaacgagguggccaagaaucugaacgagagccugaucgaccugcaagaacuggggaaguacgagcaguacaucaaguggcccugguacaucuggcugggcuuuaucgccggacugauugccaucgugauggucacaaucaugcuguguugcaugaccagcugcuguagcugccugaagggcuguuguagcuguggcagcugcugcaaguucgacgaggacgauucugagcccgugcugaagggcgugaaacugcacuacaccugaggacuagucccuguucccagagcccacuuuuuuuucuuuuuuugaaauaaaauagccugucuuucagaucucaaaggcucuuuucagagccaccaaaaaaaaaaaaaaaaaaaaaaaaaaaaaaaaaaaaaaaaaaaaaaaaaaaaaaaaaaaaaaaaaaaaaaaaaaaaaaaaaaaaaaaaaaaaaaaaaaaaa

SEQ ID NO: 23606 - RNA, 4094 nt, Artificial Sequence
  SARS-CoV-2/Wuhan/WIV05/2019__EPI_ISL_402128 spike protein mRNA gc mod (1-1273)(K986P_V987P_K986P_V987P_S13I_W152C_L452R_D614G)
aggagagucccgcagucggcguccagcggcucugcuuguucgugugugugucguugcaggccuuauucaagcuuaccauguucguguuucuggugcugcugccccugguguccauccagugugugaaccugaccaccagaacacagcugccuccagccuacaccaacagcuucaccagaggcguguacuaccccgacaagguguucagauccagcgugcugcacucuacccaggaccuguuccugccuuucuucagcaacgugaccugguuccacgccauccacguguccggcaccaauggcaccaagagauucgacaaccccgugcugcccuucaacgacgggguguacuuugccagcaccgagaaguccaacaucaucagaggcuggaucuucggcaccacacuggacagcaagacccagagccugcugaucgugaacaacgccaccaacguggucaucaaagugugcgaguuccaguucugcaacgaccccuuccugggcgucuacuaccacaagaacaacaagagcugcauggaaagcgaguuccggguguacagcagcgccaacaacugcaccuucgaguacgugucccagccuuuccugauggaccuggaaggcaagcagggcaacuucaagaaccugcgcgaguucguguucaagaacaucgacggcuacuucaaaaucuacagcaagcacaccccuaucaaccucgugcgggaucugccucagggcuucucugcucuggaaccccugguggaucugcccaucggcaucaacaucacccgguuucagacacugcuggcccugcacagaagcuaccugacaccuggcgauagcagcagcggauggacagcuggugccgccgcuuacuaugugggcuaccugcagccuagaaccuuccugcugaaguacaacgagaacggcaccaucaccgacgccguggauugugcucuggauccucugagcgagacaaagugcacccugaaguccuucaccguggaaaagggcaucuaccagaccagcaacuuccgggugcagcccaccgaauccaucgugcgguuccccaauaucaccaaucugugccccuucggcgagguguucaaugccaccagauucgccucuguguacgccuggaaccggaagcggaucagcaauugcguggccgacuacuccgugcuguacaacuccgccagcuucagcaccuucaagugcuacggcguguccccuaccaagcugaacgaccugugcuucacaaacguguacgccgacagcuucgugauccggggagaugaagugcggcagauugccccuggacagacaggcaagaucgccgacuacaacuacaagcugcccgacgacuucaccggcugugugauugccuggaacagcaacaaccuggacuccaaagucggcggcaacuacaauuaccgcuaccggcuguuccggaaguccaaucugaagcccuucgagcgggacaucagcaccgaaaucuaucaggccggcagcaccccuugcaacggcguggaaggcuucaacugcuacuucccacugcaguccuacggcuuucagcccacaaauggcgugggcuaucagcccuacagagugguggugcugagcuucgaacugcugcaugcuccugccacagugugcggcccuaagaaaagcaccaaucucgugaagaacaaaugcgugaacuucaacuucaacggccugaccggcaccggcgugcugacagagagcaacaagaaguuccugccauuccagcaguuuggccgggauaucgccgauaccacagacgccguuagagauccccagacacuggaaauccuggacaucaccccaugcagcuucggcggagugucugugaucaccccuggcaccaacaccagcaaucagguggcagugcuguaccagggcgugaacuguaccgaagugcccguggccauucacgccgaucagcugacaccuacauggcggguguacuccaccggcagcaauguguuucagaccagagccggcugucugaucggagccgagcacgugaacaauagcuacgagugcgacauccccaucggcgcuggcaucugugccagcuaccagacacagacaaacagccccagacgggcuagaagcguggccagccagagcaucauugccuacacaaugucucugggcgccgagaacagcguggccuacuccaacaacucuaucgcuauccccaccaacuucaccaucagcgugaccaccgagauccugccuguguccaugaccaagaccagcguggacugcaccauguacaucugcggcgauuccaccgagugcuccaaccugcugcugcaguacggcagcuucugcacccagcugaauagagcccugacagggaucgccguggaacaggacaagaacacccaagagguguucgcccaagugaagcaaaucuacaagaccccuccuaucaaggacuucggcggcuucaauuucagccagauucugcccgauccuagcaagcccagcaagcggagcuucaucgaggaccugcuguucaacaaagugacacuggccgacgccggcuucaucaagcaguauggcgauugucugggcgacauugccgccagggaucugauuugcgcccagaaguuuaacggacugacagugcugccuccucugcugaccgaugagaugaucgcccaguacacaucugcccugcuggccggcacaaucacaagcggcuggacauuuggagcuggcgccgcucugcagauccccuuugcuaugcagauggccuaccgguucaacggcaucggagugacccagaaugugcuguacgagaaccagaagcugaucgccaaccaguucaacagcgccaucggcaagauccaggacagccugagcagcacagcaagcgcccugggaaagcugcaggacguggucaaccagaaugcccaggcacugaacacccuggucaagcagcuguccuccaacuucggcgccaucagcucugugcugaacgauauccugagcagacuggacccuccugaggccgaggugcagaucgacagacugaucacaggcagacugcagagccuccagacauacgugacccagcagcugaucagagccgccgagauuagagccucugccaaucuggccgccaccaagaugucugagugugugcugggccagagcaagagaguggacuuuugcggcaagggcuaccaccugaugagcuucccucagucugccccucacggcgugguguuucugcacgugacauaugugcccgcucaagagaagaauuucaccaccgcuccagccaucugccacgacggcaaagcccacuuuccuagagaaggcguguucguguccaacggcacccauugguucgugacacagcggaacuucuacgagccccagaucaucaccaccgacaacaccuucgugucuggcaacugcgacguugugaucggcauugugaacaauaccguguacgacccucugcagcccgagcuggacagcuucaaagaggaacuggacaaguacuuuaagaaccacacaagccccgacguggaccugggcgauaucagcggaaucaaugccagcgucgugaacauccagaaagagaucgaccggcugaacgagguggccaagaaucugaacgagagccugaucgaccugcaagaacuggggaaguacgagcaguacaucaaguggcccugguacaucuggcugggcuuuaucgccggacugauugccaucgugauggucacaaucaugcuguguugcaugaccagcugcuguagcugccugaagggcuguuguagcuguggcagcugcugcaaguucgacgaggacgauucugagcccgugcugaagggcgugaaacugcacuacaccugaggacuagucccuguucccagagcccacuuuuuuuucuuuuuuugaaauaaaauagccugucuuucagaucucaaaggcucuuuucagagccaccaaaaaaaaaaaaaaaaaaaaaaaaaaaaaaaaaaaaaaaaaaaaaaaaaaaaaaaaaaaaaaaaaaaaaaaaaaaaaaaaaaaaaaaaaaaaaaaaaaaaa

SEQ ID NO: 23607 - RNA, 4094 nt, Artificial Sequence
  SARS-CoV-2/Wuhan/WIV05/2019__EPI_ISL_402128 spike protein mRNA gc mod (1-1273)(K986P_V987P)
aggagagucccgcagucggcguccagcggcucugcuuguucgugugugugucguugcaggccuuauucaagcuuaccauguucguguuccuggugcugcugccucugguguccagccagugugugaaccugaccaccagaacacagcugccuccagccuacaccaacagcuuuaccagaggcguguacuaccccgacaagguguucagauccagcgugcugcacucuacccaggaccuguuccugccuuucuucagcaacgugaccugguuccacgccauccacguguccggcaccaauggcaccaagagauucgacaaccccgugcugcccuucaacgacgggguguacuuugccagcaccgagaaguccaacaucaucagaggcuggaucuucggcaccacacuggacagcaagacccagagccugcugaucgugaacaacgccaccaacguggucaucaaagugugcgaguuccaguucugcaacgaccccuuccugggcgucuacuaccacaagaacaacaagagcuggauggaaagcgaguuccggguguacagcagcgccaacaacugcaccuucgaguacgugucccagccuuuccugauggaccuggaaggcaagcagggcaacuucaagaaccugcgcgaguucguguuuaagaacaucgacggcuacuucaagaucuacagcaagcacaccccuaucaaccucgugcgggaucugccucagggcuucucugcucuggaaccccugguggaucugcccaucggcaucaacaucacccgguuucagacacugcuggcccugcacagaagcuaccugacaccuggcgauagcagcagcggauggacagcuggugccgccgcuuacuaugugggcuaccugcagccuagaaccuuccugcugaaguacaacgagaacggcaccaucaccgacgccguggauugugcucuggauccucugagcgagacaaagugcacccugaaguccuucaccguggaaaagggcaucuaccagaccagcaacuuccgggugcagcccaccgaauccaucgugcgguuccccaauaucaccaaucugugccccuucggcgagguguucaaugccaccagauucgccucuguguacgccuggaaccggaagcggaucagcaauugcguggccgacuacuccgugcuguacaacuccgccagcuucagcaccuucaagugcuacggcguguccccuaccaagcugaacgaccugugcuucacaaacguguacgccgacagcuucgugauccggggagaugaagugcggcagauugccccuggacagacaggcaagaucgccgacuacaacuacaagcugcccgacgacuucaccggcugugugauugccuggaacagcaacaaccuggacuccaaagucggcggcaacuacaauuaccuguaccggcuguuccggaaguccaaucugaagcccuucgagcgggacaucuccaccgagaucuaucaggccggcagcaccccuuguaacggcguggaaggcuucaacugcuacuucccacugcaguccuacggcuuucagcccacaaauggcgugggcuaucagcccuacagagugguggugcugagcuucgaacugcugcaugccccugccacagugugcggcccuaagaaaagcaccaaucucgugaagaacaaaugcgugaacuucaacuucaacggccugaccggcaccggcgugcugacagagagcaacaagaaguuccugccauuccagcaguuuggccgggauaucgccgauaccacagacgccguuagagauccccagacacuggaaauccuggacaucaccccuugcagcuucggcggagugucugugaucaccccuggcaccaacaccagcaaucagguggcagugcuguaccaggacgugaacuguaccgaagugcccguggccauucacgccgaucagcugacaccuacauggcggguguacuccaccggcagcaauguguuucagaccagagccggcugucugaucggagccgagcacgugaacaauagcuacgagugcgacauccccaucggcgcuggaaucugcgccagcuaccagacacagacaaacagcccucggagagccagaagcguggccagccagagcaucauugccuacacaaugucucugggcgccgagaacagcguggccuacuccaacaacucuaucgcuauccccaccaacuucaccaucagcgugaccacagagauccugccuguguccaugaccaagaccagcguggacugcaccauguacaucugcggcgauuccaccgagugcuccaaccugcugcugcaguacggcagcuucugcacccagcugaauagagcccugacagggaucgccguggaacaggacaagaacacccaagagguguucgcccaagugaagcagaucuacaagaccccuccuaucaaggacuucggcggcuucaauuucagccagauucugcccgauccuagcaagcccagcaagcggagcuucaucgaggaccugcuguucaacaaagugacacuggccgacgccggcuucaucaagcaguauggcgauugucugggcgacauugccgccagggaucugauuugcgcccagaaguuuaacggacugacagugcugccuccucugcugaccgaugagaugaucgcccaguacacaucugcccugcuggccggcacaaucacaagcggcuggacauuuggagcaggcgccgcucugcagauccccuuugcuaugcagauggccuaccgguucaacggcaucggagugacccagaaugugcuguacgagaaccagaagcugaucgccaaccaguucaacagcgccaucggcaagauccaggacagccugagcagcacagcaagcgcccugggaaagcugcaggacguggucaaccagaaugcccaggcacugaacacccuggucaagcagcuguccuccaacuucggcgccaucagcucugugcugaacgauauccugagcagacuggacccuccugaggccgaggugcagaucgacagacugaucacaggcagacugcagagccuccagacauacgugacccagcagcugaucagagccgccgagauuagagccucugccaaucuggccgccaccaagaugucugagugugugcugggccagagcaagagaguggacuuuugcggcaagggcuaccaccugaugagcuucccucagucugccccucacggcgugguguuucugcacgugacauaugugcccgcucaagagaagaauuucaccaccgcuccagccaucugccacgacggcaaagcccacuuuccuagagaaggcguguucguguccaacggcacccauugguucgugacacagcggaacuucuacgagccccagaucaucaccaccgacaacaccuucgugucuggcaacugcgacgucgugaucggcauugugaacaauaccguguacgacccucugcagcccgagcuggacagcuucaaagaggaacuggacaaguacuuuaagaaccacacaagccccgacguggaccugggcgauaucagcggaaucaaugccagcgucgugaacauccagaaagagaucgaccggcugaacgagguggccaagaaucugaacgagagccugaucgaccugcaagaacuggggaaguacgagcaguacaucaaguggcccugguacaucuggcugggcuuuaucgccggacugauugccaucgugauggucacaaucaugcuguguugcaugaccagcugcuguagcugccugaagggcuguuguagcuguggcagcugcugcaaguucgacgaggacgauucugagcccgugcugaagggcgugaaacugcacuacacaugaggacuagucccuguucccagagcccacuuuuuuuucuuuuuuugaaauaaaauagccugucuuucagaucucaaaggcucuuuucagagccaccaaaaaaaaaaaaaaaaaaaaaaaaaaaaaaaaaaaaaaaaaaaaaaaaaaaaaaaaaaaaaaaaaaaaaaaaaaaaaaaaaaaaaaaaaaaaaaaaaaaaa

SEQ ID NO: 23608 - RNA, 4094 nt, Artificial Sequence
  SARS-CoV-2/Wuhan/WIV05/2019__EPI_ISL_402128 spike protein mRNA gc mod (1-1273)(K986P_V987P_ D614G)
aggagagucccgcagucggcguccagcggcucugcuuguucgugugugugucguugcaggccuuauucaagcuuaccauguucguguuccuggugcugcugccucugguguccagccagugugugaaccugaccaccagaacacagcugccuccagccuacaccaacagcuuuaccagaggcguguacuaccccgacaagguguucagauccagcgugcugcacucuacccaggaccuguuccugccuuucuucagcaacgugaccugguuccacgccauccacguguccggcaccaauggcaccaagagauucgacaaccccgugcugcccuucaacgacgggguguacuuugccagcaccgagaaguccaacaucaucagaggcuggaucuucggcaccacacuggacagcaagacccagagccugcugaucgugaacaacgccaccaacguggucaucaaagugugcgaguuccaguucugcaacgaccccuuccugggcgucuacuaccacaagaacaacaagagcuggauggaaagcgaguuccggguguacagcagcgccaacaacugcaccuucgaguacgugucccagccuuuccugauggaccuggaaggcaagcagggcaacuucaagaaccugcgcgaguucguguuuaagaacaucgacggcuacuucaagaucuacagcaagcacaccccuaucaaccucgugcgggaucugccucagggcuucucugcucuggaaccccugguggaucugcccaucggcaucaacaucacccgguuucagacacugcuggcccugcacagaagcuaccugacaccuggcgauagcagcagcggauggacagcuggugccgccgcuuacuaugugggcuaccugcagccuagaaccuuccugcugaaguacaacgagaacggcaccaucaccgacgccguggauugugcucuggauccucugagcgagacaaagugcacccugaaguccuucaccguggaaaagggcaucuaccagaccagcaacuuccgggugcagcccaccgaauccaucgugcgguuccccaauaucaccaaucugugccccuucggcgagguguucaaugccaccagauucgccucuguguacgccuggaaccggaagcggaucagcaauugcguggccgacuacuccgugcuguacaacuccgccagcuucagcaccuucaagugcuacggcguguccccuaccaagcugaacgaccugugcuucacaaacguguacgccgacagcuucgugauccggggagaugaagugcggcagauugccccuggacagacaggcaagaucgccgacuacaacuacaagcugcccgacgacuucaccggcugugugauugccuggaacagcaacaaccuggacuccaaagucggcggcaacuacaauuaccuguaccggcuguuccggaaguccaaucugaagcccuucgagcgggacaucuccaccgagaucuaucaggccggcagcaccccuuguaacggcguggaaggcuucaacugcuacuucccacugcaguccuacggcuuucagcccacaaauggcgugggcuaucagcccuacagagugguggugcugagcuucgaacugcugcaugccccugccacagugugcggcccuaagaaaagcaccaaucucgugaagaacaaaugcgugaacuucaacuucaacggccugaccggcaccggcgugcugacagagagcaacaagaaguuccugccauuccagcaguuuggccgggauaucgccgauaccacagacgccguuagagauccccagacacuggaaauccuggacaucaccccuugcagcuucggcggagugucugugaucaccccuggcaccaacaccagcaaucagguggcagugcuguaccagggcgugaacuguaccgaagugcccguggccauucacgccgaucagcugacaccuacauggcggguguacuccaccggcagcaauguguuucagaccagagccggcugucugaucggagccgagcacgugaacaauagcuacgagugcgacauccccaucggcgcuggaaucugcgccagcuaccagacacagacaaacagcccucggagagccagaagcguggccagccagagcaucauugccuacacaaugucucugggcgccgagaacagcguggccuacuccaacaacucuaucgcuauccccaccaacuucaccaucagcgugaccacagagauccugccuguguccaugaccaagaccagcguggacugcaccauguacaucugcggcgauuccaccgagugcuccaaccugcugcugcaguacggcagcuucugcacccagcugaauagagcccugacagggaucgccguggaacaggacaagaacacccaagagguguucgcccaagugaagcagaucuacaagaccccuccuaucaaggacuucggcggcuucaauuucagccagauucugcccgauccuagcaagcccagcaagcggagcuucaucgaggaccugcuguucaacaaagugacacuggccgacgccggcuucaucaagcaguauggcgauugucugggcgacauugccgccagggaucugauuugcgcccagaaguuuaacggacugacagugcugccuccucugcugaccgaugagaugaucgcccaguacacaucugcccugcuggccggcacaaucacaagcggcuggacauuuggagcaggcgccgcucugcagauccccuuugcuaugcagauggccuaccgguucaacggcaucggagugacccagaaugugcuguacgagaaccagaagcugaucgccaaccaguucaacagcgccaucggcaagauccaggacagccugagcagcacagcaagcgcccugggaaagcugcaggacguggucaaccagaaugcccaggcacugaacacccuggucaagcagcuguccuccaacuucggcgccaucagcucugugcugaacgauauccugagcagacuggacccuccugaggccgaggugcagaucgacagacugaucacaggcagacugcagagccuccagacauacgugacccagcagcugaucagagccgccgagauuagagccucugccaaucuggccgccaccaagaugucugagugugugcugggccagagcaagagaguggacuuuugcggcaagggcuaccaccugaugagcuucccucagucugccccucacggcgugguguuucugcacgugacauaugugcccgcucaagagaagaauuucaccaccgcuccagccaucugccacgacggcaaagcccacuuuccuagagaaggcguguucguguccaacggcacccauugguucgugacacagcggaacuucuacgagccccagaucaucaccaccgacaacaccuucgugucuggcaacugcgacgucgugaucggcauugugaacaauaccguguacgacccucugcagcccgagcuggacagcuucaaagaggaacuggacaaguacuuuaagaaccacacaagccccgacguggaccugggcgauaucagcggaaucaaugccagcgucgugaacauccagaaagagaucgaccggcugaacgagguggccaagaaucugaacgagagccugaucgaccugcaagaacuggggaaguacgagcaguacaucaaguggcccugguacaucuggcugggcuuuaucgccggacugauugccaucgugauggucacaaucaugcuguguugcaugaccagcugcuguagcugccugaagggcuguuguagcuguggcagcugcugcaaguucgacgaggacgauucugagcccgugcugaagggcgugaaacugcacuacacaugaggacuagucccuguucccagagcccacuuuuuuuucuuuuuuugaaauaaaauagccugucuuucagaucucaaaggcucuuuucagagccaccaaaaaaaaaaaaaaaaaaaaaaaaaaaaaaaaaaaaaaaaaaaaaaaaaaaaaaaaaaaaaaaaaaaaaaaaaaaaaaaaaaaaaaaaaaaaaaaaaaaaa

SEQ ID NO: 23609 - RNA, 4094 nt, Artificial Sequence
  SARS-CoV-2/Wuhan/WIV05/2019__EPI_ISL_402128 spike protein mRNA gc mod (1-1273)(K986P_V987P_A222V_D614G)
aggagagucccgcagucggcguccagcggcucugcuuguucgugugugugucguugcaggccuuauucaagcuuaccauguucguguuccuggugcugcugccucugguguccagccagugugugaaccugaccaccagaacacagcugccuccagccuacaccaacagcuuuaccagaggcguguacuaccccgacaagguguucagauccagcgugcugcacucuacccaggaccuguuccugccuuucuucagcaacgugaccugguuccacgccauccacguguccggcaccaauggcaccaagagauucgacaaccccgugcugcccuucaacgacgggguguacuuugccagcaccgagaaguccaacaucaucagaggcuggaucuucggcaccacacuggacagcaagacccagagccugcugaucgugaacaacgccaccaacguggucaucaaagugugcgaguuccaguucugcaacgaccccuuccugggcgucuacuaccacaagaacaacaagagcuggauggaaagcgaguuccggguguacagcagcgccaacaacugcaccuucgaguacgugucccagccuuuccugauggaccuggaaggcaagcagggcaacuucaagaaccugcgcgaguucguguuuaagaacaucgacggcuacuucaagaucuacagcaagcacaccccuaucaaccucgugcgggaucugccucagggcuucucugugcuggaaccccugguggaucugcccaucggcaucaacaucacccgguuucagacacugcuggcccugcacagaagcuaccugacaccuggcgauagcagcagcggauggacagcuggugccgccgcuuacuaugugggcuaccugcagccuagaaccuuccugcugaaguacaacgagaacggcaccaucaccgacgccguggauugugcucuggauccucugagcgagacaaagugcacccugaaguccuucaccguggaaaagggcaucuaccagaccagcaacuuccgggugcagcccaccgaauccaucgugcgguuccccaauaucaccaaucugugccccuucggcgagguguucaaugccaccagauucgccucuguguacgccuggaaccggaagcggaucagcaauugcguggccgacuacuccgugcuguacaacuccgccagcuucagcaccuucaagugcuacggcguguccccuaccaagcugaacgaccugugcuucacaaacguguacgccgacagcuucgugauccggggagaugaagugcggcagauugccccuggacagacaggcaagaucgccgacuacaacuacaagcugcccgacgacuucaccggcugugugauugccuggaacagcaacaaccuggacuccaaagucggcggcaacuacaauuaccuguaccggcuguuccggaaguccaaucugaagcccuucgagcgggacaucuccaccgagaucuaucaggccggcagcaccccuuguaacggcguggaaggcuucaacugcuacuucccacugcaguccuacggcuuucagcccacaaauggcgugggcuaucagcccuacagagugguggugcugagcuucgaacugcugcaugccccugccacagugugcggcccuaagaaaagcaccaaucucgugaagaacaaaugcgugaacuucaacuucaacggccugaccggcaccggcgugcugacagagagcaacaagaaguuccugccauuccagcaguuuggccgggauaucgccgauaccacagacgccguuagagauccccagacacuggaaauccuggacaucaccccuugcagcuucggcggagugucugugaucaccccuggcaccaacaccagcaaucagguggcagugcuguaccagggcgugaacuguaccgaagugcccguggccauucacgccgaucagcugacaccuacauggcggguguacuccaccggcagcaauguguuucagaccagagccggcugucugaucggagccgagcacgugaacaauagcuacgagugcgacauccccaucggcgcuggaaucugcgccagcuaccagacacagacaaacagcccucggagagccagaagcguggccagccagagcaucauugccuacacaaugucucugggcgccgagaacagcguggccuacuccaacaacucuaucgcuauccccaccaacuucaccaucagcgugaccacagagauccugccuguguccaugaccaagaccagcguggacugcaccauguacaucugcggcgauuccaccgagugcuccaaccugcugcugcaguacggcagcuucugcacccagcugaauagagcccugacagggaucgccguggaacaggacaagaacacccaagagguguucgcccaagugaagcagaucuacaagaccccuccuaucaaggacuucggcggcuucaauuucagccagauucugcccgauccuagcaagcccagcaagcggagcuucaucgaggaccugcuguucaacaaagugacacuggccgacgccggcuucaucaagcaguauggcgauugucugggcgacauugccgccagggaucugauuugcgcccagaaguuuaacggacugacagugcugccuccucugcugaccgaugagaugaucgcccaguacacaucugcccugcuggccggcacaaucacaagcggcuggacauuuggagcaggcgccgcucugcagauccccuuugcuaugcagauggccuaccgguucaacggcaucggagugacccagaaugugcuguacgagaaccagaagcugaucgccaaccaguucaacagcgccaucggcaagauccaggacagccugagcagcacagcaagcgcccugggaaagcugcaggacguggucaaccagaaugcccaggcacugaacacccuggucaagcagcuguccuccaacuucggcgccaucagcucugugcugaacgauauccugagcagacuggacccuccugaggccgaggugcagaucgacagacugaucacaggcagacugcagagccuccagacauacgugacccagcagcugaucagagccgccgagauuagagccucugccaaucuggccgccaccaagaugucugagugugugcugggccagagcaagagaguggacuuuugcggcaagggcuaccaccugaugagcuucccucagucugccccucacggcgugguguuucugcacgugacauaugugcccgcucaagagaagaauuucaccaccgcuccagccaucugccacgacggcaaagcccacuuuccuagagaaggcguguucguguccaacggcacccauugguucgugacacagcggaacuucuacgagccccagaucaucaccaccgacaacaccuucgugucuggcaacugcgacgucgugaucggcauugugaacaauaccguguacgacccucugcagcccgagcuggacagcuucaaagaggaacuggacaaguacuuuaagaaccacacaagccccgacguggaccugggcgauaucagcggaaucaaugccagcgucgugaacauccagaaagagaucgaccggcugaacgagguggccaagaaucugaacgagagccugaucgaccugcaagaacuggggaaguacgagcaguacaucaaguggcccugguacaucuggcugggcuuuaucgccggacugauugccaucgugauggucacaaucaugcuguguugcaugaccagcugcuguagcugccugaagggcuguuguagcuguggcagcugcugcaaguucgacgaggacgauucugagcccgugcugaagggcgugaaacugcacuacacaugaggacuagucccuguucccagagcccacuuuuuuuucuuuuuuugaaauaaaauagccugucuuucagaucucaaaggcucuuuucagagccaccaaaaaaaaaaaaaaaaaaaaaaaaaaaaaaaaaaaaaaaaaaaaaaaaaaaaaaaaaaaaaaaaaaaaaaaaaaaaaaaaaaaaaaaaaaaaaaaaaaaaa

SEQ ID NO: 23610 - RNA, 4094 nt, Artificial Sequence
  SARS-CoV-2/Wuhan/WIV05/2019__EPI_ISL_402128 spike protein mRNA gc mod (1-1273)(K986P_V987P_N439K_D614G)
aggagagucccgcagucggcguccagcggcucugcuuguucgugugugugucguugcaggccuuauucaagcuuaccauguucguguuccuggugcugcugccucugguguccagccagugugugaaccugaccaccagaacacagcugccuccagccuacaccaacagcuuuaccagaggcguguacuaccccgacaagguguucagauccagcgugcugcacucuacccaggaccuguuccugccuuucuucagcaacgugaccugguuccacgccauccacguguccggcaccaauggcaccaagagauucgacaaccccgugcugcccuucaacgacgggguguacuuugccagcaccgagaaguccaacaucaucagaggcuggaucuucggcaccacacuggacagcaagacccagagccugcugaucgugaacaacgccaccaacguggucaucaaagugugcgaguuccaguucugcaacgaccccuuccugggcgucuacuaccacaagaacaacaagagcuggauggaaagcgaguuccggguguacagcagcgccaacaacugcaccuucgaguacgugucccagccuuuccugauggaccuggaaggcaagcagggcaacuucaagaaccugcgcgaguucguguuuaagaacaucgacggcuacuucaagaucuacagcaagcacaccccuaucaaccucgugcgggaucugccucagggcuucucugcucuggaaccccugguggaucugcccaucggcaucaacaucacccgguuucagacacugcuggcccugcacagaagcuaccugacaccuggcgauagcagcagcggauggacagcuggugccgccgcuuacuaugugggcuaccugcagccuagaaccuuccugcugaaguacaacgagaacggcaccaucaccgacgccguggauugugcucuggauccucugagcgagacaaagugcacccugaaguccuucaccguggaaaagggcaucuaccagaccagcaacuuccgggugcagcccaccgaauccaucgugcgguuccccaauaucaccaaucugugccccuucggcgagguguucaaugccaccagauucgccucuguguacgccuggaaccggaagcggaucagcaauugcguggccgacuacuccgugcuguacaacuccgccagcuucagcaccuucaagugcuacggcguguccccuaccaagcugaacgaccugugcuucacaaacguguacgccgacagcuucgugauccggggagaugaagugcggcagauugccccuggacagacaggcaagaucgccgacuacaacuacaagcugcccgacgacuucaccggcugugugauugccuggaacagcaagaaccuggacuccaaagucggcggcaacuacaauuaccuguaccggcuguuccggaaguccaaucugaagcccuucgagcgggacaucuccaccgagaucuaucaggccggcagcaccccuuguaacggcguggaaggcuucaacugcuacuucccacugcaguccuacggcuuucagcccacaaauggcgugggcuaucagcccuacagagugguggugcugagcuucgaacugcugcaugccccugccacagugugcggcccuaagaaaagcaccaaucucgugaagaacaaaugcgugaacuucaacuucaacggccugaccggcaccggcgugcugacagagagcaacaagaaguuccugccauuccagcaguuuggccgggauaucgccgauaccacagacgccguuagagauccccagacacuggaaauccuggacaucaccccuugcagcuucggcggagugucugugaucaccccuggcaccaacaccagcaaucagguggcagugcuguaccagggcgugaacuguaccgaagugcccguggccauucacgccgaucagcugacaccuacauggcggguguacuccaccggcagcaauguguuucagaccagagccggcugucugaucggagccgagcacgugaacaauagcuacgagugcgacauccccaucggcgcuggaaucugcgccagcuaccagacacagacaaacagcccucggagagccagaagcguggccagccagagcaucauugccuacacaaugucucugggcgccgagaacagcguggccuacuccaacaacucuaucgcuauccccaccaacuucaccaucagcgugaccacagagauccugccuguguccaugaccaagaccagcguggacugcaccauguacaucugcggcgauuccaccgagugcuccaaccugcugcugcaguacggcagcuucugcacccagcugaauagagcccugacagggaucgccguggaacaggacaagaacacccaagagguguucgcccaagugaagcagaucuacaagaccccuccuaucaaggacuucggcggcuucaauuucagccagauucugcccgauccuagcaagcccagcaagcggagcuucaucgaggaccugcuguucaacaaagugacacuggccgacgccggcuucaucaagcaguauggcgauugucugggcgacauugccgccagggaucugauuugcgcccagaaguuuaacggacugacagugcugccuccucugcugaccgaugagaugaucgcccaguacacaucugcccugcuggccggcacaaucacaagcggcuggacauuuggagcaggcgccgcucugcagauccccuuugcuaugcagauggccuaccgguucaacggcaucggagugacccagaaugugcuguacgagaaccagaagcugaucgccaaccaguucaacagcgccaucggcaagauccaggacagccugagcagcacagcaagcgcccugggaaagcugcaggacguggucaaccagaaugcccaggcacugaacacccuggucaagcagcuguccuccaacuucggcgccaucagcucugugcugaacgauauccugagcagacuggacccuccugaggccgaggugcagaucgacagacugaucacaggcagacugcagagccuccagacauacgugacccagcagcugaucagagccgccgagauuagagccucugccaaucuggccgccaccaagaugucugagugugugcugggccagagcaagagaguggacuuuugcggcaagggcuaccaccugaugagcuucccucagucugccccucacggcgugguguuucugcacgugacauaugugcccgcucaagagaagaauuucaccaccgcuccagccaucugccacgacggcaaagcccacuuuccuagagaaggcguguucguguccaacggcacccauugguucgugacacagcggaacuucuacgagccccagaucaucaccaccgacaacaccuucgugucuggcaacugcgacgucgugaucggcauugugaacaauaccguguacgacccucugcagcccgagcuggacagcuucaaagaggaacuggacaaguacuuuaagaaccacacaagccccgacguggaccugggcgauaucagcggaaucaaugccagcgucgugaacauccagaaagagaucgaccggcugaacgagguggccaagaaucugaacgagagccugaucgaccugcaagaacuggggaaguacgagcaguacaucaaguggcccugguacaucuggcugggcuuuaucgccggacugauugccaucgugauggucacaaucaugcuguguugcaugaccagcugcuguagcugccugaagggcuguuguagcuguggcagcugcugcaaguucgacgaggacgauucugagcccgugcugaagggcgugaaacugcacuacacaugaggacuagucccuguucccagagcccacuuuuuuuucuuuuuuugaaauaaaauagccugucuuucagaucucaaaggcucuuuucagagccaccaaaaaaaaaaaaaaaaaaaaaaaaaaaaaaaaaaaaaaaaaaaaaaaaaaaaaaaaaaaaaaaaaaaaaaaaaaaaaaaaaaaaaaaaaaaaaaaaaaaaa

SEQ ID NO: 23611 - RNA, 4094 nt, Artificial Sequence
  SARS-CoV-2/Wuhan/WIV05/2019__EPI_ISL_402128 spike protein mRNA gc mod (1-1273)(K986P_V987P_S477N_D614G)
aggagagucccgcagucggcguccagcggcucugcuuguucgugugugugucguugcaggccuuauucaagcuuaccauguucguguuccuggugcugcugccucugguguccagccagugugugaaccugaccaccagaacacagcugccuccagccuacaccaacagcuuuaccagaggcguguacuaccccgacaagguguucagauccagcgugcugcacucuacccaggaccuguuccugccuuucuucagcaacgugaccugguuccacgccauccacguguccggcaccaauggcaccaagagauucgacaaccccgugcugcccuucaacgacgggguguacuuugccagcaccgagaaguccaacaucaucagaggcuggaucuucggcaccacacuggacagcaagacccagagccugcugaucgugaacaacgccaccaacguggucaucaaagugugcgaguuccaguucugcaacgaccccuuccugggcgucuacuaccacaagaacaacaagagcuggauggaaagcgaguuccggguguacagcagcgccaacaacugcaccuucgaguacgugucccagccuuuccugauggaccuggaaggcaagcagggcaacuucaagaaccugcgcgaguucguguuuaagaacaucgacggcuacuucaagaucuacagcaagcacaccccuaucaaccucgugcgggaucugccucagggcuucucugcucuggaaccccugguggaucugcccaucggcaucaacaucacccgguuucagacacugcuggcccugcacagaagcuaccugacaccuggcgauagcagcagcggauggacagcuggugccgccgcuuacuaugugggcuaccugcagccuagaaccuuccugcugaaguacaacgagaacggcaccaucaccgacgccguggauugugcucuggauccucugagcgagacaaagugcacccugaaguccuucaccguggaaaagggcaucuaccagaccagcaacuuccgggugcagcccaccgaauccaucgugcgguuccccaauaucaccaaucugugccccuucggcgagguguucaaugccaccagauucgccucuguguacgccuggaaccggaagcggaucagcaauugcguggccgacuacuccgugcuguacaacuccgccagcuucagcaccuucaagugcuacggcguguccccuaccaagcugaacgaccugugcuucacaaacguguacgccgacagcuucgugauccggggagaugaagugcggcagauugccccuggacagacaggcaagaucgccgacuacaacuacaagcugcccgacgacuucaccggcugugugauugccuggaacagcaacaaccuggacuccaaagucggcggcaacuacaauuaccuguaccggcuguuccggaaguccaaucugaagcccuucgagcgggacaucuccaccgagaucuaucaggccggcaacaccccuuguaacggcguggaaggcuucaacugcuacuucccacugcaguccuacggcuuucagcccacaaauggcgugggcuaucagcccuacagagugguggugcugagcuucgaacugcugcaugccccugccacagugugcggcccuaagaaaagcaccaaucucgugaagaacaaaugcgugaacuucaacuucaacggccugaccggcaccggcgugcugacagagagcaacaagaaguuccugccauuccagcaguuuggccgggauaucgccgauaccacagacgccguuagagauccccagacacuggaaauccuggacaucaccccuugcagcuucggcggagugucugugaucaccccuggcaccaacaccagcaaucagguggcagugcuguaccagggcgugaacuguaccgaagugcccguggccauucacgccgaucagcugacaccuacauggcggguguacuccaccggcagcaauguguuucagaccagagccggcugucugaucggagccgagcacgugaacaauagcuacgagugcgacauccccaucggcgcuggaaucugcgccagcuaccagacacagacaaacagcccucggagagccagaagcguggccagccagagcaucauugccuacacaaugucucugggcgccgagaacagcguggccuacuccaacaacucuaucgcuauccccaccaacuucaccaucagcgugaccacagagauccugccuguguccaugaccaagaccagcguggacugcaccauguacaucugcggcgauuccaccgagugcuccaaccugcugcugcaguacggcagcuucugcacccagcugaauagagcccugacagggaucgccguggaacaggacaagaacacccaagagguguucgcccaagugaagcagaucuacaagaccccuccuaucaaggacuucggcggcuucaauuucagccagauucugcccgauccuagcaagcccagcaagcggagcuucaucgaggaccugcuguucaacaaagugacacuggccgacgccggcuucaucaagcaguauggcgauugucugggcgacauugccgccagggaucugauuugcgcccagaaguuuaacggacugacagugcugccuccucugcugaccgaugagaugaucgcccaguacacaucugcccugcuggccggcacaaucacaagcggcuggacauuuggagcaggcgccgcucugcagauccccuuugcuaugcagauggccuaccgguucaacggcaucggagugacccagaaugugcuguacgagaaccagaagcugaucgccaaccaguucaacagcgccaucggcaagauccaggacagccugagcagcacagcaagcgcccugggaaagcugcaggacguggucaaccagaaugcccaggcacugaacacccuggucaagcagcuguccuccaacuucggcgccaucagcucugugcugaacgauauccugagcagacuggacccuccugaggccgaggugcagaucgacagacugaucacaggcagacugcagagccuccagacauacgugacccagcagcugaucagagccgccgagauuagagccucugccaaucuggccgccaccaagaugucugagugugugcugggccagagcaagagaguggacuuuugcggcaagggcuaccaccugaugagcuucccucagucugccccucacggcgugguguuucugcacgugacauaugugcccgcucaagagaagaauuucaccaccgcuccagccaucugccacgacggcaaagcccacuuuccuagagaaggcguguucguguccaacggcacccauugguucgugacacagcggaacuucuacgagccccagaucaucaccaccgacaacaccuucgugucuggcaacugcgacgucgugaucggcauugugaacaauaccguguacgacccucugcagcccgagcuggacagcuucaaagaggaacuggacaaguacuuuaagaaccacacaagccccgacguggaccugggcgauaucagcggaaucaaugccagcgucgugaacauccagaaagagaucgaccggcugaacgagguggccaagaaucugaacgagagccugaucgaccugcaagaacuggggaaguacgagcaguacaucaaguggcccugguacaucuggcugggcuuuaucgccggacugauugccaucgugauggucacaaucaugcuguguugcaugaccagcugcuguagcugccugaagggcuguuguagcuguggcagcugcugcaaguucgacgaggacgauucugagcccgugcugaagggcgugaaacugcacuacacaugaggacuagucccuguucccagagcccacuuuuuuuucuuuuuuugaaauaaaauagccugucuuucagaucucaaaggcucuuuucagagccaccaaaaaaaaaaaaaaaaaaaaaaaaaaaaaaaaaaaaaaaaaaaaaaaaaaaaaaaaaaaaaaaaaaaaaaaaaaaaaaaaaaaaaaaaaaaaaaaaaaaaa

SEQ ID NO: 23612 - RNA, 4094 nt, Artificial Sequence
  SARS-CoV-2/Wuhan/WIV05/2019__EPI_ISL_402128 spike protein mRNA gc mod (1-1273)(K986P_V987P_N501Y_D614G)
aggagagucccgcagucggcguccagcggcucugcuuguucgugugugugucguugcaggccuuauucaagcuuaccauguucguguuccuggugcugcugccucugguguccagccagugugugaaccugaccaccagaacacagcugccuccagccuacaccaacagcuuuaccagaggcguguacuaccccgacaagguguucagauccagcgugcugcacucuacccaggaccuguuccugccuuucuucagcaacgugaccugguuccacgccauccacguguccggcaccaauggcaccaagagauucgacaaccccgugcugcccuucaacgacgggguguacuuugccagcaccgagaaguccaacaucaucagaggcuggaucuucggcaccacacuggacagcaagacccagagccugcugaucgugaacaacgccaccaacguggucaucaaagugugcgaguuccaguucugcaacgaccccuuccugggcgucuacuaccacaagaacaacaagagcuggauggaaagcgaguuccggguguacagcagcgccaacaacugcaccuucgaguacgugucccagccuuuccugauggaccuggaaggcaagcagggcaacuucaagaaccugcgcgaguucguguuuaagaacaucgacggcuacuucaagaucuacagcaagcacaccccuaucaaccucgugcgggaucugccucagggcuucucugcucuggaaccccugguggaucugcccaucggcaucaacaucacccgguuucagacacugcuggcccugcacagaagcuaccugacaccuggcgauagcagcagcggauggacagcuggugccgccgcuuacuaugugggcuaccugcagccuagaaccuuccugcugaaguacaacgagaacggcaccaucaccgacgccguggauugugcucuggauccucugagcgagacaaagugcacccugaaguccuucaccguggaaaagggcaucuaccagaccagcaacuuccgggugcagcccaccgaauccaucgugcgguuccccaauaucaccaaucugugccccuucggcgagguguucaaugccaccagauucgccucuguguacgccuggaaccggaagcggaucagcaauugcguggccgacuacuccgugcuguacaacuccgccagcuucagcaccuucaagugcuacggcguguccccuaccaagcugaacgaccugugcuucacaaacguguacgccgacagcuucgugauccggggagaugaagugcggcagauugccccuggacagacaggcaagaucgccgacuacaacuacaagcugcccgacgacuucaccggcugugugauugccuggaacagcaacaaccuggacuccaaagucggcggcaacuacaauuaccuguaccggcuguuccggaaguccaaucugaagcccuucgagcgggacaucuccaccgagaucuaucaggccggcagcaccccuuguaacggcguggaaggcuucaacugcuacuucccacugcaguccuacggcuuucagcccacauacggcgugggcuaucagcccuacagagugguggugcugagcuucgaacugcugcaugccccugccacagugugcggcccuaagaaaagcaccaaucucgugaagaacaaaugcgugaacuucaacuucaacggccugaccggcaccggcgugcugacagagagcaacaagaaguuccugccauuccagcaguuuggccgggauaucgccgauaccacagacgccguuagagauccccagacacuggaaauccuggacaucaccccuugcagcuucggcggagugucugugaucaccccuggcaccaacaccagcaaucagguggcagugcuguaccagggcgugaacuguaccgaagugcccguggccauucacgccgaucagcugacaccuacauggcggguguacuccaccggcagcaauguguuucagaccagagccggcugucugaucggagccgagcacgugaacaauagcuacgagugcgacauccccaucggcgcuggaaucugcgccagcuaccagacacagacaaacagcccucggagagccagaagcguggccagccagagcaucauugccuacacaaugucucugggcgccgagaacagcguggccuacuccaacaacucuaucgcuauccccaccaacuucaccaucagcgugaccacagagauccugccuguguccaugaccaagaccagcguggacugcaccauguacaucugcggcgauuccaccgagugcuccaaccugcugcugcaguacggcagcuucugcacccagcugaauagagcccugacagggaucgccguggaacaggacaagaacacccaagagguguucgcccaagugaagcagaucuacaagaccccuccuaucaaggacuucggcggcuucaauuucagccagauucugcccgauccuagcaagcccagcaagcggagcuucaucgaggaccugcuguucaacaaagugacacuggccgacgccggcuucaucaagcaguauggcgauugucugggcgacauugccgccagggaucugauuugcgcccagaaguuuaacggacugacagugcugccuccucugcugaccgaugagaugaucgcccaguacacaucugcccugcuggccggcacaaucacaagcggcuggacauuuggagcaggcgccgcucugcagauccccuuugcuaugcagauggccuaccgguucaacggcaucggagugacccagaaugugcuguacgagaaccagaagcugaucgccaaccaguucaacagcgccaucggcaagauccaggacagccugagcagcacagcaagcgcccugggaaagcugcaggacguggucaaccagaaugcccaggcacugaacacccuggucaagcagcuguccuccaacuucggcgccaucagcucugugcugaacgauauccugagcagacuggacccuccugaggccgaggugcagaucgacagacugaucacaggcagacugcagagccuccagacauacgugacccagcagcugaucagagccgccgagauuagagccucugccaaucuggccgccaccaagaugucugagugugugcugggccagagcaagagaguggacuuuugcggcaagggcuaccaccugaugagcuucccucagucugccccucacggcgugguguuucugcacgugacauaugugcccgcucaagagaagaauuucaccaccgcuccagccaucugccacgacggcaaagcccacuuuccuagagaaggcguguucguguccaacggcacccauugguucgugacacagcggaacuucuacgagccccagaucaucaccaccgacaacaccuucgugucuggcaacugcgacgucgugaucggcauugugaacaauaccguguacgacccucugcagcccgagcuggacagcuucaaagaggaacuggacaaguacuuuaagaaccacacaagccccgacguggaccugggcgauaucagcggaaucaaugccagcgucgugaacauccagaaagagaucgaccggcugaacgagguggccaagaaucugaacgagagccugaucgaccugcaagaacuggggaaguacgagcaguacaucaaguggcccugguacaucuggcugggcuuuaucgccggacugauugccaucgugauggucacaaucaugcuguguugcaugaccagcugcuguagcugccugaagggcuguuguagcuguggcagcugcugcaaguucgacgaggacgauucugagcccgugcugaagggcgugaaacugcacuacacaugaggacuagucccuguucccagagcccacuuuuuuuucuuuuuuugaaauaaaauagccugucuuucagaucucaaaggcucuuuucagagccaccaaaaaaaaaaaaaaaaaaaaaaaaaaaaaaaaaaaaaaaaaaaaaaaaaaaaaaaaaaaaaaaaaaaaaaaaaaaaaaaaaaaaaaaaaaaaaaaaaaaaa

SEQ ID NO: 23613 - RNA, 4088 nt, Artificial Sequence
  SARS-CoV-2/Wuhan/WIV05/2019__EPI_ISL_402128 spike protein mRNA gc mod (1-1273)(K986P_V987P_H69del_V70del_D614G)
aggagagucccgcagucggcguccagcggcucugcuuguucgugugugugucguugcaggccuuauucaagcuuaccauguucguguuccuggugcugcugccucugguguccagccagugugugaaccugaccaccagaacacagcugccuccagccuacaccaacagcuuuaccagaggcguguacuaccccgacaagguguucagauccagcgugcugcacucuacccaggaccuguuccugccuuucuucagcaacgugaccugguuccacgccaucuccggcaccaauggcaccaagagauucgacaaccccgugcugcccuucaacgacgggguguacuuugccagcaccgagaaguccaacaucaucagaggcuggaucuucggcaccacacuggacagcaagacccagagccugcugaucgugaacaacgccaccaacguggucaucaaagugugcgaguuccaguucugcaacgaccccuuccugggcgucuacuaccacaagaacaacaagagcuggauggaaagcgaguuccggguguacagcagcgccaacaacugcaccuucgaguacgugucccagccuuuccugauggaccuggaaggcaagcagggcaacuucaagaaccugcgcgaguucguguuuaagaacaucgacggcuacuucaagaucuacagcaagcacaccccuaucaaccucgugcgggaucugccucagggcuucucugcucuggaaccccugguggaucugcccaucggcaucaacaucacccgguuucagacacugcuggcccugcacagaagcuaccugacaccuggcgauagcagcagcggauggacagcuggugccgccgcuuacuaugugggcuaccugcagccuagaaccuuccugcugaaguacaacgagaacggcaccaucaccgacgccguggauugugcucuggauccucugagcgagacaaagugcacccugaaguccuucaccguggaaaagggcaucuaccagaccagcaacuuccgggugcagcccaccgaauccaucgugcgguuccccaauaucaccaaucugugccccuucggcgagguguucaaugccaccagauucgccucuguguacgccuggaaccggaagcggaucagcaauugcguggccgacuacuccgugcuguacaacuccgccagcuucagcaccuucaagugcuacggcguguccccuaccaagcugaacgaccugugcuucacaaacguguacgccgacagcuucgugauccggggagaugaagugcggcagauugccccuggacagacaggcaagaucgccgacuacaacuacaagcugcccgacgacuucaccggcugugugauugccuggaacagcaacaaccuggacuccaaagucggcggcaacuacaauuaccuguaccggcuguuccggaaguccaaucugaagcccuucgagcgggacaucuccaccgagaucuaucaggccggcagcaccccuuguaacggcguggaaggcuucaacugcuacuucccacugcaguccuacggcuuucagcccacaaauggcgugggcuaucagcccuacagagugguggugcugagcuucgaacugcugcaugccccugccacagugugcggcccuaagaaaagcaccaaucucgugaagaacaaaugcgugaacuucaacuucaacggccugaccggcaccggcgugcugacagagagcaacaagaaguuccugccauuccagcaguuuggccgggauaucgccgauaccacagacgccguuagagauccccagacacuggaaauccuggacaucaccccuugcagcuucggcggagugucugugaucaccccuggcaccaacaccagcaaucagguggcagugcuguaccagggcgugaacuguaccgaagugcccguggccauucacgccgaucagcugacaccuacauggcggguguacuccaccggcagcaauguguuucagaccagagccggcugucugaucggagccgagcacgugaacaauagcuacgagugcgacauccccaucggcgcuggaaucugcgccagcuaccagacacagacaaacagcccucggagagccagaagcguggccagccagagcaucauugccuacacaaugucucugggcgccgagaacagcguggccuacuccaacaacucuaucgcuauccccaccaacuucaccaucagcgugaccacagagauccugccuguguccaugaccaagaccagcguggacugcaccauguacaucugcggcgauuccaccgagugcuccaaccugcugcugcaguacggcagcuucugcacccagcugaauagagcccugacagggaucgccguggaacaggacaagaacacccaagagguguucgcccaagugaagcagaucuacaagaccccuccuaucaaggacuucggcggcuucaauuucagccagauucugcccgauccuagcaagcccagcaagcggagcuucaucgaggaccugcuguucaacaaagugacacuggccgacgccggcuucaucaagcaguauggcgauugucugggcgacauugccgccagggaucugauuugcgcccagaaguuuaacggacugacagugcugccuccucugcugaccgaugagaugaucgcccaguacacaucugcccugcuggccggcacaaucacaagcggcuggacauuuggagcaggcgccgcucugcagauccccuuugcuaugcagauggccuaccgguucaacggcaucggagugacccagaaugugcuguacgagaaccagaagcugaucgccaaccaguucaacagcgccaucggcaagauccaggacagccugagcagcacagcaagcgcccugggaaagcugcaggacguggucaaccagaaugcccaggcacugaacacccuggucaagcagcuguccuccaacuucggcgccaucagcucugugcugaacgauauccugagcagacuggacccuccugaggccgaggugcagaucgacagacugaucacaggcagacugcagagccuccagacauacgugacccagcagcugaucagagccgccgagauuagagccucugccaaucuggccgccaccaagaugucugagugugugcugggccagagcaagagaguggacuuuugcggcaagggcuaccaccugaugagcuucccucagucugccccucacggcgugguguuucugcacgugacauaugugcccgcucaagagaagaauuucaccaccgcuccagccaucugccacgacggcaaagcccacuuuccuagagaaggcguguucguguccaacggcacccauugguucgugacacagcggaacuucuacgagccccagaucaucaccaccgacaacaccuucgugucuggcaacugcgacgucgugaucggcauugugaacaauaccguguacgacccucugcagcccgagcuggacagcuucaaagaggaacuggacaaguacuuuaagaaccacacaagccccgacguggaccugggcgauaucagcggaaucaaugccagcgucgugaacauccagaaagagaucgaccggcugaacgagguggccaagaaucugaacgagagccugaucgaccugcaagaacuggggaaguacgagcaguacaucaaguggcccugguacaucuggcugggcuuuaucgccggacugauugccaucgugauggucacaaucaugcuguguugcaugaccagcugcuguagcugccugaagggcuguuguagcuguggcagcugcugcaaguucgacgaggacgauucugagcccgugcugaagggcgugaaacugcacuacacaugaggacuagucccuguucccagagcccacuuuuuuuucuuuuuuugaaauaaaauagccugucuuucagaucucaaaggcucuuuucagagccaccaaaaaaaaaaaaaaaaaaaaaaaaaaaaaaaaaaaaaaaaaaaaaaaaaaaaaaaaaaaaaaaaaaaaaaaaaaaaaaaaaaaaaaaaaaaaaaaaaaaaa

SEQ ID NO: 23614 - RNA, 4094 nt, Artificial Sequence
  SARS-CoV-2/Wuhan/WIV05/2019__EPI_ISL_402128 spike protein mRNA gc mod (1-1273)(K986P_V987P_Y453F_D614G)
aggagagucccgcagucggcguccagcggcucugcuuguucgugugugugucguugcaggccuuauucaagcuuaccauguucguguuccuggugcugcugccucugguguccagccagugugugaaccugaccaccagaacacagcugccuccagccuacaccaacagcuuuaccagaggcguguacuaccccgacaagguguucagauccagcgugcugcacucuacccaggaccuguuccugccuuucuucagcaacgugaccugguuccacgccauccacguguccggcaccaauggcaccaagagauucgacaaccccgugcugcccuucaacgacgggguguacuuugccagcaccgagaaguccaacaucaucagaggcuggaucuucggcaccacacuggacagcaagacccagagccugcugaucgugaacaacgccaccaacguggucaucaaagugugcgaguuccaguucugcaacgaccccuuccugggcgucuacuaccacaagaacaacaagagcuggauggaaagcgaguuccggguguacagcagcgccaacaacugcaccuucgaguacgugucccagccuuuccugauggaccuggaaggcaagcagggcaacuucaagaaccugcgcgaguucguguuuaagaacaucgacggcuacuucaagaucuacagcaagcacaccccuaucaaccucgugcgggaucugccucagggcuucucugcucuggaaccccugguggaucugcccaucggcaucaacaucacccgguuucagacacugcuggcccugcacagaagcuaccugacaccuggcgauagcagcagcggauggacagcuggugccgccgcuuacuaugugggcuaccugcagccuagaaccuuccugcugaaguacaacgagaacggcaccaucaccgacgccguggauugugcucuggauccucugagcgagacaaagugcacccugaaguccuucaccguggaaaagggcaucuaccagaccagcaacuuccgggugcagcccaccgaauccaucgugcgguuccccaauaucaccaaucugugccccuucggcgagguguucaaugccaccagauucgccucuguguacgccuggaaccggaagcggaucagcaauugcguggccgacuacuccgugcuguacaacuccgccagcuucagcaccuucaagugcuacggcguguccccuaccaagcugaacgaccugugcuucacaaacguguacgccgacagcuucgugauccggggagaugaagugcggcagauugccccuggacagacaggcaagaucgccgacuacaacuacaagcugcccgacgacuucaccggcugugugauugccuggaacagcaacaaccuggacuccaaagucggcggcaacuacaauuaccuguuccggcuguuccggaaguccaaucugaagcccuucgagcgggacaucuccaccgagaucuaucaggccggcagcaccccuuguaacggcguggaaggcuucaacugcuacuucccacugcaguccuacggcuuucagcccacaaauggcgugggcuaucagcccuacagagugguggugcugagcuucgaacugcugcaugccccugccacagugugcggcccuaagaaaagcaccaaucucgugaagaacaaaugcgugaacuucaacuucaacggccugaccggcaccggcgugcugacagagagcaacaagaaguuccugccauuccagcaguuuggccgggauaucgccgauaccacagacgccguuagagauccccagacacuggaaauccuggacaucaccccuugcagcuucggcggagugucugugaucaccccuggcaccaacaccagcaaucagguggcagugcuguaccagggcgugaacuguaccgaagugcccguggccauucacgccgaucagcugacaccuacauggcggguguacuccaccggcagcaauguguuucagaccagagccggcugucugaucggagccgagcacgugaacaauagcuacgagugcgacauccccaucggcgcuggaaucugcgccagcuaccagacacagacaaacagcccucggagagccagaagcguggccagccagagcaucauugccuacacaaugucucugggcgccgagaacagcguggccuacuccaacaacucuaucgcuauccccaccaacuucaccaucagcgugaccacagagauccugccuguguccaugaccaagaccagcguggacugcaccauguacaucugcggcgauuccaccgagugcuccaaccugcugcugcaguacggcagcuucugcacccagcugaauagagcccugacagggaucgccguggaacaggacaagaacacccaagagguguucgcccaagugaagcagaucuacaagaccccuccuaucaaggacuucggcggcuucaauuucagccagauucugcccgauccuagcaagcccagcaagcggagcuucaucgaggaccugcuguucaacaaagugacacuggccgacgccggcuucaucaagcaguauggcgauugucugggcgacauugccgccagggaucugauuugcgcccagaaguuuaacggacugacagugcugccuccucugcugaccgaugagaugaucgcccaguacacaucugcccugcuggccggcacaaucacaagcggcuggacauuuggagcaggcgccgcucugcagauccccuuugcuaugcagauggccuaccgguucaacggcaucggagugacccagaaugugcuguacgagaaccagaagcugaucgccaaccaguucaacagcgccaucggcaagauccaggacagccugagcagcacagcaagcgcccugggaaagcugcaggacguggucaaccagaaugcccaggcacugaacacccuggucaagcagcuguccuccaacuucggcgccaucagcucugugcugaacgauauccugagcagacuggacccuccugaggccgaggugcagaucgacagacugaucacaggcagacugcagagccuccagacauacgugacccagcagcugaucagagccgccgagauuagagccucugccaaucuggccgccaccaagaugucugagugugugcugggccagagcaagagaguggacuuuugcggcaagggcuaccaccugaugagcuucccucagucugccccucacggcgugguguuucugcacgugacauaugugcccgcucaagagaagaauuucaccaccgcuccagccaucugccacgacggcaaagcccacuuuccuagagaaggcguguucguguccaacggcacccauugguucgugacacagcggaacuucuacgagccccagaucaucaccaccgacaacaccuucgugucuggcaacugcgacgucgugaucggcauugugaacaauaccguguacgacccucugcagcccgagcuggacagcuucaaagaggaacuggacaaguacuuuaagaaccacacaagccccgacguggaccugggcgauaucagcggaaucaaugccagcgucgugaacauccagaaagagaucgaccggcugaacgagguggccaagaaucugaacgagagccugaucgaccugcaagaacuggggaaguacgagcaguacaucaaguggcccugguacaucuggcugggcuuuaucgccggacugauugccaucgugauggucacaaucaugcuguguugcaugaccagcugcuguagcugccugaagggcuguuguagcuguggcagcugcugcaaguucgacgaggacgauucugagcccgugcugaagggcgugaaacugcacuacacaugaggacuagucccuguucccagagcccacuuuuuuuucuuuuuuugaaauaaaauagccugucuuucagaucucaaaggcucuuuucagagccaccaaaaaaaaaaaaaaaaaaaaaaaaaaaaaaaaaaaaaaaaaaaaaaaaaaaaaaaaaaaaaaaaaaaaaaaaaaaaaaaaaaaaaaaaaaaaaaaaaaaaa

SEQ ID NO: 23615 - RNA, 4094 nt, Artificial Sequence
  SARS-CoV-2/Wuhan/WIV05/2019__EPI_ISL_402128 spike protein mRNA gc mod (1-1273)(K986P_V987P_D614G_I692V)
aggagagucccgcagucggcguccagcggcucugcuuguucgugugugugucguugcaggccuuauucaagcuuaccauguucguguuccuggugcugcugccucugguguccagccagugugugaaccugaccaccagaacacagcugccuccagccuacaccaacagcuuuaccagaggcguguacuaccccgacaagguguucagauccagcgugcugcacucuacccaggaccuguuccugccuuucuucagcaacgugaccugguuccacgccauccacguguccggcaccaauggcaccaagagauucgacaaccccgugcugcccuucaacgacgggguguacuuugccagcaccgagaaguccaacaucaucagaggcuggaucuucggcaccacacuggacagcaagacccagagccugcugaucgugaacaacgccaccaacguggucaucaaagugugcgaguuccaguucugcaacgaccccuuccugggcgucuacuaccacaagaacaacaagagcuggauggaaagcgaguuccggguguacagcagcgccaacaacugcaccuucgaguacgugucccagccuuuccugauggaccuggaaggcaagcagggcaacuucaagaaccugcgcgaguucguguuuaagaacaucgacggcuacuucaagaucuacagcaagcacaccccuaucaaccucgugcgggaucugccucagggcuucucugcucuggaaccccugguggaucugcccaucggcaucaacaucacccgguuucagacacugcuggcccugcacagaagcuaccugacaccuggcgauagcagcagcggauggacagcuggugccgccgcuuacuaugugggcuaccugcagccuagaaccuuccugcugaaguacaacgagaacggcaccaucaccgacgccguggauugugcucuggauccucugagcgagacaaagugcacccugaaguccuucaccguggaaaagggcaucuaccagaccagcaacuuccgggugcagcccaccgaauccaucgugcgguuccccaauaucaccaaucugugccccuucggcgagguguucaaugccaccagauucgccucuguguacgccuggaaccggaagcggaucagcaauugcguggccgacuacuccgugcuguacaacuccgccagcuucagcaccuucaagugcuacggcguguccccuaccaagcugaacgaccugugcuucacaaacguguacgccgacagcuucgugauccggggagaugaagugcggcagauugccccuggacagacaggcaagaucgccgacuacaacuacaagcugcccgacgacuucaccggcugugugauugccuggaacagcaacaaccuggacuccaaagucggcggcaacuacaauuaccuguaccggcuguuccggaaguccaaucugaagcccuucgagcgggacaucuccaccgagaucuaucaggccggcagcaccccuuguaacggcguggaaggcuucaacugcuacuucccacugcaguccuacggcuuucagcccacaaauggcgugggcuaucagcccuacagagugguggugcugagcuucgaacugcugcaugccccugccacagugugcggcccuaagaaaagcaccaaucucgugaagaacaaaugcgugaacuucaacuucaacggccugaccggcaccggcgugcugacagagagcaacaagaaguuccugccauuccagcaguuuggccgggauaucgccgauaccacagacgccguuagagauccccagacacuggaaauccuggacaucaccccuugcagcuucggcggagugucugugaucaccccuggcaccaacaccagcaaucagguggcagugcuguaccagggcgugaacuguaccgaagugcccguggccauucacgccgaucagcugacaccuacauggcggguguacuccaccggcagcaauguguuucagaccagagccggcugucugaucggagccgagcacgugaacaauagcuacgagugcgacauccccaucggcgcuggaaucugcgccagcuaccagacacagacaaacagcccucggagagccagaagcguggccagccagagcgugauugccuacacaaugucucugggcgccgagaacagcguggccuacuccaacaacucuaucgcuauccccaccaacuucaccaucagcgugaccacagagauccugccuguguccaugaccaagaccagcguggacugcaccauguacaucugcggcgauuccaccgagugcuccaaccugcugcugcaguacggcagcuucugcacccagcugaauagagcccugacagggaucgccguggaacaggacaagaacacccaagagguguucgcccaagugaagcagaucuacaagaccccuccuaucaaggacuucggcggcuucaauuucagccagauucugcccgauccuagcaagcccagcaagcggagcuucaucgaggaccugcuguucaacaaagugacacuggccgacgccggcuucaucaagcaguauggcgauugucugggcgacauugccgccagggaucugauuugcgcccagaaguuuaacggacugacagugcugccuccucugcugaccgaugagaugaucgcccaguacacaucugcccugcuggccggcacaaucacaagcggcuggacauuuggagcaggcgccgcucugcagauccccuuugcuaugcagauggccuaccgguucaacggcaucggagugacccagaaugugcuguacgagaaccagaagcugaucgccaaccaguucaacagcgccaucggcaagauccaggacagccugagcagcacagcaagcgcccugggaaagcugcaggacguggucaaccagaaugcccaggcacugaacacccuggucaagcagcuguccuccaacuucggcgccaucagcucugugcugaacgauauccugagcagacuggacccuccugaggccgaggugcagaucgacagacugaucacaggcagacugcagagccuccagacauacgugacccagcagcugaucagagccgccgagauuagagccucugccaaucuggccgccaccaagaugucugagugugugcugggccagagcaagagaguggacuuuugcggcaagggcuaccaccugaugagcuucccucagucugccccucacggcgugguguuucugcacgugacauaugugcccgcucaagagaagaauuucaccaccgcuccagccaucugccacgacggcaaagcccacuuuccuagagaaggcguguucguguccaacggcacccauugguucgugacacagcggaacuucuacgagccccagaucaucaccaccgacaacaccuucgugucuggcaacugcgacgucgugaucggcauugugaacaauaccguguacgacccucugcagcccgagcuggacagcuucaaagaggaacuggacaaguacuuuaagaaccacacaagccccgacguggaccugggcgauaucagcggaaucaaugccagcgucgugaacauccagaaagagaucgaccggcugaacgagguggccaagaaucugaacgagagccugaucgaccugcaagaacuggggaaguacgagcaguacaucaaguggcccugguacaucuggcugggcuuuaucgccggacugauugccaucgugauggucacaaucaugcuguguugcaugaccagcugcuguagcugccugaagggcuguuguagcuguggcagcugcugcaaguucgacgaggacgauucugagcccgugcugaagggcgugaaacugcacuacacaugaggacuagucccuguucccagagcccacuuuuuuuucuuuuuuugaaauaaaauagccugucuuucagaucucaaaggcucuuuucagagccaccaaaaaaaaaaaaaaaaaaaaaaaaaaaaaaaaaaaaaaaaaaaaaaaaaaaaaaaaaaaaaaaaaaaaaaaaaaaaaaaaaaaaaaaaaaaaaaaaaaaaa

SEQ ID NO: 23616 - RNA, 4094 nt, Artificial Sequence
  SARS-CoV-2/Wuhan/WIV05/2019__EPI_ISL_402128 spike protein mRNA gc mod (1-1273)(K986P_V987P_D614G_M1229I)
aggagagucccgcagucggcguccagcggcucugcuuguucgugugugugucguugcaggccuuauucaagcuuaccauguucguguuccuggugcugcugccucugguguccagccagugugugaaccugaccaccagaacacagcugccuccagccuacaccaacagcuuuaccagaggcguguacuaccccgacaagguguucagauccagcgugcugcacucuacccaggaccuguuccugccuuucuucagcaacgugaccugguuccacgccauccacguguccggcaccaauggcaccaagagauucgacaaccccgugcugcccuucaacgacgggguguacuuugccagcaccgagaaguccaacaucaucagaggcuggaucuucggcaccacacuggacagcaagacccagagccugcugaucgugaacaacgccaccaacguggucaucaaagugugcgaguuccaguucugcaacgaccccuuccugggcgucuacuaccacaagaacaacaagagcuggauggaaagcgaguuccggguguacagcagcgccaacaacugcaccuucgaguacgugucccagccuuuccugauggaccuggaaggcaagcagggcaacuucaagaaccugcgcgaguucguguuuaagaacaucgacggcuacuucaagaucuacagcaagcacaccccuaucaaccucgugcgggaucugccucagggcuucucugcucuggaaccccugguggaucugcccaucggcaucaacaucacccgguuucagacacugcuggcccugcacagaagcuaccugacaccuggcgauagcagcagcggauggacagcuggugccgccgcuuacuaugugggcuaccugcagccuagaaccuuccugcugaaguacaacgagaacggcaccaucaccgacgccguggauugugcucuggauccucugagcgagacaaagugcacccugaaguccuucaccguggaaaagggcaucuaccagaccagcaacuuccgggugcagcccaccgaauccaucgugcgguuccccaauaucaccaaucugugccccuucggcgagguguucaaugccaccagauucgccucuguguacgccuggaaccggaagcggaucagcaauugcguggccgacuacuccgugcuguacaacuccgccagcuucagcaccuucaagugcuacggcguguccccuaccaagcugaacgaccugugcuucacaaacguguacgccgacagcuucgugauccggggagaugaagugcggcagauugccccuggacagacaggcaagaucgccgacuacaacuacaagcugcccgacgacuucaccggcugugugauugccuggaacagcaacaaccuggacuccaaagucggcggcaacuacaauuaccuguaccggcuguuccggaaguccaaucugaagcccuucgagcgggacaucuccaccgagaucuaucaggccggcagcaccccuuguaacggcguggaaggcuucaacugcuacuucccacugcaguccuacggcuuucagcccacaaauggcgugggcuaucagcccuacagagugguggugcugagcuucgaacugcugcaugccccugccacagugugcggcccuaagaaaagcaccaaucucgugaagaacaaaugcgugaacuucaacuucaacggccugaccggcaccggcgugcugacagagagcaacaagaaguuccugccauuccagcaguuuggccgggauaucgccgauaccacagacgccguuagagauccccagacacuggaaauccuggacaucaccccuugcagcuucggcggagugucugugaucaccccuggcaccaacaccagcaaucagguggcagugcuguaccagggcgugaacuguaccgaagugcccguggccauucacgccgaucagcugacaccuacauggcggguguacuccaccggcagcaauguguuucagaccagagccggcugucugaucggagccgagcacgugaacaauagcuacgagugcgacauccccaucggcgcuggaaucugcgccagcuaccagacacagacaaacagcccucggagagccagaagcguggccagccagagcaucauugccuacacaaugucucugggcgccgagaacagcguggccuacuccaacaacucuaucgcuauccccaccaacuucaccaucagcgugaccacagagauccugccuguguccaugaccaagaccagcguggacugcaccauguacaucugcggcgauuccaccgagugcuccaaccugcugcugcaguacggcagcuucugcacccagcugaauagagcccugacagggaucgccguggaacaggacaagaacacccaagagguguucgcccaagugaagcagaucuacaagaccccuccuaucaaggacuucggcggcuucaauuucagccagauucugcccgauccuagcaagcccagcaagcggagcuucaucgaggaccugcuguucaacaaagugacacuggccgacgccggcuucaucaagcaguauggcgauugucugggcgacauugccgccagggaucugauuugcgcccagaaguuuaacggacugacagugcugccuccucugcugaccgaugagaugaucgcccaguacacaucugcccugcuggccggcacaaucacaagcggcuggacauuuggagcaggcgccgcucugcagauccccuuugcuaugcagauggccuaccgguucaacggcaucggagugacccagaaugugcuguacgagaaccagaagcugaucgccaaccaguucaacagcgccaucggcaagauccaggacagccugagcagcacagcaagcgcccugggaaagcugcaggacguggucaaccagaaugcccaggcacugaacacccuggucaagcagcuguccuccaacuucggcgccaucagcucugugcugaacgauauccugagcagacuggacccuccugaggccgaggugcagaucgacagacugaucacaggcagacugcagagccuccagacauacgugacccagcagcugaucagagccgccgagauuagagccucugccaaucuggccgccaccaagaugucugagugugugcugggccagagcaagagaguggacuuuugcggcaagggcuaccaccugaugagcuucccucagucugccccucacggcgugguguuucugcacgugacauaugugcccgcucaagagaagaauuucaccaccgcuccagccaucugccacgacggcaaagcccacuuuccuagagaaggcguguucguguccaacggcacccauugguucgugacacagcggaacuucuacgagccccagaucaucaccaccgacaacaccuucgugucuggcaacugcgacgucgugaucggcauugugaacaauaccguguacgacccucugcagcccgagcuggacagcuucaaagaggaacuggacaaguacuuuaagaaccacacaagccccgacguggaccugggcgauaucagcggaaucaaugccagcgucgugaacauccagaaagagaucgaccggcugaacgagguggccaagaaucugaacgagagccugaucgaccugcaagaacuggggaaguacgagcaguacaucaaguggcccugguacaucuggcugggcuuuaucgccggacugauugccaucgugaucgucacaaucaugcuguguugcaugaccagcugcuguagcugccugaagggcuguuguagcuguggcagcugcugcaaguucgacgaggacgauucugagcccgugcugaagggcgugaaacugcacuacacaugaggacuagucccuguucccagagcccacuuuuuuuucuuuuuuugaaauaaaauagccugucuuucagaucucaaaggcucuuuucagagccaccaaaaaaaaaaaaaaaaaaaaaaaaaaaaaaaaaaaaaaaaaaaaaaaaaaaaaaaaaaaaaaaaaaaaaaaaaaaaaaaaaaaaaaaaaaaaaaaaaaaaa

SEQ ID NO: 23617 - RNA, 4088 nt, Artificial Sequence
  SARS-CoV-2/Wuhan/WIV05/2019__EPI_ISL_402128 spike protein mRNA gc mod (1-1273)(K986P_V987P_H69del_V70del_A222V_Y453F_S477N_D614G_I692V)
aggagagucccgcagucggcguccagcggcucugcuuguucgugugugugucguugcaggccuuauucaagcuuaccauguucguguuccuggugcugcugccucugguguccagccagugugugaaccugaccaccagaacacagcugccuccagccuacaccaacagcuuuaccagaggcguguacuaccccgacaagguguucagauccagcgugcugcacucuacccaggaccuguuccugccuuucuucagcaacgugaccugguuccacgccaucuccggcaccaauggcaccaagagauucgacaaccccgugcugcccuucaacgacgggguguacuuugccagcaccgagaaguccaacaucaucagaggcuggaucuucggcaccacacuggacagcaagacccagagccugcugaucgugaacaacgccaccaacguggucaucaaagugugcgaguuccaguucugcaacgaccccuuccugggcgucuacuaccacaagaacaacaagagcuggauggaaagcgaguuccggguguacagcagcgccaacaacugcaccuucgaguacgugucccagccuuuccugauggaccuggaaggcaagcagggcaacuucaagaaccugcgcgaguucguguuuaagaacaucgacggcuacuucaagaucuacagcaagcacaccccuaucaaccucgugcgggaucugccucagggcuucucugugcuggaaccccugguggaucugcccaucggcaucaacaucacccgguuucagacacugcuggcccugcacagaagcuaccugacaccuggcgauagcagcagcggauggacagcuggugccgccgcuuacuaugugggcuaccugcagccuagaaccuuccugcugaaguacaacgagaacggcaccaucaccgacgccguggauugugcucuggauccucugagcgagacaaagugcacccugaaguccuucaccguggaaaagggcaucuaccagaccagcaacuuccgggugcagcccaccgaauccaucgugcgguuccccaauaucaccaaucugugccccuucggcgagguguucaaugccaccagauucgccucuguguacgccuggaaccggaagcggaucagcaauugcguggccgacuacuccgugcuguacaacuccgccagcuucagcaccuucaagugcuacggcguguccccuaccaagcugaacgaccugugcuucacaaacguguacgccgacagcuucgugauccggggagaugaagugcggcagauugccccuggacagacaggcaagaucgccgacuacaacuacaagcugcccgacgacuucaccggcugugugauugccuggaacagcaacaaccuggacuccaaagucggcggcaacuacaauuaccuguuccggcuguuccggaaguccaaucugaagcccuucgagcgggacaucuccaccgagaucuaucaggccggcaacaccccuuguaacggcguggaaggcuucaacugcuacuucccacugcaguccuacggcuuucagcccacaaauggcgugggcuaucagcccuacagagugguggugcugagcuucgaacugcugcaugccccugccacagugugcggcccuaagaaaagcaccaaucucgugaagaacaaaugcgugaacuucaacuucaacggccugaccggcaccggcgugcugacagagagcaacaagaaguuccugccauuccagcaguuuggccgggauaucgccgauaccacagacgccguuagagauccccagacacuggaaauccuggacaucaccccuugcagcuucggcggagugucugugaucaccccuggcaccaacaccagcaaucagguggcagugcuguaccagggcgugaacuguaccgaagugcccguggccauucacgccgaucagcugacaccuacauggcggguguacuccaccggcagcaauguguuucagaccagagccggcugucugaucggagccgagcacgugaacaauagcuacgagugcgacauccccaucggcgcuggaaucugcgccagcuaccagacacagacaaacagcccucggagagccagaagcguggccagccagagcgugauugccuacacaaugucucugggcgccgagaacagcguggccuacuccaacaacucuaucgcuauccccaccaacuucaccaucagcgugaccacagagauccugccuguguccaugaccaagaccagcguggacugcaccauguacaucugcggcgauuccaccgagugcuccaaccugcugcugcaguacggcagcuucugcacccagcugaauagagcccugacagggaucgccguggaacaggacaagaacacccaagagguguucgcccaagugaagcagaucuacaagaccccuccuaucaaggacuucggcggcuucaauuucagccagauucugcccgauccuagcaagcccagcaagcggagcuucaucgaggaccugcuguucaacaaagugacacuggccgacgccggcuucaucaagcaguauggcgauugucugggcgacauugccgccagggaucugauuugcgcccagaaguuuaacggacugacagugcugccuccucugcugaccgaugagaugaucgcccaguacacaucugcccugcuggccggcacaaucacaagcggcuggacauuuggagcaggcgccgcucugcagauccccuuugcuaugcagauggccuaccgguucaacggcaucggagugacccagaaugugcuguacgagaaccagaagcugaucgccaaccaguucaacagcgccaucggcaagauccaggacagccugagcagcacagcaagcgcccugggaaagcugcaggacguggucaaccagaaugcccaggcacugaacacccuggucaagcagcuguccuccaacuucggcgccaucagcucugugcugaacgauauccugagcagacuggacccuccugaggccgaggugcagaucgacagacugaucacaggcagacugcagagccuccagacauacgugacccagcagcugaucagagccgccgagauuagagccucugccaaucuggccgccaccaagaugucugagugugugcugggccagagcaagagaguggacuuuugcggcaagggcuaccaccugaugagcuucccucagucugccccucacggcgugguguuucugcacgugacauaugugcccgcucaagagaagaauuucaccaccgcuccagccaucugccacgacggcaaagcccacuuuccuagagaaggcguguucguguccaacggcacccauugguucgugacacagcggaacuucuacgagccccagaucaucaccaccgacaacaccuucgugucuggcaacugcgacgucgugaucggcauugugaacaauaccguguacgacccucugcagcccgagcuggacagcuucaaagaggaacuggacaaguacuuuaagaaccacacaagccccgacguggaccugggcgauaucagcggaaucaaugccagcgucgugaacauccagaaagagaucgaccggcugaacgagguggccaagaaucugaacgagagccugaucgaccugcaagaacuggggaaguacgagcaguacaucaaguggcccugguacaucuggcugggcuuuaucgccggacugauugccaucgugauggucacaaucaugcuguguugcaugaccagcugcuguagcugccugaagggcuguuguagcuguggcagcugcugcaaguucgacgaggacgauucugagcccgugcugaagggcgugaaacugcacuacacaugaggacuagucccuguucccagagcccacuuuuuuuucuuuuuuugaaauaaaauagccugucuuucagaucucaaaggcucuuuucagagccaccaaaaaaaaaaaaaaaaaaaaaaaaaaaaaaaaaaaaaaaaaaaaaaaaaaaaaaaaaaaaaaaaaaaaaaaaaaaaaaaaaaaaaaaaaaaaaaaaaaaaa

SEQ ID NO: 23618 - RNA, 4088 nt, Artificial Sequence
  SARS-CoV-2/Wuhan/WIV05/2019__EPI_ISL_402128 spike protein mRNA gc mod (1-1273)(K986P_V987P_H69del_V70del_Y453F_D614G_I692V_M1229I)
aggagagucccgcagucggcguccagcggcucugcuuguucgugugugugucguugcaggccuuauucaagcuuaccauguucguguuccuggugcugcugccucugguguccagccagugugugaaccugaccaccagaacacagcugccuccagccuacaccaacagcuuuaccagaggcguguacuaccccgacaagguguucagauccagcgugcugcacucuacccaggaccuguuccugccuuucuucagcaacgugaccugguuccacgccaucuccggcaccaauggcaccaagagauucgacaaccccgugcugcccuucaacgacgggguguacuuugccagcaccgagaaguccaacaucaucagaggcuggaucuucggcaccacacuggacagcaagacccagagccugcugaucgugaacaacgccaccaacguggucaucaaagugugcgaguuccaguucugcaacgaccccuuccugggcgucuacuaccacaagaacaacaagagcuggauggaaagcgaguuccggguguacagcagcgccaacaacugcaccuucgaguacgugucccagccuuuccugauggaccuggaaggcaagcagggcaacuucaagaaccugcgcgaguucguguuuaagaacaucgacggcuacuucaagaucuacagcaagcacaccccuaucaaccucgugcgggaucugccucagggcuucucugcucuggaaccccugguggaucugcccaucggcaucaacaucacccgguuucagacacugcuggcccugcacagaagcuaccugacaccuggcgauagcagcagcggauggacagcuggugccgccgcuuacuaugugggcuaccugcagccuagaaccuuccugcugaaguacaacgagaacggcaccaucaccgacgccguggauugugcucuggauccucugagcgagacaaagugcacccugaaguccuucaccguggaaaagggcaucuaccagaccagcaacuuccgggugcagcccaccgaauccaucgugcgguuccccaauaucaccaaucugugccccuucggcgagguguucaaugccaccagauucgccucuguguacgccuggaaccggaagcggaucagcaauugcguggccgacuacuccgugcuguacaacuccgccagcuucagcaccuucaagugcuacggcguguccccuaccaagcugaacgaccugugcuucacaaacguguacgccgacagcuucgugauccggggagaugaagugcggcagauugccccuggacagacaggcaagaucgccgacuacaacuacaagcugcccgacgacuucaccggcugugugauugccuggaacagcaacaaccuggacuccaaagucggcggcaacuacaauuaccuguuccggcuguuccggaaguccaaucugaagcccuucgagcgggacaucuccaccgagaucuaucaggccggcagcaccccuuguaacggcguggaaggcuucaacugcuacuucccacugcaguccuacggcuuucagcccacaaauggcgugggcuaucagcccuacagagugguggugcugagcuucgaacugcugcaugccccugccacagugugcggcccuaagaaaagcaccaaucucgugaagaacaaaugcgugaacuucaacuucaacggccugaccggcaccggcgugcugacagagagcaacaagaaguuccugccauuccagcaguuuggccgggauaucgccgauaccacagacgccguuagagauccccagacacuggaaauccuggacaucaccccuugcagcuucggcggagugucugugaucaccccuggcaccaacaccagcaaucagguggcagugcuguaccagggcgugaacuguaccgaagugcccguggccauucacgccgaucagcugacaccuacauggcggguguacuccaccggcagcaauguguuucagaccagagccggcugucugaucggagccgagcacgugaacaauagcuacgagugcgacauccccaucggcgcuggaaucugcgccagcuaccagacacagacaaacagcccucggagagccagaagcguggccagccagagcgugauugccuacacaaugucucugggcgccgagaacagcguggccuacuccaacaacucuaucgcuauccccaccaacuucaccaucagcgugaccacagagauccugccuguguccaugaccaagaccagcguggacugcaccauguacaucugcggcgauuccaccgagugcuccaaccugcugcugcaguacggcagcuucugcacccagcugaauagagcccugacagggaucgccguggaacaggacaagaacacccaagagguguucgcccaagugaagcagaucuacaagaccccuccuaucaaggacuucggcggcuucaauuucagccagauucugcccgauccuagcaagcccagcaagcggagcuucaucgaggaccugcuguucaacaaagugacacuggccgacgccggcuucaucaagcaguauggcgauugucugggcgacauugccgccagggaucugauuugcgcccagaaguuuaacggacugacagugcugccuccucugcugaccgaugagaugaucgcccaguacacaucugcccugcuggccggcacaaucacaagcggcuggacauuuggagcaggcgccgcucugcagauccccuuugcuaugcagauggccuaccgguucaacggcaucggagugacccagaaugugcuguacgagaaccagaagcugaucgccaaccaguucaacagcgccaucggcaagauccaggacagccugagcagcacagcaagcgcccugggaaagcugcaggacguggucaaccagaaugcccaggcacugaacacccuggucaagcagcuguccuccaacuucggcgccaucagcucugugcugaacgauauccugagcagacuggacccuccugaggccgaggugcagaucgacagacugaucacaggcagacugcagagccuccagacauacgugacccagcagcugaucagagccgccgagauuagagccucugccaaucuggccgccaccaagaugucugagugugugcugggccagagcaagagaguggacuuuugcggcaagggcuaccaccugaugagcuucccucagucugccccucacggcgugguguuucugcacgugacauaugugcccgcucaagagaagaauuucaccaccgcuccagccaucugccacgacggcaaagcccacuuuccuagagaaggcguguucguguccaacggcacccauugguucgugacacagcggaacuucuacgagccccagaucaucaccaccgacaacaccuucgugucuggcaacugcgacgucgugaucggcauugugaacaauaccguguacgacccucugcagcccgagcuggacagcuucaaagaggaacuggacaaguacuuuaagaaccacacaagccccgacguggaccugggcgauaucagcggaaucaaugccagcgucgugaacauccagaaagagaucgaccggcugaacgagguggccaagaaucugaacgagagccugaucgaccugcaagaacuggggaaguacgagcaguacaucaaguggcccugguacaucuggcugggcuuuaucgccggacugauugccaucgugaucgucacaaucaugcuguguugcaugaccagcugcuguagcugccugaagggcuguuguagcuguggcagcugcugcaaguucgacgaggacgauucugagcccgugcugaagggcgugaaacugcacuacacaugaggacuagucccuguucccagagcccacuuuuuuuucuuuuuuugaaauaaaauagccugucuuucagaucucaaaggcucuuuucagagccaccaaaaaaaaaaaaaaaaaaaaaaaaaaaaaaaaaaaaaaaaaaaaaaaaaaaaaaaaaaaaaaaaaaaaaaaaaaaaaaaaaaaaaaaaaaaaaaaaaaaaa

SEQ ID NO: 23619 - RNA, 4085 nt, Artificial Sequence
  SARS-CoV-2/Wuhan/WIV05/2019__EPI_ISL_402128 spike protein mRNA gc mod (1-1273)(K986P_V987P_K986P_V987P_H69del_V70del_Y144del_N501Y_A570 D_D614G_P681H_T716I_S982A_D1118H)
aggagagucccgcagucggcguccagcggcucugcuuguucgugugugugucguugcaggccuuauucaagcuuaccauguucguguuccuggugcugcugccucugguguccagccagugugugaaccugaccaccagaacacagcugccuccagccuacaccaacagcuuuaccagaggcguguacuaccccgacaagguguucagauccagcgugcugcacucuacccaggaccuguuccugccuuucuucagcaacgugaccugguuccacgccaucuccggcaccaauggcaccaagagauucgacaaccccgugcugcccuucaacgacgggguguacuuugccagcaccgagaaguccaacaucaucagaggcuggaucuucggcaccacacuggacagcaagacccagagccugcugaucgugaacaacgccaccaacguggucaucaaagugugcgaguuccaguucugcaacgaccccuuccugggcgucuaccacaagaacaacaagagcuggauggaaagcgaguuccggguguacagcagcgccaacaacugcaccuucgaguacgugucccagccuuuccugauggaccuggaaggcaagcagggcaacuucaagaaccugcgcgaguucguguuuaagaacaucgacggcuacuucaagaucuacagcaagcacaccccuaucaaccucgugcgggaucugccucagggcuucucugcucuggaaccccugguggaucugcccaucggcaucaacaucacccgguuucagacacugcuggcccugcacagaagcuaccugacaccuggcgauagcagcagcggauggacagcuggugccgccgcuuacuaugugggcuaccugcagccuagaaccuuccugcugaaguacaacgagaacggcaccaucaccgacgccguggauugugcucuggauccucugagcgagacaaagugcacccugaaguccuucaccguggaaaagggcaucuaccagaccagcaacuuccgggugcagcccaccgaauccaucgugcgguuccccaauaucaccaaucugugccccuucggcgagguguucaaugccaccagauucgccucuguguacgccuggaaccggaagcggaucagcaauugcguggccgacuacuccgugcuguacaacuccgccagcuucagcaccuucaagugcuacggcguguccccuaccaagcugaacgaccugugcuucacaaacguguacgccgacagcuucgugauccggggagaugaagugcggcagauugccccuggacagacaggcaagaucgccgacuacaacuacaagcugcccgacgacuucaccggcugugugauugccuggaacagcaacaaccuggacuccaaagucggcggcaacuacaauuaccuguaccggcuguuccggaaguccaaucugaagcccuucgagcgggacaucuccaccgagaucuaucaggccggcagcaccccuuguaacggcguggaaggcuucaacugcuacuucccacugcaguccuacggcuuucagcccacauacggcgugggcuaucagcccuacagagugguggugcugagcuucgaacugcugcaugccccugccacagugugcggcccuaagaaaagcaccaaucucgugaagaacaaaugcgugaacuucaacuucaacggccugaccggcaccggcgugcugacagagagcaacaagaaguuccugccauuccagcaguuuggccgggauaucgacgauaccacagacgccguuagagauccccagacacuggaaauccuggacaucaccccuugcagcuucggcggagugucugugaucaccccuggcaccaacaccagcaaucagguggcagugcuguaccagggcgugaacuguaccgaagugcccguggccauucacgccgaucagcugacaccuacauggcggguguacuccaccggcagcaauguguuucagaccagagccggcugucugaucggagccgagcacgugaacaauagcuacgagugcgacauccccaucggcgcuggaaucugcgccagcuaccagacacagacaaacagccaccggagagccagaagcguggccagccagagcaucauugccuacacaaugucucugggcgccgagaacagcguggccuacuccaacaacucuaucgcuauccccaucaacuucaccaucagcgugaccacagagauccugccuguguccaugaccaagaccagcguggacugcaccauguacaucugcggcgauuccaccgagugcuccaaccugcugcugcaguacggcagcuucugcacccagcugaauagagcccugacagggaucgccguggaacaggacaagaacacccaagagguguucgcccaagugaagcagaucuacaagaccccuccuaucaaggacuucggcggcuucaauuucagccagauucugcccgauccuagcaagcccagcaagcggagcuucaucgaggaccugcuguucaacaaagugacacuggccgacgccggcuucaucaagcaguauggcgauugucugggcgacauugccgccagggaucugauuugcgcccagaaguuuaacggacugacagugcugccuccucugcugaccgaugagaugaucgcccaguacacaucugcccugcuggccggcacaaucacaagcggcuggacauuuggagcaggcgccgcucugcagauccccuuugcuaugcagauggccuaccgguucaacggcaucggagugacccagaaugugcuguacgagaaccagaagcugaucgccaaccaguucaacagcgccaucggcaagauccaggacagccugagcagcacagcaagcgcccugggaaagcugcaggacguggucaaccagaaugcccaggcacugaacacccuggucaagcagcuguccuccaacuucggcgccaucagcucugugcugaacgauauccuggccagacuggacccuccugaggccgaggugcagaucgacagacugaucacaggcagacugcagagccuccagacauacgugacccagcagcugaucagagccgccgagauuagagccucugccaaucuggccgccaccaagaugucugagugugugcugggccagagcaagagaguggacuuuugcggcaagggcuaccaccugaugagcuucccucagucugccccucacggcgugguguuucugcacgugacauaugugcccgcucaagagaagaauuucaccaccgcuccagccaucugccacgacggcaaagcccacuuuccuagagaaggcguguucguguccaacggcacccauugguucgugacacagcggaacuucuacgagccccagaucaucaccacccacaacaccuucgugucuggcaacugcgacgucgugaucggcauugugaacaauaccguguacgacccucugcagcccgagcuggacagcuucaaagaggaacuggacaaguacuuuaagaaccacacaagccccgacguggaccugggcgauaucagcggaaucaaugccagcgucgugaacauccagaaagagaucgaccggcugaacgagguggccaagaaucugaacgagagccugaucgaccugcaagaacuggggaaguacgagcaguacaucaaguggcccugguacaucuggcugggcuuuaucgccggacugauugccaucgugauggucacaaucaugcuguguugcaugaccagcugcuguagcugccugaagggcuguuguagcuguggcagcugcugcaaguucgacgaggacgauucugagcccgugcugaagggcgugaaacugcacuacacaugaggacuagucccuguucccagagcccacuuuuuuuucuuuuuuugaaauaaaauagccugucuuucagaucucaaaggcucuuuucagagccaccaaaaaaaaaaaaaaaaaaaaaaaaaaaaaaaaaaaaaaaaaaaaaaaaaaaaaaaaaaaaaaaaaaaaaaaaaaaaaaaaaaaaaaaaaaaaaaaaaaaaa

SEQ ID NO: 23620 - RNA, 4094 nt, Artificial Sequence
  SARS-CoV-2/Wuhan/WIV05/2019__EPI_ISL_402128 spike protein mRNA gc mod (1-1273)(K986P_V987P_K986P_V987P_K417N_E484K_N501Y_D614G)
aggagagucccgcagucggcguccagcggcucugcuuguucgugugugugucguugcaggccuuauucaagcuuaccauguucguguuccuggugcugcugccucugguguccagccagugugugaaccugaccaccagaacacagcugccuccagccuacaccaacagcuuuaccagaggcguguacuaccccgacaagguguucagauccagcgugcugcacucuacccaggaccuguuccugccuuucuucagcaacgugaccugguuccacgccauccacguguccggcaccaauggcaccaagagauucgacaaccccgugcugcccuucaacgacgggguguacuuugccagcaccgagaaguccaacaucaucagaggcuggaucuucggcaccacacuggacagcaagacccagagccugcugaucgugaacaacgccaccaacguggucaucaaagugugcgaguuccaguucugcaacgaccccuuccugggcgucuacuaccacaagaacaacaagagcuggauggaaagcgaguuccggguguacagcagcgccaacaacugcaccuucgaguacgugucccagccuuuccugauggaccuggaaggcaagcagggcaacuucaagaaccugcgcgaguucguguuuaagaacaucgacggcuacuucaagaucuacagcaagcacaccccuaucaaccucgugcgggaucugccucagggcuucucugcucuggaaccccugguggaucugcccaucggcaucaacaucacccgguuucagacacugcuggcccugcacagaagcuaccugacaccuggcgauagcagcagcggauggacagcuggugccgccgcuuacuaugugggcuaccugcagccuagaaccuuccugcugaaguacaacgagaacggcaccaucaccgacgccguggauugugcucuggauccucugagcgagacaaagugcacccugaaguccuucaccguggaaaagggcaucuaccagaccagcaacuuccgggugcagcccaccgaauccaucgugcgguuccccaauaucaccaaucugugccccuucggcgagguguucaaugccaccagauucgccucuguguacgccuggaaccggaagcggaucagcaauugcguggccgacuacuccgugcuguacaacuccgccagcuucagcaccuucaagugcuacggcguguccccuaccaagcugaacgaccugugcuucacaaacguguacgccgacagcuucgugauccggggagaugaagugcggcagauugccccuggacagacaggcaacaucgccgacuacaacuacaagcugcccgacgacuucaccggcugugugauugccuggaacagcaacaaccuggacuccaaagucggcggcaacuacaauuaccuguaccggcuguuccggaaguccaaucugaagcccuucgagcgggacaucuccaccgagaucuaucaggccggcagcaccccuuguaacggcgugaagggcuucaacugcuacuucccacugcaguccuacggcuuucagcccacauacggcgugggcuaucagcccuacagagugguggugcugagcuucgaacugcugcaugccccugccacagugugcggcccuaagaaaagcaccaaucucgugaagaacaaaugcgugaacuucaacuucaacggccugaccggcaccggcgugcugacagagagcaacaagaaguuccugccauuccagcaguuuggccgggauaucgccgauaccacagacgccguuagagauccccagacacuggaaauccuggacaucaccccuugcagcuucggcggagugucugugaucaccccuggcaccaacaccagcaaucagguggcagugcuguaccagggcgugaacuguaccgaagugcccguggccauucacgccgaucagcugacaccuacauggcggguguacuccaccggcagcaauguguuucagaccagagccggcugucugaucggagccgagcacgugaacaauagcuacgagugcgacauccccaucggcgcuggaaucugcgccagcuaccagacacagacaaacagcccucggagagccagaagcguggccagccagagcaucauugccuacacaaugucucugggcgccgagaacagcguggccuacuccaacaacucuaucgcuauccccaccaacuucaccaucagcgugaccacagagauccugccuguguccaugaccaagaccagcguggacugcaccauguacaucugcggcgauuccaccgagugcuccaaccugcugcugcaguacggcagcuucugcacccagcugaauagagcccugacagggaucgccguggaacaggacaagaacacccaagagguguucgcccaagugaagcagaucuacaagaccccuccuaucaaggacuucggcggcuucaauuucagccagauucugcccgauccuagcaagcccagcaagcggagcuucaucgaggaccugcuguucaacaaagugacacuggccgacgccggcuucaucaagcaguauggcgauugucugggcgacauugccgccagggaucugauuugcgcccagaaguuuaacggacugacagugcugccuccucugcugaccgaugagaugaucgcccaguacacaucugcccugcuggccggcacaaucacaagcggcuggacauuuggagcaggcgccgcucugcagauccccuuugcuaugcagauggccuaccgguucaacggcaucggagugacccagaaugugcuguacgagaaccagaagcugaucgccaaccaguucaacagcgccaucggcaagauccaggacagccugagcagcacagcaagcgcccugggaaagcugcaggacguggucaaccagaaugcccaggcacugaacacccuggucaagcagcuguccuccaacuucggcgccaucagcucugugcugaacgauauccugagcagacuggacccuccugaggccgaggugcagaucgacagacugaucacaggcagacugcagagccuccagacauacgugacccagcagcugaucagagccgccgagauuagagccucugccaaucuggccgccaccaagaugucugagugugugcugggccagagcaagagaguggacuuuugcggcaagggcuaccaccugaugagcuucccucagucugccccucacggcgugguguuucugcacgugacauaugugcccgcucaagagaagaauuucaccaccgcuccagccaucugccacgacggcaaagcccacuuuccuagagaaggcguguucguguccaacggcacccauugguucgugacacagcggaacuucuacgagccccagaucaucaccaccgacaacaccuucgugucuggcaacugcgacgucgugaucggcauugugaacaauaccguguacgacccucugcagcccgagcuggacagcuucaaagaggaacuggacaaguacuuuaagaaccacacaagccccgacguggaccugggcgauaucagcggaaucaaugccagcgucgugaacauccagaaagagaucgaccggcugaacgagguggccaagaaucugaacgagagccugaucgaccugcaagaacuggggaaguacgagcaguacaucaaguggcccugguacaucuggcugggcuuuaucgccggacugauugccaucgugauggucacaaucaugcuguguugcaugaccagcugcuguagcugccugaagggcuguuguagcuguggcagcugcugcaaguucgacgaggacgauucugagcccgugcugaagggcgugaaacugcacuacacaugaggacuagucccuguucccagagcccacuuuuuuuucuuuuuuugaaauaaaauagccugucuuucagaucucaaaggcucuuuucagagccaccaaaaaaaaaaaaaaaaaaaaaaaaaaaaaaaaaaaaaaaaaaaaaaaaaaaaaaaaaaaaaaaaaaaaaaaaaaaaaaaaaaaaaaaaaaaaaaaaaaaaa

SEQ ID NO: 23621 - RNA, 4085 nt, Artificial Sequence
  SARS-CoV-2/Wuhan/WIV05/2019__EPI_ISL_402128 spike protein mRNA gc mod (1-1273)(K986P_V987P_K986P_V987P_L18F_D80A_D215G_L242del_A243del_ L244del_R246I_K417N_E484K_N501Y_D614G_A701V)
aggagagucccgcagucggcguccagcggcucugcuuguucgugugugugucguugcaggccuuauucaagcuuaccauguucguguuccuggugcugcugccucugguguccagccagugugugaacuucaccaccagaacacagcugccuccagccuacaccaacagcuuuaccagaggcguguacuaccccgacaagguguucagauccagcgugcugcacucuacccaggaccuguuccugccuuucuucagcaacgugaccugguuccacgccauccacguguccggcaccaauggcaccaagagauucgccaaccccgugcugcccuucaacgacgggguguacuuugccagcaccgagaaguccaacaucaucagaggcuggaucuucggcaccacacuggacagcaagacccagagccugcugaucgugaacaacgccaccaacguggucaucaaagugugcgaguuccaguucugcaacgaccccuuccugggcgucuacuaccacaagaacaacaagagcuggauggaaagcgaguuccggguguacagcagcgccaacaacugcaccuucgaguacgugucccagccuuuccugauggaccuggaaggcaagcagggcaacuucaagaaccugcgcgaguucguguuuaagaacaucgacggcuacuucaagaucuacagcaagcacaccccuaucaaccucgugcggggccugccucagggcuucucugcucuggaaccccugguggaucugcccaucggcaucaacaucacccgguuucagacacugcacaucagcuaccugacaccuggcgauagcagcagcggauggacagcuggugccgccgcuuacuaugugggcuaccugcagccuagaaccuuccugcugaaguacaacgagaacggcaccaucaccgacgccguggauugugcucuggauccucugagcgagacaaagugcacccugaaguccuucaccguggaaaagggcaucuaccagaccagcaacuuccgggugcagcccaccgaauccaucgugcgguuccccaauaucaccaaucugugccccuucggcgagguguucaaugccaccagauucgccucuguguacgccuggaaccggaagcggaucagcaauugcguggccgacuacuccgugcuguacaacuccgccagcuucagcaccuucaagugcuacggcguguccccuaccaagcugaacgaccugugcuucacaaacguguacgccgacagcuucgugauccggggagaugaagugcggcagauugccccuggacagacaggcaacaucgccgacuacaacuacaagcugcccgacgacuucaccggcugugugauugccuggaacagcaacaaccuggacuccaaagucggcggcaacuacaauuaccuguaccggcuguuccggaaguccaaucugaagcccuucgagcgggacaucuccaccgagaucuaucaggccggcagcaccccuuguaacggcgugaagggcuucaacugcuacuucccacugcaguccuacggcuuucagcccacauacggcgugggcuaucagcccuacagagugguggugcugagcuucgaacugcugcaugccccugccacagugugcggcccuaagaaaagcaccaaucucgugaagaacaaaugcgugaacuucaacuucaacggccugaccggcaccggcgugcugacagagagcaacaagaaguuccugccauuccagcaguuuggccgggauaucgccgauaccacagacgccguuagagauccccagacacuggaaauccuggacaucaccccuugcagcuucggcggagugucugugaucaccccuggcaccaacaccagcaaucagguggcagugcuguaccagggcgugaacuguaccgaagugcccguggccauucacgccgaucagcugacaccuacauggcggguguacuccaccggcagcaauguguuucagaccagagccggcugucugaucggagccgagcacgugaacaauagcuacgagugcgacauccccaucggcgcuggaaucugcgccagcuaccagacacagacaaacagcccucggagagccagaagcguggccagccagagcaucauugccuacacaaugucucugggcguggagaacagcguggccuacuccaacaacucuaucgcuauccccaccaacuucaccaucagcgugaccacagagauccugccuguguccaugaccaagaccagcguggacugcaccauguacaucugcggcgauuccaccgagugcuccaaccugcugcugcaguacggcagcuucugcacccagcugaauagagcccugacagggaucgccguggaacaggacaagaacacccaagagguguucgcccaagugaagcagaucuacaagaccccuccuaucaaggacuucggcggcuucaauuucagccagauucugcccgauccuagcaagcccagcaagcggagcuucaucgaggaccugcuguucaacaaagugacacuggccgacgccggcuucaucaagcaguauggcgauugucugggcgacauugccgccagggaucugauuugcgcccagaaguuuaacggacugacagugcugccuccucugcugaccgaugagaugaucgcccaguacacaucugcccugcuggccggcacaaucacaagcggcuggacauuuggagcaggcgccgcucugcagauccccuuugcuaugcagauggccuaccgguucaacggcaucggagugacccagaaugugcuguacgagaaccagaagcugaucgccaaccaguucaacagcgccaucggcaagauccaggacagccugagcagcacagcaagcgcccugggaaagcugcaggacguggucaaccagaaugcccaggcacugaacacccuggucaagcagcuguccuccaacuucggcgccaucagcucugugcugaacgauauccugagcagacuggacccuccugaggccgaggugcagaucgacagacugaucacaggcagacugcagagccuccagacauacgugacccagcagcugaucagagccgccgagauuagagccucugccaaucuggccgccaccaagaugucugagugugugcugggccagagcaagagaguggacuuuugcggcaagggcuaccaccugaugagcuucccucagucugccccucacggcgugguguuucugcacgugacauaugugcccgcucaagagaagaauuucaccaccgcuccagccaucugccacgacggcaaagcccacuuuccuagagaaggcguguucguguccaacggcacccauugguucgugacacagcggaacuucuacgagccccagaucaucaccaccgacaacaccuucgugucuggcaacugcgacgucgugaucggcauugugaacaauaccguguacgacccucugcagcccgagcuggacagcuucaaagaggaacuggacaaguacuuuaagaaccacacaagccccgacguggaccugggcgauaucagcggaaucaaugccagcgucgugaacauccagaaagagaucgaccggcugaacgagguggccaagaaucugaacgagagccugaucgaccugcaagaacuggggaaguacgagcaguacaucaaguggcccugguacaucuggcugggcuuuaucgccggacugauugccaucgugauggucacaaucaugcuguguugcaugaccagcugcuguagcugccugaagggcuguuguagcuguggcagcugcugcaaguucgacgaggacgauucugagcccgugcugaagggcgugaaacugcacuacacaugaggacuagucccuguucccagagcccacuuuuuuuucuuuuuuugaaauaaaauagccugucuuucagaucucaaaggcucuuuucagagccaccaaaaaaaaaaaaaaaaaaaaaaaaaaaaaaaaaaaaaaaaaaaaaaaaaaaaaaaaaaaaaaaaaaaaaaaaaaaaaaaaaaaaaaaaaaaaaaaaaaaaa

SEQ ID NO: 23622 - RNA, 4094 nt, Artificial Sequence
  SARS-CoV-2/Wuhan/WIV05/2019__EPI_ISL_402128 spike protein mRNA gc mod (1-1273)(K986P_V987P_K986P_V987P_E484K_D614G)
aggagagucccgcagucggcguccagcggcucugcuuguucgugugugugucguugcaggccuuauucaagcuuaccauguucguguuccuggugcugcugccucugguguccagccagugugugaaccugaccaccagaacacagcugccuccagccuacaccaacagcuuuaccagaggcguguacuaccccgacaagguguucagauccagcgugcugcacucuacccaggaccuguuccugccuuucuucagcaacgugaccugguuccacgccauccacguguccggcaccaauggcaccaagagauucgacaaccccgugcugcccuucaacgacgggguguacuuugccagcaccgagaaguccaacaucaucagaggcuggaucuucggcaccacacuggacagcaagacccagagccugcugaucgugaacaacgccaccaacguggucaucaaagugugcgaguuccaguucugcaacgaccccuuccugggcgucuacuaccacaagaacaacaagagcuggauggaaagcgaguuccggguguacagcagcgccaacaacugcaccuucgaguacgugucccagccuuuccugauggaccuggaaggcaagcagggcaacuucaagaaccugcgcgaguucguguuuaagaacaucgacggcuacuucaagaucuacagcaagcacaccccuaucaaccucgugcgggaucugccucagggcuucucugcucuggaaccccugguggaucugcccaucggcaucaacaucacccgguuucagacacugcuggcccugcacagaagcuaccugacaccuggcgauagcagcagcggauggacagcuggugccgccgcuuacuaugugggcuaccugcagccuagaaccuuccugcugaaguacaacgagaacggcaccaucaccgacgccguggauugugcucuggauccucugagcgagacaaagugcacccugaaguccuucaccguggaaaagggcaucuaccagaccagcaacuuccgggugcagcccaccgaauccaucgugcgguuccccaauaucaccaaucugugccccuucggcgagguguucaaugccaccagauucgccucuguguacgccuggaaccggaagcggaucagcaauugcguggccgacuacuccgugcuguacaacuccgccagcuucagcaccuucaagugcuacggcguguccccuaccaagcugaacgaccugugcuucacaaacguguacgccgacagcuucgugauccggggagaugaagugcggcagauugccccuggacagacaggcaagaucgccgacuacaacuacaagcugcccgacgacuucaccggcugugugauugccuggaacagcaacaaccuggacuccaaagucggcggcaacuacaauuaccuguaccggcuguuccggaaguccaaucugaagcccuucgagcgggacaucuccaccgagaucuaucaggccggcagcaccccuuguaacggcgugaagggcuucaacugcuacuucccacugcaguccuacggcuuucagcccacaaauggcgugggcuaucagcccuacagagugguggugcugagcuucgaacugcugcaugccccugccacagugugcggcccuaagaaaagcaccaaucucgugaagaacaaaugcgugaacuucaacuucaacggccugaccggcaccggcgugcugacagagagcaacaagaaguuccugccauuccagcaguuuggccgggauaucgccgauaccacagacgccguuagagauccccagacacuggaaauccuggacaucaccccuugcagcuucggcggagugucugugaucaccccuggcaccaacaccagcaaucagguggcagugcuguaccagggcgugaacuguaccgaagugcccguggccauucacgccgaucagcugacaccuacauggcggguguacuccaccggcagcaauguguuucagaccagagccggcugucugaucggagccgagcacgugaacaauagcuacgagugcgacauccccaucggcgcuggaaucugcgccagcuaccagacacagacaaacagcccucggagagccagaagcguggccagccagagcaucauugccuacacaaugucucugggcgccgagaacagcguggccuacuccaacaacucuaucgcuauccccaccaacuucaccaucagcgugaccacagagauccugccuguguccaugaccaagaccagcguggacugcaccauguacaucugcggcgauuccaccgagugcuccaaccugcugcugcaguacggcagcuucugcacccagcugaauagagcccugacagggaucgccguggaacaggacaagaacacccaagagguguucgcccaagugaagcagaucuacaagaccccuccuaucaaggacuucggcggcuucaauuucagccagauucugcccgauccuagcaagcccagcaagcggagcuucaucgaggaccugcuguucaacaaagugacacuggccgacgccggcuucaucaagcaguauggcgauugucugggcgacauugccgccagggaucugauuugcgcccagaaguuuaacggacugacagugcugccuccucugcugaccgaugagaugaucgcccaguacacaucugcccugcuggccggcacaaucacaagcggcuggacauuuggagcaggcgccgcucugcagauccccuuugcuaugcagauggccuaccgguucaacggcaucggagugacccagaaugugcuguacgagaaccagaagcugaucgccaaccaguucaacagcgccaucggcaagauccaggacagccugagcagcacagcaagcgcccugggaaagcugcaggacguggucaaccagaaugcccaggcacugaacacccuggucaagcagcuguccuccaacuucggcgccaucagcucugugcugaacgauauccugagcagacuggacccuccugaggccgaggugcagaucgacagacugaucacaggcagacugcagagccuccagacauacgugacccagcagcugaucagagccgccgagauuagagccucugccaaucuggccgccaccaagaugucugagugugugcugggccagagcaagagaguggacuuuugcggcaagggcuaccaccugaugagcuucccucagucugccccucacggcgugguguuucugcacgugacauaugugcccgcucaagagaagaauuucaccaccgcuccagccaucugccacgacggcaaagcccacuuuccuagagaaggcguguucguguccaacggcacccauugguucgugacacagcggaacuucuacgagccccagaucaucaccaccgacaacaccuucgugucuggcaacugcgacgucgugaucggcauugugaacaauaccguguacgacccucugcagcccgagcuggacagcuucaaagaggaacuggacaaguacuuuaagaaccacacaagccccgacguggaccugggcgauaucagcggaaucaaugccagcgucgugaacauccagaaagagaucgaccggcugaacgagguggccaagaaucugaacgagagccugaucgaccugcaagaacuggggaaguacgagcaguacaucaaguggcccugguacaucuggcugggcuuuaucgccggacugauugccaucgugauggucacaaucaugcuguguugcaugaccagcugcuguagcugccugaagggcuguuguagcuguggcagcugcugcaaguucgacgaggacgauucugagcccgugcugaagggcgugaaacugcacuacacaugaggacuagucccuguucccagagcccacuuuuuuuucuuuuuuugaaauaaaauagccugucuuucagaucucaaaggcucuuuucagagccaccaaaaaaaaaaaaaaaaaaaaaaaaaaaaaaaaaaaaaaaaaaaaaaaaaaaaaaaaaaaaaaaaaaaaaaaaaaaaaaaaaaaaaaaaaaaaaaaaaaaaa

SEQ ID NO: 23623 - RNA, 4094 nt, Artificial Sequence
  SARS-CoV-2/Wuhan/WIV05/2019__EPI_ISL_402128 spike protein mRNA gc mod (1-1273)(K986P_V987P_K986P_V987P_L18F_T20N_P26S_D138Y_R190S_K417T _E484K_N501Y_D614G_H655Y_T1027I)
aggagagucccgcagucggcguccagcggcucugcuuguucgugugugugucguugcaggccuuauucaagcuuaccauguucguguuccuggugcugcugccucugguguccagccagugugugaacuucaccaacagaacacagcugccuagcgccuacaccaacagcuuuaccagaggcguguacuaccccgacaagguguucagauccagcgugcugcacucuacccaggaccuguuccugccuuucuucagcaacgugaccugguuccacgccauccacguguccggcaccaauggcaccaagagauucgacaaccccgugcugcccuucaacgacgggguguacuuugccagcaccgagaaguccaacaucaucagaggcuggaucuucggcaccacacuggacagcaagacccagagccugcugaucgugaacaacgccaccaacguggucaucaaagugugcgaguuccaguucugcaacuaccccuuccugggcgucuacuaccacaagaacaacaagagcuggauggaaagcgaguuccggguguacagcagcgccaacaacugcaccuucgaguacgugucccagccuuuccugauggaccuggaaggcaagcagggcaacuucaagaaccugagcgaguucguguuuaagaacaucgacggcuacuucaagaucuacagcaagcacaccccuaucaaccucgugcgggaucugccucagggcuucucugcucuggaaccccugguggaucugcccaucggcaucaacaucacccgguuucagacacugcuggcccugcacagaagcuaccugacaccuggcgauagcagcagcggauggacagcuggugccgccgcuuacuaugugggcuaccugcagccuagaaccuuccugcugaaguacaacgagaacggcaccaucaccgacgccguggauugugcucuggauccucugagcgagacaaagugcacccugaaguccuucaccguggaaaagggcaucuaccagaccagcaacuuccgggugcagcccaccgaauccaucgugcgguuccccaauaucaccaaucugugccccuucggcgagguguucaaugccaccagauucgccucuguguacgccuggaaccggaagcggaucagcaauugcguggccgacuacuccgugcuguacaacuccgccagcuucagcaccuucaagugcuacggcguguccccuaccaagcugaacgaccugugcuucacaaacguguacgccgacagcuucgugauccggggagaugaagugcggcagauugccccuggacagacaggcaccaucgccgacuacaacuacaagcugcccgacgacuucaccggcugugugauugccuggaacagcaacaaccuggacuccaaagucggcggcaacuacaauuaccuguaccggcuguuccggaaguccaaucugaagcccuucgagcgggacaucuccaccgagaucuaucaggccggcagcaccccuuguaacggcgugaagggcuucaacugcuacuucccacugcaguccuacggcuuucagcccacauacggcgugggcuaucagcccuacagagugguggugcugagcuucgaacugcugcaugccccugccacagugugcggcccuaagaaaagcaccaaucucgugaagaacaaaugcgugaacuucaacuucaacggccugaccggcaccggcgugcugacagagagcaacaagaaguuccugccauuccagcaguuuggccgggauaucgccgauaccacagacgccguuagagauccccagacacuggaaauccuggacaucaccccuugcagcuucggcggagugucugugaucaccccuggcaccaacaccagcaaucagguggcagugcuguaccagggcgugaacuguaccgaagugcccguggccauucacgccgaucagcugacaccuacauggcggguguacuccaccggcagcaauguguuucagaccagagccggcugucugaucggagccgaguacgugaacaauagcuacgagugcgacauccccaucggcgcuggaaucugcgccagcuaccagacacagacaaacagcccucggagagccagaagcguggccagccagagcaucauugccuacacaaugucucugggcgccgagaacagcguggccuacuccaacaacucuaucgcuauccccaccaacuucaccaucagcgugaccacagagauccugccuguguccaugaccaagaccagcguggacugcaccauguacaucugcggcgauuccaccgagugcuccaaccugcugcugcaguacggcagcuucugcacccagcugaauagagcccugacagggaucgccguggaacaggacaagaacacccaagagguguucgcccaagugaagcagaucuacaagaccccuccuaucaaggacuucggcggcuucaauuucagccagauucugcccgauccuagcaagcccagcaagcggagcuucaucgaggaccugcuguucaacaaagugacacuggccgacgccggcuucaucaagcaguauggcgauugucugggcgacauugccgccagggaucugauuugcgcccagaaguuuaacggacugacagugcugccuccucugcugaccgaugagaugaucgcccaguacacaucugcccugcuggccggcacaaucacaagcggcuggacauuuggagcaggcgccgcucugcagauccccuuugcuaugcagauggccuaccgguucaacggcaucggagugacccagaaugugcuguacgagaaccagaagcugaucgccaaccaguucaacagcgccaucggcaagauccaggacagccugagcagcacagcaagcgcccugggaaagcugcaggacguggucaaccagaaugcccaggcacugaacacccuggucaagcagcuguccuccaacuucggcgccaucagcucugugcugaacgauauccugagcagacuggacccuccugaggccgaggugcagaucgacagacugaucacaggcagacugcagagccuccagacauacgugacccagcagcugaucagagccgccgagauuagagccucugccaaucuggccgccaucaagaugucugagugugugcugggccagagcaagagaguggacuuuugcggcaagggcuaccaccugaugagcuucccucagucugccccucacggcgugguguuucugcacgugacauaugugcccgcucaagagaagaauuucaccaccgcuccagccaucugccacgacggcaaagcccacuuuccuagagaaggcguguucguguccaacggcacccauugguucgugacacagcggaacuucuacgagccccagaucaucaccaccgacaacaccuucgugucuggcaacugcgacgucgugaucggcauugugaacaauaccguguacgacccucugcagcccgagcuggacagcuucaaagaggaacuggacaaguacuuuaagaaccacacaagccccgacguggaccugggcgauaucagcggaaucaaugccagcgucgugaacauccagaaagagaucgaccggcugaacgagguggccaagaaucugaacgagagccugaucgaccugcaagaacuggggaaguacgagcaguacaucaaguggcccugguacaucuggcugggcuuuaucgccggacugauugccaucgugauggucacaaucaugcuguguugcaugaccagcugcuguagcugccugaagggcuguuguagcuguggcagcugcugcaaguucgacgaggacgauucugagcccgugcugaagggcgugaaacugcacuacacaugaggacuagucccuguucccagagcccacuuuuuuuucuuuuuuugaaauaaaauagccugucuuucagaucucaaaggcucuuuucagagccaccaaaaaaaaaaaaaaaaaaaaaaaaaaaaaaaaaaaaaaaaaaaaaaaaaaaaaaaaaaaaaaaaaaaaaaaaaaaaaaaaaaaaaaaaaaaaaaaaaaaaa

SEQ ID NO: 23624 - RNA, 4094 nt, Artificial Sequence
  SARS-CoV-2/Wuhan/WIV05/2019__EPI_ISL_402128 spike protein mRNA gc mod (1-1273)(K986P_V987P_K986P_V987P_S13I_W152C_L452R_D614G)
aggagagucccgcagucggcguccagcggcucugcuuguucgugugugugucguugcaggccuuauucaagcuuaccauguucguguuccuggugcugcugccucugguguccauccagugugugaaccugaccaccagaacacagcugccuccagccuacaccaacagcuuuaccagaggcguguacuaccccgacaagguguucagauccagcgugcugcacucuacccaggaccuguuccugccuuucuucagcaacgugaccugguuccacgccauccacguguccggcaccaauggcaccaagagauucgacaaccccgugcugcccuucaacgacgggguguacuuugccagcaccgagaaguccaacaucaucagaggcuggaucuucggcaccacacuggacagcaagacccagagccugcugaucgugaacaacgccaccaacguggucaucaaagugugcgaguuccaguucugcaacgaccccuuccugggcgucuacuaccacaagaacaacaagagcugcauggaaagcgaguuccggguguacagcagcgccaacaacugcaccuucgaguacgugucccagccuuuccugauggaccuggaaggcaagcagggcaacuucaagaaccugcgcgaguucguguuuaagaacaucgacggcuacuucaagaucuacagcaagcacaccccuaucaaccucgugcgggaucugccucagggcuucucugcucuggaaccccugguggaucugcccaucggcaucaacaucacccgguuucagacacugcuggcccugcacagaagcuaccugacaccuggcgauagcagcagcggauggacagcuggugccgccgcuuacuaugugggcuaccugcagccuagaaccuuccugcugaaguacaacgagaacggcaccaucaccgacgccguggauugugcucuggauccucugagcgagacaaagugcacccugaaguccuucaccguggaaaagggcaucuaccagaccagcaacuuccgggugcagcccaccgaauccaucgugcgguuccccaauaucaccaaucugugccccuucggcgagguguucaaugccaccagauucgccucuguguacgccuggaaccggaagcggaucagcaauugcguggccgacuacuccgugcuguacaacuccgccagcuucagcaccuucaagugcuacggcguguccccuaccaagcugaacgaccugugcuucacaaacguguacgccgacagcuucgugauccggggagaugaagugcggcagauugccccuggacagacaggcaagaucgccgacuacaacuacaagcugcccgacgacuucaccggcugugugauugccuggaacagcaacaaccuggacuccaaagucggcggcaacuacaauuaccgcuaccggcuguuccggaaguccaaucugaagcccuucgagcgggacaucuccaccgagaucuaucaggccggcagcaccccuuguaacggcguggaaggcuucaacugcuacuucccacugcaguccuacggcuuucagcccacaaauggcgugggcuaucagcccuacagagugguggugcugagcuucgaacugcugcaugccccugccacagugugcggcccuaagaaaagcaccaaucucgugaagaacaaaugcgugaacuucaacuucaacggccugaccggcaccggcgugcugacagagagcaacaagaaguuccugccauuccagcaguuuggccgggauaucgccgauaccacagacgccguuagagauccccagacacuggaaauccuggacaucaccccuugcagcuucggcggagugucugugaucaccccuggcaccaacaccagcaaucagguggcagugcuguaccagggcgugaacuguaccgaagugcccguggccauucacgccgaucagcugacaccuacauggcggguguacuccaccggcagcaauguguuucagaccagagccggcugucugaucggagccgagcacgugaacaauagcuacgagugcgacauccccaucggcgcuggaaucugcgccagcuaccagacacagacaaacagcccucggagagccagaagcguggccagccagagcaucauugccuacacaaugucucugggcgccgagaacagcguggccuacuccaacaacucuaucgcuauccccaccaacuucaccaucagcgugaccacagagauccugccuguguccaugaccaagaccagcguggacugcaccauguacaucugcggcgauuccaccgagugcuccaaccugcugcugcaguacggcagcuucugcacccagcugaauagagcccugacagggaucgccguggaacaggacaagaacacccaagagguguucgcccaagugaagcagaucuacaagaccccuccuaucaaggacuucggcggcuucaauuucagccagauucugcccgauccuagcaagcccagcaagcggagcuucaucgaggaccugcuguucaacaaagugacacuggccgacgccggcuucaucaagcaguauggcgauugucugggcgacauugccgccagggaucugauuugcgcccagaaguuuaacggacugacagugcugccuccucugcugaccgaugagaugaucgcccaguacacaucugcccugcuggccggcacaaucacaagcggcuggacauuuggagcaggcgccgcucugcagauccccuuugcuaugcagauggccuaccgguucaacggcaucggagugacccagaaugugcuguacgagaaccagaagcugaucgccaaccaguucaacagcgccaucggcaagauccaggacagccugagcagcacagcaagcgcccugggaaagcugcaggacguggucaaccagaaugcccaggcacugaacacccuggucaagcagcuguccuccaacuucggcgccaucagcucugugcugaacgauauccugagcagacuggacccuccugaggccgaggugcagaucgacagacugaucacaggcagacugcagagccuccagacauacgugacccagcagcugaucagagccgccgagauuagagccucugccaaucuggccgccaccaagaugucugagugugugcugggccagagcaagagaguggacuuuugcggcaagggcuaccaccugaugagcuucccucagucugccccucacggcgugguguuucugcacgugacauaugugcccgcucaagagaagaauuucaccaccgcuccagccaucugccacgacggcaaagcccacuuuccuagagaaggcguguucguguccaacggcacccauugguucgugacacagcggaacuucuacgagccccagaucaucaccaccgacaacaccuucgugucuggcaacugcgacgucgugaucggcauugugaacaauaccguguacgacccucugcagcccgagcuggacagcuucaaagaggaacuggacaaguacuuuaagaaccacacaagccccgacguggaccugggcgauaucagcggaaucaaugccagcgucgugaacauccagaaagagaucgaccggcugaacgagguggccaagaaucugaacgagagccugaucgaccugcaagaacuggggaaguacgagcaguacaucaaguggcccugguacaucuggcugggcuuuaucgccggacugauugccaucgugauggucacaaucaugcuguguugcaugaccagcugcuguagcugccugaagggcuguuguagcuguggcagcugcugcaaguucgacgaggacgauucugagcccgugcugaagggcgugaaacugcacuacacaugaggacuagucccuguucccagagcccacuuuuuuuucuuuuuuugaaauaaaauagccugucuuucagaucucaaaggcucuuuucagagccaccaaaaaaaaaaaaaaaaaaaaaaaaaaaaaaaaaaaaaaaaaaaaaaaaaaaaaaaaaaaaaaaaaaaaaaaaaaaaaaaaaaaaaaaaaaaaaaaaaaaaa

SEQ ID NO: 23625 - RNA, 1521 nt, Artificial Sequence
  SARS-CoV-2/Wuhan/WIV05/2019__EPI_ISL_402128 spike protein mRNA gc (1-15,334-528) Ferritin construct
aggagagggcgcuuggcuugcaaggacccugagcugcggcauugaagcacacccaacccaacucgacugaagucagccucacugaaccggaucugagaaucuucucucucugggcuugccagggcucuccgaaccuagcuagcauccucuucaauuccaacuagaaagcuuaccauguucguguuccugguccuccugccccuggugagcucccagugcaaccugugccccuucggcgagguguucaacgccacccgguucgccagcgucuacgccuggaaccgcaagcggaucuccaacugcguggcggacuacagcgugcuguacaacuccgccagcuucuccacguucaagugcuacggcgucagccccaccaagcucaacgaccugugcuucaccaacguguacgccgacuccuucgugauccgcggggacgagguccggcagaucgcccccggccagaccgggaagaucgccgacuacaacuacaagcugccggacgacuucacgggcugcgugaucgcguggaacagcaacaaccucgacuccaaggucgggggcaacuacaacuaccuguaccgccuguuccgcaagagcaaccucaagcccuucgagcgggacaucuccaccgagaucuaccaggccggcagcacccccugcaacgggguggagggcuucaacugcuacuucccccugcaguccuacggguuccagccgaccaacggcgugggguaccagcccuaccggguggucgugcugagcuucgagcuccugcacgcccccgccacggugugcggccccaagggcggggguggaagcggcggggguggaagugacaucaucaagcuccugaacgagcaggucaacaaggagaugcaguccagcaaccuguacauguccaugagcuccuggugcuacacccacagccucgacggcgccgggcuguuccuguucgaccacgccgcggaggaguacgagcacgccaagaagcucaucaucuuccugaacgagaacaacgugcccgugcagcugaccuccaucagcgccccggagcacaaguucgagggccucacgcagaucuuccagaaggccuacgagcacgagcagcacaucuccgagagcaucaacaacaucguggaccacgccaucaaguccaaggaccacgcgaccuucaacuuccugcagugguacgucgccgagcagcacgaggaggaggugcuguucaaggacauccucgacaagaucgagcugaucgggaacgagaaccacggccuguaccucgccgaccaguacgugaaggggaucgccaagagccgcaaguccugaggacuagucccuguucccagagcccacuuuuuuuucuuuuuuugaaauaaaauagccugucuuucagaucucaaaggcucuuuucagagccaccaaaaaaaaaaaaaaaaaaaaaaaaaaaaaaaaaaaaaaaaaaaaaaaaaaaaaaaaaaaaaaaaaaaaaaaaaaaaaaaaaaaaaaaaaaaaaaaaaaaaa

SEQ ID NO: 23626 - RNA, 1119 nt, Artificial Sequence
  SARS-CoV-2/Wuhan/WIV05/2019__EPI_ISL_402128 spike protein mRNA gc (334-528) Foldon construct
aggagagggcgcuuggcuugcaaggacccugagcugcggcauugaagcacacccaacccaacucgacugaagucagccucacugaaccggaucugagaaucuucucucucugggcuugccagggcucuccgaaccuagcuagcauccucuucaauuccaacuagaaagcuuaccaugcccaugggcagccugcagccgcucgccacccuguaccugcucgggaugcugguggccuccguccuggcgaaccugugccccuucggcgagguguucaacgccacccgguucgccagcgucuacgccuggaaccgcaagcggaucuccaacugcguggcggacuacagcgugcuguacaacuccgccagcuucuccacguucaagugcuacggcgucagccccaccaagcucaacgaccugugcuucaccaacguguacgccgacuccuucgugauccgcggggacgagguccggcagaucgcccccggccagaccgggaagaucgccgacuacaacuacaagcugccggacgacuucacgggcugcgugaucgcguggaacagcaacaaccucgacuccaaggucgggggcaacuacaacuaccuguaccgccuguuccgcaagagcaaccucaagcccuucgagcgggacaucuccaccgagaucuaccaggccggcagcacccccugcaacgggguggagggcuucaacugcuacuucccccugcaguccuacggguuccagccgaccaacggcgugggguaccagcccuaccggguggucgugcugagcuucgagcuccugcacgcccccgccacggugugcggccccaagggcagcggcggguacauccccgaggccccgcgcgacggccaggccuacgugcggaaggacggcgaguggguccugcugagcaccuuccucugaggacuagucccuguucccagagcccacuuuuuuuucuuuuuuugaaauaaaauagccugucuuucagaucucaaaggcucuuuucagagccaccaaaaaaaaaaaaaaaaaaaaaaaaaaaaaaaaaaaaaaaaaaaaaaaaaaaaaaaaaaaaaaaaaaaaaaaaaaaaaaaaaaaaaaaaaaaaaaaaaaaaa

SEQ ID NO: 23627 - RNA, 1497 nt, Artificial Sequence
  SARS-CoV-2/Wuhan/WIV05/2019__EPI_ISL_402128 spike protein mRNA gc (1-15,334-528) LumSynth construct
aggagagggcgcuuggcuugcaaggacccugagcugcggcauugaagcacacccaacccaacucgacugaagucagccucacugaaccggaucugagaaucuucucucucugggcuugccagggcucuccgaaccuagcuagcauccucuucaauuccaacuagaaagcuuaccauguucguguuccugguccuccugccccuggugagcucccagugcaaccugugccccuucggcgagguguucaacgccacccgguucgccagcgucuacgccuggaaccgcaagcggaucuccaacugcguggcggacuacagcgugcuguacaacuccgccagcuucuccacguucaagugcuacggcgucagccccaccaagcucaacgaccugugcuucaccaacguguacgccgacuccuucgugauccgcggggacgagguccggcagaucgcccccggccagaccgggaagaucgccgacuacaacuacaagcugccggacgacuucacgggcugcgugaucgcguggaacagcaacaaccucgacuccaaggucgggggcaacuacaacuaccuguaccgccuguuccgcaagagcaaccucaagcccuucgagcgggacaucuccaccgagaucuaccaggccggcagcacccccugcaacgggguggagggcuucaacugcuacuucccccugcaguccuacggguuccagccgaccaacggcgugggguaccagcccuaccggguggucgugcugagcuucgagcuccugcacgcccccgccacggugugcggccccaagggcggcggcggcuccggaggcggagguagcgggggacagaucuacgagggcaagcugaccgccgaggggcuccgcuucggcaucguggccagccgguucaaccacgcgcuggucgaccgccugguggagggggccaucgacgccaucgugcggcacggcgggcgcgaggaggacaucacccucguccgggugcccggcuccugggagaucccgguggccgccggcgagcuggcccgcaaggaggacaucgacgcggucaucgccaucggggugcugauccggggcgccacgccccacuucgacuacaucgccagcgagguguccaaggggcucgcggaccugagccuggagcuccgcaagcccaucaccuucggcgucaucaccgccgacacccuggagcaggccaucgagcgggccgggacgaagcacggcaacaagggcugggaggccgcgcuguccgccaucgagauggccaaccucuucaagagccugcgcugaggacuagucccuguucccagagcccacuuuuuuuucuuuuuuugaaauaaaauagccugucuuucagaucucaaaggcucuuuucagagccaccaaaaaaaaaaaaaaaaaaaaaaaaaaaaaaaaaaaaaaaaaaaaaaaaaaaaaaaaaaaaaaaaaaaaaaaaaaaaaaaaaaaaaaaaaaaaaaaaaaaaa

SEQ ID NO: 23628 - RNA, 1458 nt, Artificial Sequence
  SARS-CoV-2/Wuhan/WIV05/2019__EPI_ISL_402128 spike protein mRNA gc (334-528) LumSynth construct
aggagagggcgcuuggcuugcaaggacccugagcugcggcauugaagcacacccaacccaacucgacugaagucagccucacugaaccggaucugagaaucuucucucucugggcuugccagggcucuccgaaccuagcuagcauccucuucaauuccaacuagaaagcuuaccaugcagaucuacgagggcaagcugaccgccgaggggcuccgcuucggcaucguggccagccgguucaaccacgcgcuggucgaccgccugguggagggggccaucgacgccaucgugcggcacggcgggcgcgaggaggacaucacccucguccgggugcccggcuccugggagaucccgguggccgccggcgagcuggcccgcaaggaggacaucgacgcggucaucgccaucggggugcugauccggggcgccacgccccacuucgacuacaucgccagcgagguguccaaggggcucgcggaccugagccuggagcuccgcaagcccaucaccuucggcgucaucaccgccgacacccuggagcaggccaucgagcgggccgggacgaagcacggcaacaagggcugggaggccgcgcuguccgccaucgagauggccaaccucuucaagagccugcgcggcgggggcgggagcggcgggggcggcuccgggggcgggaaccugugccccuucggcgagguguucaacgccacccgguucgccagcgucuacgccuggaaccgcaagcggaucuccaacugcguggcggacuacagcgugcuguacaacuccgccagcuucuccacguucaagugcuacggcgucagccccaccaagcucaacgaccugugcuucaccaacguguacgccgacuccuucgugauccgcggggacgagguccggcagaucgcccccggccagaccgggaagaucgccgacuacaacuacaagcugccggacgacuucacgggcugcgugaucgcguggaacagcaacaaccucgacuccaaggucgggggcaacuacaacuaccuguaccgccuguuccgcaagagcaaccucaagcccuucgagcgggacaucuccaccgagaucuaccaggccggcagcacccccugcaacgggguggagggcuucaacugcuacuucccccugcaguccuacggguuccagccgaccaacggcgugggguaccagcccuaccggguggucgugcugagcuucgagcuccugcacgcccccgccacggugugcggccccaagugaggacuagucccuguucccagagcccacuuuuuuuucuuuuuuugaaauaaaauagccugucuuucagaucucaaaggcucuuuucagagccaccaaaaaaaaaaaaaaaaaaaaaaaaaaaaaaaaaaaaaaaaaaaaaaaaaaaaaaaaaaaaaaaaaaaaaaaaaaaaaaaaaaaaaaaaaaaaaaaaaaaaa

SEQ ID NO: 23629 - RNA, 4191 nt, Artificial Sequence
  SARS-CoV-2/Wuhan/WIV05/2019__EPI_ISL_402128 spike protein mRNA gc (1-1273)
aggagagggcgcuuggcuugcaaggacccugagcugcggcauugaagcacacccaacccaacucgacugaagucagccucacugaaccggaucugagaaucuucucucucugggcuugccagggcucuccgaaccuagcuagcauccucuucaauuccaacuagaaagcuuaccauguucguguuccugguccuccugccccuggugagcucccagugcgugaaccucaccacccgcacgcagcugccgcccgccuacaccaacagcuucacccggggcgucuacuaccccgacaagguguuccgcuccagcgugcugcacuccacccaggaccucuuccugcccuucuucagcaacgucacgugguuccacgccauccacguguccgggaccaacggcaccaagcgguucgacaacccggugcugcccuucaacgacggggucuacuucgcgagcaccgagaaguccaacaucauccgcggcuggaucuucgggacgacccucgacagcaagacccagucccugcugaucgugaacaacgccaccaacguggucaucaaggugugcgaguuccaguucugcaacgaccccuuccucggcguguacuaccacaagaacaacaagagcuggauggaguccgaguuccgggucuacagcuccgccaacaacugcacguucgaguacgugagccagcccuuccugauggaccuggagggcaagcaggggaacuucaagaaccuccgcgaguucguguucaagaacaucgacggcuacuucaagaucuacuccaagcacaccccgaucaaccugguccgggaccugccccagggguucagcgcccucgagccccugguggaccugcccaucggcaucaacaucacccgcuuccagacccuccuggcccugcaccgguccuaccucacgccgggggacagcagcuccggcuggaccgcgggcgccgccgccuacuacgugggguaccugcagccccgcaccuuccugcucaaguacaacgagaacggcaccaucacggacgcggucgacugcgcccuggacccccugagcgagaccaagugcacccucaaguccuucaccguggagaaggggaucuaccagacgagcaacuuccgggugcagcccaccgaguccaucguccgcuucccgaacaucaccaaccugugccccuucggcgagguguucaacgccacccgguucgccagcgucuacgccuggaaccgcaagcggaucuccaacugcguggcggacuacagcgugcuguacaacuccgccagcuucuccacguucaagugcuacggcgucagccccaccaagcucaacgaccugugcuucaccaacguguacgccgacuccuucgugauccgcggggacgagguccggcagaucgcccccggccagaccgggaagaucgccgacuacaacuacaagcugccggacgacuucacgggcugcgugaucgcguggaacagcaacaaccucgacuccaaggucgggggcaacuacaacuaccuguaccgccuguuccgcaagagcaaccucaagcccuucgagcgggacaucuccaccgagaucuaccaggccggcagcacccccugcaacgggguggagggcuucaacugcuacuucccccugcaguccuacggguuccagccgaccaacggcgugggguaccagcccuaccggguggucgugcugagcuucgagcuccugcacgcccccgccacggugugcggccccaagaaguccaccaaccuggucaagaacaagugcgugaacuucaacuucaacggccucaccgggaccggcgugcugaccgagagcaacaagaaguuccugccguuccagcaguucgggcgcgacaucgccgacacgaccgacgcgguccgcgacccccagacccuggagauccucgacaucacccccugcagcuucggcgggguguccgugaucacgccgggcaccaacaccagcaaccaggucgccgugcuguaccaggacgugaacugcaccgagguccccguggccauccacgccgaccagcugacgcccaccuggcggguguacuccaccggcagcaacgucuuccagacccgcgccgggugccucaucggcgcggagcacgugaacaacuccuacgagugcgacauccccaucggggccggcaucugcgccagcuaccagacgcagaccaacuccccgcggcgcgcccggagcguggcgucccagagcaucaucgccuacaccaugucccugggcgccgagaacagcgucgccuacuccaacaacagcaucgccauccccaccaacuucacgaucuccgugaccaccgagauccugcccgugagcaugaccaagacgagcgucgacugcaccauguacaucugcggggacuccaccgagugcagcaaccuccugcugcaguacggcuccuucugcacccagcucaaccgcgcgcugacggggaucgccguggagcaggacaagaacacccaggagguguucgcccaggucaagcagaucuacaagacgcccccgaucaaggacuucggcggguucaacuucagccagauccugcccgaccccuccaagcccagcaagcgguccuucaucgaggaccuccuguucaacaaggugacccuggccgacgccggcuucaucaagcaguacggcgacugccucggggacaucgcggcccgcgaccugaucugcgcccagaaguucaacggccugaccgugcucccgccccugcugaccgacgagaugaucgcccaguacaccagcgcccuccuggcggggaccaucacguccggcuggaccuucggggccggcgccgcccugcagauccccuucgcgaugcagauggccuaccgguucaacggcaucggggucacccagaacgugcucuacgagaaccagaagcugaucgccaaccaguucaacagcgccaucggcaagauccaggacucccugagcuccaccgccagcgcgcucgggaagcugcaggacguggucaaccagaacgcccaggcccugaacacgcucgugaagcagcuguccagcaacuucggcgccaucuccagcgugcugaacgacauccucucccgccuggacaaggucgaggccgaggugcagaucgaccggcugaucaccgggcgccuccagagccugcagaccuacgugacccagcagcugauccgggcggccgagauccgcgccagcgccaaccucgccgcgaccaagauguccgagugcguccugggccagagcaagcggguggacuucugcggcaagggguaccaccugauguccuucccccagagcgccccgcacggcguggucuuccuccacgugacguacguccccgcccaggagaagaacuucaccaccgcccccgcgaucugccacgacgggaaggcccacuucccccgcgagggcguguucguguccaacgggacccacugguucgucacgcagcggaacuucuacgagccgcagaucaucaccaccgacaacaccuucgugagcggcaacugcgacguggucaucggcaucgugaacaacacgguguacgacccccugcagcccgagcuggacuccuucaaggaggagcucgacaaguacuucaagaaccacaccagccccgacgucgaccugggggacaucuccggcaucaacgccagcguggugaacauccagaaggagaucgaccgccugaacgaggucgccaagaaccucaacgagucccugaucgaccugcaggagcucgggaaguacgagcaguacaucaaguggccgugguacaucuggcugggcuucaucgccggccugaucgcgaucgugauggugaccaucaugcucugcugcaugaccagcugcugcuccugccugaaggggugcugcagcugcggcuccugcugcaaguucgacgaggacgacagcgagcccguccugaagggggugaagcuccacuacacgugaggacuagucccuguucccagagcccacuuuuuuuucuuuuuuugaaauaaaauagccugucuuucagaucucaaaggcucuuuucagagccaccaaaaaaaaaaaaaaaaaaaaaaaaaaaaaaaaaaaaaaaaaaaaaaaaaaaaaaaaaaaaaaaaaaaaaaaaaaaaaaaaaaaaaaaaaaaaaaaaaaaaa

SEQ ID NO: 23630 - RNA, 4191 nt, Artificial Sequence
  SARS-CoV-2/Wuhan/WIV05/2019__EPI_ISL_402128 spike protein mRNA gc (1-1273)(D614G)
aggagagggcgcuuggcuugcaaggacccugagcugcggcauugaagcacacccaacccaacucgacugaagucagccucacugaaccggaucugagaaucuucucucucugggcuugccagggcucuccgaaccuagcuagcauccucuucaauuccaacuagaaagcuuaccauguucguguuccugguccuccugccccuggugagcucccagugcgugaaccucaccacccgcacgcagcugccgcccgccuacaccaacagcuucacccggggcgucuacuaccccgacaagguguuccgcuccagcgugcugcacuccacccaggaccucuuccugcccuucuucagcaacgucacgugguuccacgccauccacguguccgggaccaacggcaccaagcgguucgacaacccggugcugcccuucaacgacggggucuacuucgcgagcaccgagaaguccaacaucauccgcggcuggaucuucgggacgacccucgacagcaagacccagucccugcugaucgugaacaacgccaccaacguggucaucaaggugugcgaguuccaguucugcaacgaccccuuccucggcguguacuaccacaagaacaacaagagcuggauggaguccgaguuccgggucuacagcuccgccaacaacugcacguucgaguacgugagccagcccuuccugauggaccuggagggcaagcaggggaacuucaagaaccuccgcgaguucguguucaagaacaucgacggcuacuucaagaucuacuccaagcacaccccgaucaaccugguccgggaccugccccagggguucagcgcccucgagccccugguggaccugcccaucggcaucaacaucacccgcuuccagacccuccuggcccugcaccgguccuaccucacgccgggggacagcagcuccggcuggaccgcgggcgccgccgccuacuacgugggguaccugcagccccgcaccuuccugcucaaguacaacgagaacggcaccaucacggacgcggucgacugcgcccuggacccccugagcgagaccaagugcacccucaaguccuucaccguggagaaggggaucuaccagacgagcaacuuccgggugcagcccaccgaguccaucguccgcuucccgaacaucaccaaccugugccccuucggcgagguguucaacgccacccgguucgccagcgucuacgccuggaaccgcaagcggaucuccaacugcguggcggacuacagcgugcuguacaacuccgccagcuucuccacguucaagugcuacggcgucagccccaccaagcucaacgaccugugcuucaccaacguguacgccgacuccuucgugauccgcggggacgagguccggcagaucgcccccggccagaccgggaagaucgccgacuacaacuacaagcugccggacgacuucacgggcugcgugaucgcguggaacagcaacaaccucgacuccaaggucgggggcaacuacaacuaccuguaccgccuguuccgcaagagcaaccucaagcccuucgagcgggacaucuccaccgagaucuaccaggccggcagcacccccugcaacgggguggagggcuucaacugcuacuucccccugcaguccuacggguuccagccgaccaacggcgugggguaccagcccuaccggguggucgugcugagcuucgagcuccugcacgcccccgccacggugugcggccccaagaaguccaccaaccuggucaagaacaagugcgugaacuucaacuucaacggccucaccgggaccggcgugcugaccgagagcaacaagaaguuccugccguuccagcaguucgggcgcgacaucgccgacacgaccgacgcgguccgcgacccccagacccuggagauccucgacaucacccccugcagcuucggcgggguguccgugaucacgccgggcaccaacaccagcaaccaggucgccgugcuguaccagggcgugaacugcaccgagguccccguggccauccacgccgaccagcugacgcccaccuggcggguguacuccaccggcagcaacgucuuccagacccgcgccgggugccucaucggcgcggagcacgugaacaacuccuacgagugcgacauccccaucggggccggcaucugcgccagcuaccagacgcagaccaacuccccgcggcgcgcccggagcguggcgucccagagcaucaucgccuacaccaugucccugggcgccgagaacagcgucgccuacuccaacaacagcaucgccauccccaccaacuucacgaucuccgugaccaccgagauccugcccgugagcaugaccaagacgagcgucgacugcaccauguacaucugcggggacuccaccgagugcagcaaccuccugcugcaguacggcuccuucugcacccagcucaaccgcgcgcugacggggaucgccguggagcaggacaagaacacccaggagguguucgcccaggucaagcagaucuacaagacgcccccgaucaaggacuucggcggguucaacuucagccagauccugcccgaccccuccaagcccagcaagcgguccuucaucgaggaccuccuguucaacaaggugacccuggccgacgccggcuucaucaagcaguacggcgacugccucggggacaucgcggcccgcgaccugaucugcgcccagaaguucaacggccugaccgugcucccgccccugcugaccgacgagaugaucgcccaguacaccagcgcccuccuggcggggaccaucacguccggcuggaccuucggggccggcgccgcccugcagauccccuucgcgaugcagauggccuaccgguucaacggcaucggggucacccagaacgugcucuacgagaaccagaagcugaucgccaaccaguucaacagcgccaucggcaagauccaggacucccugagcuccaccgccagcgcgcucgggaagcugcaggacguggucaaccagaacgcccaggcccugaacacgcucgugaagcagcuguccagcaacuucggcgccaucuccagcgugcugaacgacauccucucccgccuggacaaggucgaggccgaggugcagaucgaccggcugaucaccgggcgccuccagagccugcagaccuacgugacccagcagcugauccgggcggccgagauccgcgccagcgccaaccucgccgcgaccaagauguccgagugcguccugggccagagcaagcggguggacuucugcggcaagggguaccaccugauguccuucccccagagcgccccgcacggcguggucuuccuccacgugacguacguccccgcccaggagaagaacuucaccaccgcccccgcgaucugccacgacgggaaggcccacuucccccgcgagggcguguucguguccaacgggacccacugguucgucacgcagcggaacuucuacgagccgcagaucaucaccaccgacaacaccuucgugagcggcaacugcgacguggucaucggcaucgugaacaacacgguguacgacccccugcagcccgagcuggacuccuucaaggaggagcucgacaaguacuucaagaaccacaccagccccgacgucgaccugggggacaucuccggcaucaacgccagcguggugaacauccagaaggagaucgaccgccugaacgaggucgccaagaaccucaacgagucccugaucgaccugcaggagcucgggaaguacgagcaguacaucaaguggccgugguacaucuggcugggcuucaucgccggccugaucgcgaucgugauggugaccaucaugcucugcugcaugaccagcugcugcuccugccugaaggggugcugcagcugcggcuccugcugcaaguucgacgaggacgacagcgagcccguccugaagggggugaagcuccacuacacgugaggacuagucccuguucccagagcccacuuuuuuuucuuuuuuugaaauaaaauagccugucuuucagaucucaaaggcucuuuucagagccaccaaaaaaaaaaaaaaaaaaaaaaaaaaaaaaaaaaaaaaaaaaaaaaaaaaaaaaaaaaaaaaaaaaaaaaaaaaaaaaaaaaaaaaaaaaaaaaaaaaaaa

SEQ ID NO: 23631 - RNA, 4191 nt, Artificial Sequence
  SARS-CoV-2/Wuhan/WIV05/2019__EPI_ISL_402128 spike protein mRNA gc (1-1273)(A222V_D614G)
aggagagggcgcuuggcuugcaaggacccugagcugcggcauugaagcacacccaacccaacucgacugaagucagccucacugaaccggaucugagaaucuucucucucugggcuugccagggcucuccgaaccuagcuagcauccucuucaauuccaacuagaaagcuuaccauguucguguuccugguccuccugccccuggugagcucccagugcgugaaccucaccacccgcacgcagcugccgcccgccuacaccaacagcuucacccggggcgucuacuaccccgacaagguguuccgcuccagcgugcugcacuccacccaggaccucuuccugcccuucuucagcaacgucacgugguuccacgccauccacguguccgggaccaacggcaccaagcgguucgacaacccggugcugcccuucaacgacggggucuacuucgcgagcaccgagaaguccaacaucauccgcggcuggaucuucgggacgacccucgacagcaagacccagucccugcugaucgugaacaacgccaccaacguggucaucaaggugugcgaguuccaguucugcaacgaccccuuccucggcguguacuaccacaagaacaacaagagcuggauggaguccgaguuccgggucuacagcuccgccaacaacugcacguucgaguacgugagccagcccuuccugauggaccuggagggcaagcaggggaacuucaagaaccuccgcgaguucguguucaagaacaucgacggcuacuucaagaucuacuccaagcacaccccgaucaaccugguccgggaccugccccagggguucagcguccucgagccccugguggaccugcccaucggcaucaacaucacccgcuuccagacccuccuggcccugcaccgguccuaccucacgccgggggacagcagcuccggcuggaccgcgggcgccgccgccuacuacgugggguaccugcagccccgcaccuuccugcucaaguacaacgagaacggcaccaucacggacgcggucgacugcgcccuggacccccugagcgagaccaagugcacccucaaguccuucaccguggagaaggggaucuaccagacgagcaacuuccgggugcagcccaccgaguccaucguccgcuucccgaacaucaccaaccugugccccuucggcgagguguucaacgccacccgguucgccagcgucuacgccuggaaccgcaagcggaucuccaacugcguggcggacuacagcgugcuguacaacuccgccagcuucuccacguucaagugcuacggcgucagccccaccaagcucaacgaccugugcuucaccaacguguacgccgacuccuucgugauccgcggggacgagguccggcagaucgcccccggccagaccgggaagaucgccgacuacaacuacaagcugccggacgacuucacgggcugcgugaucgcguggaacagcaacaaccucgacuccaaggucgggggcaacuacaacuaccuguaccgccuguuccgcaagagcaaccucaagcccuucgagcgggacaucuccaccgagaucuaccaggccggcagcacccccugcaacgggguggagggcuucaacugcuacuucccccugcaguccuacggguuccagccgaccaacggcgugggguaccagcccuaccggguggucgugcugagcuucgagcuccugcacgcccccgccacggugugcggccccaagaaguccaccaaccuggucaagaacaagugcgugaacuucaacuucaacggccucaccgggaccggcgugcugaccgagagcaacaagaaguuccugccguuccagcaguucgggcgcgacaucgccgacacgaccgacgcgguccgcgacccccagacccuggagauccucgacaucacccccugcagcuucggcgggguguccgugaucacgccgggcaccaacaccagcaaccaggucgccgugcuguaccagggcgugaacugcaccgagguccccguggccauccacgccgaccagcugacgcccaccuggcggguguacuccaccggcagcaacgucuuccagacccgcgccgggugccucaucggcgcggagcacgugaacaacuccuacgagugcgacauccccaucggggccggcaucugcgccagcuaccagacgcagaccaacuccccgcggcgcgcccggagcguggcgucccagagcaucaucgccuacaccaugucccugggcgccgagaacagcgucgccuacuccaacaacagcaucgccauccccaccaacuucacgaucuccgugaccaccgagauccugcccgugagcaugaccaagacgagcgucgacugcaccauguacaucugcggggacuccaccgagugcagcaaccuccugcugcaguacggcuccuucugcacccagcucaaccgcgcgcugacggggaucgccguggagcaggacaagaacacccaggagguguucgcccaggucaagcagaucuacaagacgcccccgaucaaggacuucggcggguucaacuucagccagauccugcccgaccccuccaagcccagcaagcgguccuucaucgaggaccuccuguucaacaaggugacccuggccgacgccggcuucaucaagcaguacggcgacugccucggggacaucgcggcccgcgaccugaucugcgcccagaaguucaacggccugaccgugcucccgccccugcugaccgacgagaugaucgcccaguacaccagcgcccuccuggcggggaccaucacguccggcuggaccuucggggccggcgccgcccugcagauccccuucgcgaugcagauggccuaccgguucaacggcaucggggucacccagaacgugcucuacgagaaccagaagcugaucgccaaccaguucaacagcgccaucggcaagauccaggacucccugagcuccaccgccagcgcgcucgggaagcugcaggacguggucaaccagaacgcccaggcccugaacacgcucgugaagcagcuguccagcaacuucggcgccaucuccagcgugcugaacgacauccucucccgccuggacaaggucgaggccgaggugcagaucgaccggcugaucaccgggcgccuccagagccugcagaccuacgugacccagcagcugauccgggcggccgagauccgcgccagcgccaaccucgccgcgaccaagauguccgagugcguccugggccagagcaagcggguggacuucugcggcaagggguaccaccugauguccuucccccagagcgccccgcacggcguggucuuccuccacgugacguacguccccgcccaggagaagaacuucaccaccgcccccgcgaucugccacgacgggaaggcccacuucccccgcgagggcguguucguguccaacgggacccacugguucgucacgcagcggaacuucuacgagccgcagaucaucaccaccgacaacaccuucgugagcggcaacugcgacguggucaucggcaucgugaacaacacgguguacgacccccugcagcccgagcuggacuccuucaaggaggagcucgacaaguacuucaagaaccacaccagccccgacgucgaccugggggacaucuccggcaucaacgccagcguggugaacauccagaaggagaucgaccgccugaacgaggucgccaagaaccucaacgagucccugaucgaccugcaggagcucgggaaguacgagcaguacaucaaguggccgugguacaucuggcugggcuucaucgccggccugaucgcgaucgugauggugaccaucaugcucugcugcaugaccagcugcugcuccugccugaaggggugcugcagcugcggcuccugcugcaaguucgacgaggacgacagcgagcccguccugaagggggugaagcuccacuacacgugaggacuagucccuguucccagagcccacuuuuuuuucuuuuuuugaaauaaaauagccugucuuucagaucucaaaggcucuuuucagagccaccaaaaaaaaaaaaaaaaaaaaaaaaaaaaaaaaaaaaaaaaaaaaaaaaaaaaaaaaaaaaaaaaaaaaaaaaaaaaaaaaaaaaaaaaaaaaaaaaaaaaa

SEQ ID NO: 23632 - RNA, 4191 nt, Artificial Sequence
  SARS-CoV-2/Wuhan/WIV05/2019__EPI_ISL_402128 spike protein mRNA gc (1-1273)(N439K_D614G)
aggagagggcgcuuggcuugcaaggacccugagcugcggcauugaagcacacccaacccaacucgacugaagucagccucacugaaccggaucugagaaucuucucucucugggcuugccagggcucuccgaaccuagcuagcauccucuucaauuccaacuagaaagcuuaccauguucguguuccugguccuccugccccuggugagcucccagugcgugaaccucaccacccgcacgcagcugccgcccgccuacaccaacagcuucacccggggcgucuacuaccccgacaagguguuccgcuccagcgugcugcacuccacccaggaccucuuccugcccuucuucagcaacgucacgugguuccacgccauccacguguccgggaccaacggcaccaagcgguucgacaacccggugcugcccuucaacgacggggucuacuucgcgagcaccgagaaguccaacaucauccgcggcuggaucuucgggacgacccucgacagcaagacccagucccugcugaucgugaacaacgccaccaacguggucaucaaggugugcgaguuccaguucugcaacgaccccuuccucggcguguacuaccacaagaacaacaagagcuggauggaguccgaguuccgggucuacagcuccgccaacaacugcacguucgaguacgugagccagcccuuccugauggaccuggagggcaagcaggggaacuucaagaaccuccgcgaguucguguucaagaacaucgacggcuacuucaagaucuacuccaagcacaccccgaucaaccugguccgggaccugccccagggguucagcgcccucgagccccugguggaccugcccaucggcaucaacaucacccgcuuccagacccuccuggcccugcaccgguccuaccucacgccgggggacagcagcuccggcuggaccgcgggcgccgccgccuacuacgugggguaccugcagccccgcaccuuccugcucaaguacaacgagaacggcaccaucacggacgcggucgacugcgcccuggacccccugagcgagaccaagugcacccucaaguccuucaccguggagaaggggaucuaccagacgagcaacuuccgggugcagcccaccgaguccaucguccgcuucccgaacaucaccaaccugugccccuucggcgagguguucaacgccacccgguucgccagcgucuacgccuggaaccgcaagcggaucuccaacugcguggcggacuacagcgugcuguacaacuccgccagcuucuccacguucaagugcuacggcgucagccccaccaagcucaacgaccugugcuucaccaacguguacgccgacuccuucgugauccgcggggacgagguccggcagaucgcccccggccagaccgggaagaucgccgacuacaacuacaagcugccggacgacuucacgggcugcgugaucgcguggaacagcaagaaccucgacuccaaggucgggggcaacuacaacuaccuguaccgccuguuccgcaagagcaaccucaagcccuucgagcgggacaucuccaccgagaucuaccaggccggcagcacccccugcaacgggguggagggcuucaacugcuacuucccccugcaguccuacggguuccagccgaccaacggcgugggguaccagcccuaccggguggucgugcugagcuucgagcuccugcacgcccccgccacggugugcggccccaagaaguccaccaaccuggucaagaacaagugcgugaacuucaacuucaacggccucaccgggaccggcgugcugaccgagagcaacaagaaguuccugccguuccagcaguucgggcgcgacaucgccgacacgaccgacgcgguccgcgacccccagacccuggagauccucgacaucacccccugcagcuucggcgggguguccgugaucacgccgggcaccaacaccagcaaccaggucgccgugcuguaccagggcgugaacugcaccgagguccccguggccauccacgccgaccagcugacgcccaccuggcggguguacuccaccggcagcaacgucuuccagacccgcgccgggugccucaucggcgcggagcacgugaacaacuccuacgagugcgacauccccaucggggccggcaucugcgccagcuaccagacgcagaccaacuccccgcggcgcgcccggagcguggcgucccagagcaucaucgccuacaccaugucccugggcgccgagaacagcgucgccuacuccaacaacagcaucgccauccccaccaacuucacgaucuccgugaccaccgagauccugcccgugagcaugaccaagacgagcgucgacugcaccauguacaucugcggggacuccaccgagugcagcaaccuccugcugcaguacggcuccuucugcacccagcucaaccgcgcgcugacggggaucgccguggagcaggacaagaacacccaggagguguucgcccaggucaagcagaucuacaagacgcccccgaucaaggacuucggcggguucaacuucagccagauccugcccgaccccuccaagcccagcaagcgguccuucaucgaggaccuccuguucaacaaggugacccuggccgacgccggcuucaucaagcaguacggcgacugccucggggacaucgcggcccgcgaccugaucugcgcccagaaguucaacggccugaccgugcucccgccccugcugaccgacgagaugaucgcccaguacaccagcgcccuccuggcggggaccaucacguccggcuggaccuucggggccggcgccgcccugcagauccccuucgcgaugcagauggccuaccgguucaacggcaucggggucacccagaacgugcucuacgagaaccagaagcugaucgccaaccaguucaacagcgccaucggcaagauccaggacucccugagcuccaccgccagcgcgcucgggaagcugcaggacguggucaaccagaacgcccaggcccugaacacgcucgugaagcagcuguccagcaacuucggcgccaucuccagcgugcugaacgacauccucucccgccuggacaaggucgaggccgaggugcagaucgaccggcugaucaccgggcgccuccagagccugcagaccuacgugacccagcagcugauccgggcggccgagauccgcgccagcgccaaccucgccgcgaccaagauguccgagugcguccugggccagagcaagcggguggacuucugcggcaagggguaccaccugauguccuucccccagagcgccccgcacggcguggucuuccuccacgugacguacguccccgcccaggagaagaacuucaccaccgcccccgcgaucugccacgacgggaaggcccacuucccccgcgagggcguguucguguccaacgggacccacugguucgucacgcagcggaacuucuacgagccgcagaucaucaccaccgacaacaccuucgugagcggcaacugcgacguggucaucggcaucgugaacaacacgguguacgacccccugcagcccgagcuggacuccuucaaggaggagcucgacaaguacuucaagaaccacaccagccccgacgucgaccugggggacaucuccggcaucaacgccagcguggugaacauccagaaggagaucgaccgccugaacgaggucgccaagaaccucaacgagucccugaucgaccugcaggagcucgggaaguacgagcaguacaucaaguggccgugguacaucuggcugggcuucaucgccggccugaucgcgaucgugauggugaccaucaugcucugcugcaugaccagcugcugcuccugccugaaggggugcugcagcugcggcuccugcugcaaguucgacgaggacgacagcgagcccguccugaagggggugaagcuccacuacacgugaggacuagucccuguucccagagcccacuuuuuuuucuuuuuuugaaauaaaauagccugucuuucagaucucaaaggcucuuuucagagccaccaaaaaaaaaaaaaaaaaaaaaaaaaaaaaaaaaaaaaaaaaaaaaaaaaaaaaaaaaaaaaaaaaaaaaaaaaaaaaaaaaaaaaaaaaaaaaaaaaaaaa

SEQ ID NO: 23633 - RNA, 4191 nt, Artificial Sequence
  SARS-CoV-2/Wuhan/WIV05/2019__EPI_ISL_402128 spike protein mRNA gc (1-1273)(S477N_D614G)
aggagagggcgcuuggcuugcaaggacccugagcugcggcauugaagcacacccaacccaacucgacugaagucagccucacugaaccggaucugagaaucuucucucucugggcuugccagggcucuccgaaccuagcuagcauccucuucaauuccaacuagaaagcuuaccauguucguguuccugguccuccugccccuggugagcucccagugcgugaaccucaccacccgcacgcagcugccgcccgccuacaccaacagcuucacccggggcgucuacuaccccgacaagguguuccgcuccagcgugcugcacuccacccaggaccucuuccugcccuucuucagcaacgucacgugguuccacgccauccacguguccgggaccaacggcaccaagcgguucgacaacccggugcugcccuucaacgacggggucuacuucgcgagcaccgagaaguccaacaucauccgcggcuggaucuucgggacgacccucgacagcaagacccagucccugcugaucgugaacaacgccaccaacguggucaucaaggugugcgaguuccaguucugcaacgaccccuuccucggcguguacuaccacaagaacaacaagagcuggauggaguccgaguuccgggucuacagcuccgccaacaacugcacguucgaguacgugagccagcccuuccugauggaccuggagggcaagcaggggaacuucaagaaccuccgcgaguucguguucaagaacaucgacggcuacuucaagaucuacuccaagcacaccccgaucaaccugguccgggaccugccccagggguucagcgcccucgagccccugguggaccugcccaucggcaucaacaucacccgcuuccagacccuccuggcccugcaccgguccuaccucacgccgggggacagcagcuccggcuggaccgcgggcgccgccgccuacuacgugggguaccugcagccccgcaccuuccugcucaaguacaacgagaacggcaccaucacggacgcggucgacugcgcccuggacccccugagcgagaccaagugcacccucaaguccuucaccguggagaaggggaucuaccagacgagcaacuuccgggugcagcccaccgaguccaucguccgcuucccgaacaucaccaaccugugccccuucggcgagguguucaacgccacccgguucgccagcgucuacgccuggaaccgcaagcggaucuccaacugcguggcggacuacagcgugcuguacaacuccgccagcuucuccacguucaagugcuacggcgucagccccaccaagcucaacgaccugugcuucaccaacguguacgccgacuccuucgugauccgcggggacgagguccggcagaucgcccccggccagaccgggaagaucgccgacuacaacuacaagcugccggacgacuucacgggcugcgugaucgcguggaacagcaacaaccucgacuccaaggucgggggcaacuacaacuaccuguaccgccuguuccgcaagagcaaccucaagcccuucgagcgggacaucuccaccgagaucuaccaggccggcaacacccccugcaacgggguggagggcuucaacugcuacuucccccugcaguccuacggguuccagccgaccaacggcgugggguaccagcccuaccggguggucgugcugagcuucgagcuccugcacgcccccgccacggugugcggccccaagaaguccaccaaccuggucaagaacaagugcgugaacuucaacuucaacggccucaccgggaccggcgugcugaccgagagcaacaagaaguuccugccguuccagcaguucgggcgcgacaucgccgacacgaccgacgcgguccgcgacccccagacccuggagauccucgacaucacccccugcagcuucggcgggguguccgugaucacgccgggcaccaacaccagcaaccaggucgccgugcuguaccagggcgugaacugcaccgagguccccguggccauccacgccgaccagcugacgcccaccuggcggguguacuccaccggcagcaacgucuuccagacccgcgccgggugccucaucggcgcggagcacgugaacaacuccuacgagugcgacauccccaucggggccggcaucugcgccagcuaccagacgcagaccaacuccccgcggcgcgcccggagcguggcgucccagagcaucaucgccuacaccaugucccugggcgccgagaacagcgucgccuacuccaacaacagcaucgccauccccaccaacuucacgaucuccgugaccaccgagauccugcccgugagcaugaccaagacgagcgucgacugcaccauguacaucugcggggacuccaccgagugcagcaaccuccugcugcaguacggcuccuucugcacccagcucaaccgcgcgcugacggggaucgccguggagcaggacaagaacacccaggagguguucgcccaggucaagcagaucuacaagacgcccccgaucaaggacuucggcggguucaacuucagccagauccugcccgaccccuccaagcccagcaagcgguccuucaucgaggaccuccuguucaacaaggugacccuggccgacgccggcuucaucaagcaguacggcgacugccucggggacaucgcggcccgcgaccugaucugcgcccagaaguucaacggccugaccgugcucccgccccugcugaccgacgagaugaucgcccaguacaccagcgcccuccuggcggggaccaucacguccggcuggaccuucggggccggcgccgcccugcagauccccuucgcgaugcagauggccuaccgguucaacggcaucggggucacccagaacgugcucuacgagaaccagaagcugaucgccaaccaguucaacagcgccaucggcaagauccaggacucccugagcuccaccgccagcgcgcucgggaagcugcaggacguggucaaccagaacgcccaggcccugaacacgcucgugaagcagcuguccagcaacuucggcgccaucuccagcgugcugaacgacauccucucccgccuggacaaggucgaggccgaggugcagaucgaccggcugaucaccgggcgccuccagagccugcagaccuacgugacccagcagcugauccgggcggccgagauccgcgccagcgccaaccucgccgcgaccaagauguccgagugcguccugggccagagcaagcggguggacuucugcggcaagggguaccaccugauguccuucccccagagcgccccgcacggcguggucuuccuccacgugacguacguccccgcccaggagaagaacuucaccaccgcccccgcgaucugccacgacgggaaggcccacuucccccgcgagggcguguucguguccaacgggacccacugguucgucacgcagcggaacuucuacgagccgcagaucaucaccaccgacaacaccuucgugagcggcaacugcgacguggucaucggcaucgugaacaacacgguguacgacccccugcagcccgagcuggacuccuucaaggaggagcucgacaaguacuucaagaaccacaccagccccgacgucgaccugggggacaucuccggcaucaacgccagcguggugaacauccagaaggagaucgaccgccugaacgaggucgccaagaaccucaacgagucccugaucgaccugcaggagcucgggaaguacgagcaguacaucaaguggccgugguacaucuggcugggcuucaucgccggccugaucgcgaucgugauggugaccaucaugcucugcugcaugaccagcugcugcuccugccugaaggggugcugcagcugcggcuccugcugcaaguucgacgaggacgacagcgagcccguccugaagggggugaagcuccacuacacgugaggacuagucccuguucccagagcccacuuuuuuuucuuuuuuugaaauaaaauagccugucuuucagaucucaaaggcucuuuucagagccaccaaaaaaaaaaaaaaaaaaaaaaaaaaaaaaaaaaaaaaaaaaaaaaaaaaaaaaaaaaaaaaaaaaaaaaaaaaaaaaaaaaaaaaaaaaaaaaaaaaaaa

SEQ ID NO: 23634 - RNA, 4191 nt, Artificial Sequence
  SARS-CoV-2/Wuhan/WIV05/2019__EPI_ISL_402128 spike protein mRNA gc (1-1273)(N501Y_D614G)
aggagagggcgcuuggcuugcaaggacccugagcugcggcauugaagcacacccaacccaacucgacugaagucagccucacugaaccggaucugagaaucuucucucucugggcuugccagggcucuccgaaccuagcuagcauccucuucaauuccaacuagaaagcuuaccauguucguguuccugguccuccugccccuggugagcucccagugcgugaaccucaccacccgcacgcagcugccgcccgccuacaccaacagcuucacccggggcgucuacuaccccgacaagguguuccgcuccagcgugcugcacuccacccaggaccucuuccugcccuucuucagcaacgucacgugguuccacgccauccacguguccgggaccaacggcaccaagcgguucgacaacccggugcugcccuucaacgacggggucuacuucgcgagcaccgagaaguccaacaucauccgcggcuggaucuucgggacgacccucgacagcaagacccagucccugcugaucgugaacaacgccaccaacguggucaucaaggugugcgaguuccaguucugcaacgaccccuuccucggcguguacuaccacaagaacaacaagagcuggauggaguccgaguuccgggucuacagcuccgccaacaacugcacguucgaguacgugagccagcccuuccugauggaccuggagggcaagcaggggaacuucaagaaccuccgcgaguucguguucaagaacaucgacggcuacuucaagaucuacuccaagcacaccccgaucaaccugguccgggaccugccccagggguucagcgcccucgagccccugguggaccugcccaucggcaucaacaucacccgcuuccagacccuccuggcccugcaccgguccuaccucacgccgggggacagcagcuccggcuggaccgcgggcgccgccgccuacuacgugggguaccugcagccccgcaccuuccugcucaaguacaacgagaacggcaccaucacggacgcggucgacugcgcccuggacccccugagcgagaccaagugcacccucaaguccuucaccguggagaaggggaucuaccagacgagcaacuuccgggugcagcccaccgaguccaucguccgcuucccgaacaucaccaaccugugccccuucggcgagguguucaacgccacccgguucgccagcgucuacgccuggaaccgcaagcggaucuccaacugcguggcggacuacagcgugcuguacaacuccgccagcuucuccacguucaagugcuacggcgucagccccaccaagcucaacgaccugugcuucaccaacguguacgccgacuccuucgugauccgcggggacgagguccggcagaucgcccccggccagaccgggaagaucgccgacuacaacuacaagcugccggacgacuucacgggcugcgugaucgcguggaacagcaacaaccucgacuccaaggucgggggcaacuacaacuaccuguaccgccuguuccgcaagagcaaccucaagcccuucgagcgggacaucuccaccgagaucuaccaggccggcagcacccccugcaacgggguggagggcuucaacugcuacuucccccugcaguccuacggguuccagccgaccuacggcgugggguaccagcccuaccggguggucgugcugagcuucgagcuccugcacgcccccgccacggugugcggccccaagaaguccaccaaccuggucaagaacaagugcgugaacuucaacuucaacggccucaccgggaccggcgugcugaccgagagcaacaagaaguuccugccguuccagcaguucgggcgcgacaucgccgacacgaccgacgcgguccgcgacccccagacccuggagauccucgacaucacccccugcagcuucggcgggguguccgugaucacgccgggcaccaacaccagcaaccaggucgccgugcuguaccagggcgugaacugcaccgagguccccguggccauccacgccgaccagcugacgcccaccuggcggguguacuccaccggcagcaacgucuuccagacccgcgccgggugccucaucggcgcggagcacgugaacaacuccuacgagugcgacauccccaucggggccggcaucugcgccagcuaccagacgcagaccaacuccccgcggcgcgcccggagcguggcgucccagagcaucaucgccuacaccaugucccugggcgccgagaacagcgucgccuacuccaacaacagcaucgccauccccaccaacuucacgaucuccgugaccaccgagauccugcccgugagcaugaccaagacgagcgucgacugcaccauguacaucugcggggacuccaccgagugcagcaaccuccugcugcaguacggcuccuucugcacccagcucaaccgcgcgcugacggggaucgccguggagcaggacaagaacacccaggagguguucgcccaggucaagcagaucuacaagacgcccccgaucaaggacuucggcggguucaacuucagccagauccugcccgaccccuccaagcccagcaagcgguccuucaucgaggaccuccuguucaacaaggugacccuggccgacgccggcuucaucaagcaguacggcgacugccucggggacaucgcggcccgcgaccugaucugcgcccagaaguucaacggccugaccgugcucccgccccugcugaccgacgagaugaucgcccaguacaccagcgcccuccuggcggggaccaucacguccggcuggaccuucggggccggcgccgcccugcagauccccuucgcgaugcagauggccuaccgguucaacggcaucggggucacccagaacgugcucuacgagaaccagaagcugaucgccaaccaguucaacagcgccaucggcaagauccaggacucccugagcuccaccgccagcgcgcucgggaagcugcaggacguggucaaccagaacgcccaggcccugaacacgcucgugaagcagcuguccagcaacuucggcgccaucuccagcgugcugaacgacauccucucccgccuggacaaggucgaggccgaggugcagaucgaccggcugaucaccgggcgccuccagagccugcagaccuacgugacccagcagcugauccgggcggccgagauccgcgccagcgccaaccucgccgcgaccaagauguccgagugcguccugggccagagcaagcggguggacuucugcggcaagggguaccaccugauguccuucccccagagcgccccgcacggcguggucuuccuccacgugacguacguccccgcccaggagaagaacuucaccaccgcccccgcgaucugccacgacgggaaggcccacuucccccgcgagggcguguucguguccaacgggacccacugguucgucacgcagcggaacuucuacgagccgcagaucaucaccaccgacaacaccuucgugagcggcaacugcgacguggucaucggcaucgugaacaacacgguguacgacccccugcagcccgagcuggacuccuucaaggaggagcucgacaaguacuucaagaaccacaccagccccgacgucgaccugggggacaucuccggcaucaacgccagcguggugaacauccagaaggagaucgaccgccugaacgaggucgccaagaaccucaacgagucccugaucgaccugcaggagcucgggaaguacgagcaguacaucaaguggccgugguacaucuggcugggcuucaucgccggccugaucgcgaucgugauggugaccaucaugcucugcugcaugaccagcugcugcuccugccugaaggggugcugcagcugcggcuccugcugcaaguucgacgaggacgacagcgagcccguccugaagggggugaagcuccacuacacgugaggacuagucccuguucccagagcccacuuuuuuuucuuuuuuugaaauaaaauagccugucuuucagaucucaaaggcucuuuucagagccaccaaaaaaaaaaaaaaaaaaaaaaaaaaaaaaaaaaaaaaaaaaaaaaaaaaaaaaaaaaaaaaaaaaaaaaaaaaaaaaaaaaaaaaaaaaaaaaaaaaaaa

SEQ ID NO: 23635 - RNA, 4185 nt, Artificial Sequence
  SARS-CoV-2/Wuhan/WIV05/2019__EPI_ISL_402128 spike protein mRNA gc (1-1273)(H69del_V70del_D614G)
aggagagggcgcuuggcuugcaaggacccugagcugcggcauugaagcacacccaacccaacucgacugaagucagccucacugaaccggaucugagaaucuucucucucugggcuugccagggcucuccgaaccuagcuagcauccucuucaauuccaacuagaaagcuuaccauguucguguuccugguccuccugccccuggugagcucccagugcgugaaccucaccacccgcacgcagcugccgcccgccuacaccaacagcuucacccggggcgucuacuaccccgacaagguguuccgcuccagcgugcugcacuccacccaggaccucuuccugcccuucuucagcaacgucacgugguuccacgccaucuccgggaccaacggcaccaagcgguucgacaacccggugcugcccuucaacgacggggucuacuucgcgagcaccgagaaguccaacaucauccgcggcuggaucuucgggacgacccucgacagcaagacccagucccugcugaucgugaacaacgccaccaacguggucaucaaggugugcgaguuccaguucugcaacgaccccuuccucggcguguacuaccacaagaacaacaagagcuggauggaguccgaguuccgggucuacagcuccgccaacaacugcacguucgaguacgugagccagcccuuccugauggaccuggagggcaagcaggggaacuucaagaaccuccgcgaguucguguucaagaacaucgacggcuacuucaagaucuacuccaagcacaccccgaucaaccugguccgggaccugccccagggguucagcgcccucgagccccugguggaccugcccaucggcaucaacaucacccgcuuccagacccuccuggcccugcaccgguccuaccucacgccgggggacagcagcuccggcuggaccgcgggcgccgccgccuacuacgugggguaccugcagccccgcaccuuccugcucaaguacaacgagaacggcaccaucacggacgcggucgacugcgcccuggacccccugagcgagaccaagugcacccucaaguccuucaccguggagaaggggaucuaccagacgagcaacuuccgggugcagcccaccgaguccaucguccgcuucccgaacaucaccaaccugugccccuucggcgagguguucaacgccacccgguucgccagcgucuacgccuggaaccgcaagcggaucuccaacugcguggcggacuacagcgugcuguacaacuccgccagcuucuccacguucaagugcuacggcgucagccccaccaagcucaacgaccugugcuucaccaacguguacgccgacuccuucgugauccgcggggacgagguccggcagaucgcccccggccagaccgggaagaucgccgacuacaacuacaagcugccggacgacuucacgggcugcgugaucgcguggaacagcaacaaccucgacuccaaggucgggggcaacuacaacuaccuguaccgccuguuccgcaagagcaaccucaagcccuucgagcgggacaucuccaccgagaucuaccaggccggcagcacccccugcaacgggguggagggcuucaacugcuacuucccccugcaguccuacggguuccagccgaccaacggcgugggguaccagcccuaccggguggucgugcugagcuucgagcuccugcacgcccccgccacggugugcggccccaagaaguccaccaaccuggucaagaacaagugcgugaacuucaacuucaacggccucaccgggaccggcgugcugaccgagagcaacaagaaguuccugccguuccagcaguucgggcgcgacaucgccgacacgaccgacgcgguccgcgacccccagacccuggagauccucgacaucacccccugcagcuucggcgggguguccgugaucacgccgggcaccaacaccagcaaccaggucgccgugcuguaccagggcgugaacugcaccgagguccccguggccauccacgccgaccagcugacgcccaccuggcggguguacuccaccggcagcaacgucuuccagacccgcgccgggugccucaucggcgcggagcacgugaacaacuccuacgagugcgacauccccaucggggccggcaucugcgccagcuaccagacgcagaccaacuccccgcggcgcgcccggagcguggcgucccagagcaucaucgccuacaccaugucccugggcgccgagaacagcgucgccuacuccaacaacagcaucgccauccccaccaacuucacgaucuccgugaccaccgagauccugcccgugagcaugaccaagacgagcgucgacugcaccauguacaucugcggggacuccaccgagugcagcaaccuccugcugcaguacggcuccuucugcacccagcucaaccgcgcgcugacggggaucgccguggagcaggacaagaacacccaggagguguucgcccaggucaagcagaucuacaagacgcccccgaucaaggacuucggcggguucaacuucagccagauccugcccgaccccuccaagcccagcaagcgguccuucaucgaggaccuccuguucaacaaggugacccuggccgacgccggcuucaucaagcaguacggcgacugccucggggacaucgcggcccgcgaccugaucugcgcccagaaguucaacggccugaccgugcucccgccccugcugaccgacgagaugaucgcccaguacaccagcgcccuccuggcggggaccaucacguccggcuggaccuucggggccggcgccgcccugcagauccccuucgcgaugcagauggccuaccgguucaacggcaucggggucacccagaacgugcucuacgagaaccagaagcugaucgccaaccaguucaacagcgccaucggcaagauccaggacucccugagcuccaccgccagcgcgcucgggaagcugcaggacguggucaaccagaacgcccaggcccugaacacgcucgugaagcagcuguccagcaacuucggcgccaucuccagcgugcugaacgacauccucucccgccuggacaaggucgaggccgaggugcagaucgaccggcugaucaccgggcgccuccagagccugcagaccuacgugacccagcagcugauccgggcggccgagauccgcgccagcgccaaccucgccgcgaccaagauguccgagugcguccugggccagagcaagcggguggacuucugcggcaagggguaccaccugauguccuucccccagagcgccccgcacggcguggucuuccuccacgugacguacguccccgcccaggagaagaacuucaccaccgcccccgcgaucugccacgacgggaaggcccacuucccccgcgagggcguguucguguccaacgggacccacugguucgucacgcagcggaacuucuacgagccgcagaucaucaccaccgacaacaccuucgugagcggcaacugcgacguggucaucggcaucgugaacaacacgguguacgacccccugcagcccgagcuggacuccuucaaggaggagcucgacaaguacuucaagaaccacaccagccccgacgucgaccugggggacaucuccggcaucaacgccagcguggugaacauccagaaggagaucgaccgccugaacgaggucgccaagaaccucaacgagucccugaucgaccugcaggagcucgggaaguacgagcaguacaucaaguggccgugguacaucuggcugggcuucaucgccggccugaucgcgaucgugauggugaccaucaugcucugcugcaugaccagcugcugcuccugccugaaggggugcugcagcugcggcuccugcugcaaguucgacgaggacgacagcgagcccguccugaagggggugaagcuccacuacacgugaggacuagucccuguucccagagcccacuuuuuuuucuuuuuuugaaauaaaauagccugucuuucagaucucaaaggcucuuuucagagccaccaaaaaaaaaaaaaaaaaaaaaaaaaaaaaaaaaaaaaaaaaaaaaaaaaaaaaaaaaaaaaaaaaaaaaaaaaaaaaaaaaaaaaaaaaaaaaaaaaaaaa

SEQ ID NO: 23636 - RNA, 4191 nt, Artificial Sequence
  SARS-CoV-2/Wuhan/WIV05/2019__EPI_ISL_402128 spike protein mRNA gc (1-1273)(Y453F_D614G)
aggagagggcgcuuggcuugcaaggacccugagcugcggcauugaagcacacccaacccaacucgacugaagucagccucacugaaccggaucugagaaucuucucucucugggcuugccagggcucuccgaaccuagcuagcauccucuucaauuccaacuagaaagcuuaccauguucguguuccugguccuccugccccuggugagcucccagugcgugaaccucaccacccgcacgcagcugccgcccgccuacaccaacagcuucacccggggcgucuacuaccccgacaagguguuccgcuccagcgugcugcacuccacccaggaccucuuccugcccuucuucagcaacgucacgugguuccacgccauccacguguccgggaccaacggcaccaagcgguucgacaacccggugcugcccuucaacgacggggucuacuucgcgagcaccgagaaguccaacaucauccgcggcuggaucuucgggacgacccucgacagcaagacccagucccugcugaucgugaacaacgccaccaacguggucaucaaggugugcgaguuccaguucugcaacgaccccuuccucggcguguacuaccacaagaacaacaagagcuggauggaguccgaguuccgggucuacagcuccgccaacaacugcacguucgaguacgugagccagcccuuccugauggaccuggagggcaagcaggggaacuucaagaaccuccgcgaguucguguucaagaacaucgacggcuacuucaagaucuacuccaagcacaccccgaucaaccugguccgggaccugccccagggguucagcgcccucgagccccugguggaccugcccaucggcaucaacaucacccgcuuccagacccuccuggcccugcaccgguccuaccucacgccgggggacagcagcuccggcuggaccgcgggcgccgccgccuacuacgugggguaccugcagccccgcaccuuccugcucaaguacaacgagaacggcaccaucacggacgcggucgacugcgcccuggacccccugagcgagaccaagugcacccucaaguccuucaccguggagaaggggaucuaccagacgagcaacuuccgggugcagcccaccgaguccaucguccgcuucccgaacaucaccaaccugugccccuucggcgagguguucaacgccacccgguucgccagcgucuacgccuggaaccgcaagcggaucuccaacugcguggcggacuacagcgugcuguacaacuccgccagcuucuccacguucaagugcuacggcgucagccccaccaagcucaacgaccugugcuucaccaacguguacgccgacuccuucgugauccgcggggacgagguccggcagaucgcccccggccagaccgggaagaucgccgacuacaacuacaagcugccggacgacuucacgggcugcgugaucgcguggaacagcaacaaccucgacuccaaggucgggggcaacuacaacuaccuguuccgccuguuccgcaagagcaaccucaagcccuucgagcgggacaucuccaccgagaucuaccaggccggcagcacccccugcaacgggguggagggcuucaacugcuacuucccccugcaguccuacggguuccagccgaccaacggcgugggguaccagcccuaccggguggucgugcugagcuucgagcuccugcacgcccccgccacggugugcggccccaagaaguccaccaaccuggucaagaacaagugcgugaacuucaacuucaacggccucaccgggaccggcgugcugaccgagagcaacaagaaguuccugccguuccagcaguucgggcgcgacaucgccgacacgaccgacgcgguccgcgacccccagacccuggagauccucgacaucacccccugcagcuucggcgggguguccgugaucacgccgggcaccaacaccagcaaccaggucgccgugcuguaccagggcgugaacugcaccgagguccccguggccauccacgccgaccagcugacgcccaccuggcggguguacuccaccggcagcaacgucuuccagacccgcgccgggugccucaucggcgcggagcacgugaacaacuccuacgagugcgacauccccaucggggccggcaucugcgccagcuaccagacgcagaccaacuccccgcggcgcgcccggagcguggcgucccagagcaucaucgccuacaccaugucccugggcgccgagaacagcgucgccuacuccaacaacagcaucgccauccccaccaacuucacgaucuccgugaccaccgagauccugcccgugagcaugaccaagacgagcgucgacugcaccauguacaucugcggggacuccaccgagugcagcaaccuccugcugcaguacggcuccuucugcacccagcucaaccgcgcgcugacggggaucgccguggagcaggacaagaacacccaggagguguucgcccaggucaagcagaucuacaagacgcccccgaucaaggacuucggcggguucaacuucagccagauccugcccgaccccuccaagcccagcaagcgguccuucaucgaggaccuccuguucaacaaggugacccuggccgacgccggcuucaucaagcaguacggcgacugccucggggacaucgcggcccgcgaccugaucugcgcccagaaguucaacggccugaccgugcucccgccccugcugaccgacgagaugaucgcccaguacaccagcgcccuccuggcggggaccaucacguccggcuggaccuucggggccggcgccgcccugcagauccccuucgcgaugcagauggccuaccgguucaacggcaucggggucacccagaacgugcucuacgagaaccagaagcugaucgccaaccaguucaacagcgccaucggcaagauccaggacucccugagcuccaccgccagcgcgcucgggaagcugcaggacguggucaaccagaacgcccaggcccugaacacgcucgugaagcagcuguccagcaacuucggcgccaucuccagcgugcugaacgacauccucucccgccuggacaaggucgaggccgaggugcagaucgaccggcugaucaccgggcgccuccagagccugcagaccuacgugacccagcagcugauccgggcggccgagauccgcgccagcgccaaccucgccgcgaccaagauguccgagugcguccugggccagagcaagcggguggacuucugcggcaagggguaccaccugauguccuucccccagagcgccccgcacggcguggucuuccuccacgugacguacguccccgcccaggagaagaacuucaccaccgcccccgcgaucugccacgacgggaaggcccacuucccccgcgagggcguguucguguccaacgggacccacugguucgucacgcagcggaacuucuacgagccgcagaucaucaccaccgacaacaccuucgugagcggcaacugcgacguggucaucggcaucgugaacaacacgguguacgacccccugcagcccgagcuggacuccuucaaggaggagcucgacaaguacuucaagaaccacaccagccccgacgucgaccugggggacaucuccggcaucaacgccagcguggugaacauccagaaggagaucgaccgccugaacgaggucgccaagaaccucaacgagucccugaucgaccugcaggagcucgggaaguacgagcaguacaucaaguggccgugguacaucuggcugggcuucaucgccggccugaucgcgaucgugauggugaccaucaugcucugcugcaugaccagcugcugcuccugccugaaggggugcugcagcugcggcuccugcugcaaguucgacgaggacgacagcgagcccguccugaagggggugaagcuccacuacacgugaggacuagucccuguucccagagcccacuuuuuuuucuuuuuuugaaauaaaauagccugucuuucagaucucaaaggcucuuuucagagccaccaaaaaaaaaaaaaaaaaaaaaaaaaaaaaaaaaaaaaaaaaaaaaaaaaaaaaaaaaaaaaaaaaaaaaaaaaaaaaaaaaaaaaaaaaaaaaaaaaaaaa

SEQ ID NO: 23637 - RNA, 4191 nt, Artificial Sequence
  SARS-CoV-2/Wuhan/WIV05/2019__EPI_ISL_402128 spike protein mRNA gc (1-1273)(D614G_I692V)
aggagagggcgcuuggcuugcaaggacccugagcugcggcauugaagcacacccaacccaacucgacugaagucagccucacugaaccggaucugagaaucuucucucucugggcuugccagggcucuccgaaccuagcuagcauccucuucaauuccaacuagaaagcuuaccauguucguguuccugguccuccugccccuggugagcucccagugcgugaaccucaccacccgcacgcagcugccgcccgccuacaccaacagcuucacccggggcgucuacuaccccgacaagguguuccgcuccagcgugcugcacuccacccaggaccucuuccugcccuucuucagcaacgucacgugguuccacgccauccacguguccgggaccaacggcaccaagcgguucgacaacccggugcugcccuucaacgacggggucuacuucgcgagcaccgagaaguccaacaucauccgcggcuggaucuucgggacgacccucgacagcaagacccagucccugcugaucgugaacaacgccaccaacguggucaucaaggugugcgaguuccaguucugcaacgaccccuuccucggcguguacuaccacaagaacaacaagagcuggauggaguccgaguuccgggucuacagcuccgccaacaacugcacguucgaguacgugagccagcccuuccugauggaccuggagggcaagcaggggaacuucaagaaccuccgcgaguucguguucaagaacaucgacggcuacuucaagaucuacuccaagcacaccccgaucaaccugguccgggaccugccccagggguucagcgcccucgagccccugguggaccugcccaucggcaucaacaucacccgcuuccagacccuccuggcccugcaccgguccuaccucacgccgggggacagcagcuccggcuggaccgcgggcgccgccgccuacuacgugggguaccugcagccccgcaccuuccugcucaaguacaacgagaacggcaccaucacggacgcggucgacugcgcccuggacccccugagcgagaccaagugcacccucaaguccuucaccguggagaaggggaucuaccagacgagcaacuuccgggugcagcccaccgaguccaucguccgcuucccgaacaucaccaaccugugccccuucggcgagguguucaacgccacccgguucgccagcgucuacgccuggaaccgcaagcggaucuccaacugcguggcggacuacagcgugcuguacaacuccgccagcuucuccacguucaagugcuacggcgucagccccaccaagcucaacgaccugugcuucaccaacguguacgccgacuccuucgugauccgcggggacgagguccggcagaucgcccccggccagaccgggaagaucgccgacuacaacuacaagcugccggacgacuucacgggcugcgugaucgcguggaacagcaacaaccucgacuccaaggucgggggcaacuacaacuaccuguaccgccuguuccgcaagagcaaccucaagcccuucgagcgggacaucuccaccgagaucuaccaggccggcagcacccccugcaacgggguggagggcuucaacugcuacuucccccugcaguccuacggguuccagccgaccaacggcgugggguaccagcccuaccggguggucgugcugagcuucgagcuccugcacgcccccgccacggugugcggccccaagaaguccaccaaccuggucaagaacaagugcgugaacuucaacuucaacggccucaccgggaccggcgugcugaccgagagcaacaagaaguuccugccguuccagcaguucgggcgcgacaucgccgacacgaccgacgcgguccgcgacccccagacccuggagauccucgacaucacccccugcagcuucggcgggguguccgugaucacgccgggcaccaacaccagcaaccaggucgccgugcuguaccagggcgugaacugcaccgagguccccguggccauccacgccgaccagcugacgcccaccuggcggguguacuccaccggcagcaacgucuuccagacccgcgccgggugccucaucggcgcggagcacgugaacaacuccuacgagugcgacauccccaucggggccggcaucugcgccagcuaccagacgcagaccaacuccccgcggcgcgcccggagcguggcgucccagagcgucaucgccuacaccaugucccugggcgccgagaacagcgucgccuacuccaacaacagcaucgccauccccaccaacuucacgaucuccgugaccaccgagauccugcccgugagcaugaccaagacgagcgucgacugcaccauguacaucugcggggacuccaccgagugcagcaaccuccugcugcaguacggcuccuucugcacccagcucaaccgcgcgcugacggggaucgccguggagcaggacaagaacacccaggagguguucgcccaggucaagcagaucuacaagacgcccccgaucaaggacuucggcggguucaacuucagccagauccugcccgaccccuccaagcccagcaagcgguccuucaucgaggaccuccuguucaacaaggugacccuggccgacgccggcuucaucaagcaguacggcgacugccucggggacaucgcggcccgcgaccugaucugcgcccagaaguucaacggccugaccgugcucccgccccugcugaccgacgagaugaucgcccaguacaccagcgcccuccuggcggggaccaucacguccggcuggaccuucggggccggcgccgcccugcagauccccuucgcgaugcagauggccuaccgguucaacggcaucggggucacccagaacgugcucuacgagaaccagaagcugaucgccaaccaguucaacagcgccaucggcaagauccaggacucccugagcuccaccgccagcgcgcucgggaagcugcaggacguggucaaccagaacgcccaggcccugaacacgcucgugaagcagcuguccagcaacuucggcgccaucuccagcgugcugaacgacauccucucccgccuggacaaggucgaggccgaggugcagaucgaccggcugaucaccgggcgccuccagagccugcagaccuacgugacccagcagcugauccgggcggccgagauccgcgccagcgccaaccucgccgcgaccaagauguccgagugcguccugggccagagcaagcggguggacuucugcggcaagggguaccaccugauguccuucccccagagcgccccgcacggcguggucuuccuccacgugacguacguccccgcccaggagaagaacuucaccaccgcccccgcgaucugccacgacgggaaggcccacuucccccgcgagggcguguucguguccaacgggacccacugguucgucacgcagcggaacuucuacgagccgcagaucaucaccaccgacaacaccuucgugagcggcaacugcgacguggucaucggcaucgugaacaacacgguguacgacccccugcagcccgagcuggacuccuucaaggaggagcucgacaaguacuucaagaaccacaccagccccgacgucgaccugggggacaucuccggcaucaacgccagcguggugaacauccagaaggagaucgaccgccugaacgaggucgccaagaaccucaacgagucccugaucgaccugcaggagcucgggaaguacgagcaguacaucaaguggccgugguacaucuggcugggcuucaucgccggccugaucgcgaucgugauggugaccaucaugcucugcugcaugaccagcugcugcuccugccugaaggggugcugcagcugcggcuccugcugcaaguucgacgaggacgacagcgagcccguccugaagggggugaagcuccacuacacgugaggacuagucccuguucccagagcccacuuuuuuuucuuuuuuugaaauaaaauagccugucuuucagaucucaaaggcucuuuucagagccaccaaaaaaaaaaaaaaaaaaaaaaaaaaaaaaaaaaaaaaaaaaaaaaaaaaaaaaaaaaaaaaaaaaaaaaaaaaaaaaaaaaaaaaaaaaaaaaaaaaaaa

SEQ ID NO: 23638 - RNA, 4191 nt, Artificial Sequence
  SARS-CoV-2/Wuhan/WIV05/2019__EPI_ISL_402128 spike protein mRNA gc (1-1273)(D614G_M1229I)
aggagagggcgcuuggcuugcaaggacccugagcugcggcauugaagcacacccaacccaacucgacugaagucagccucacugaaccggaucugagaaucuucucucucugggcuugccagggcucuccgaaccuagcuagcauccucuucaauuccaacuagaaagcuuaccauguucguguuccugguccuccugccccuggugagcucccagugcgugaaccucaccacccgcacgcagcugccgcccgccuacaccaacagcuucacccggggcgucuacuaccccgacaagguguuccgcuccagcgugcugcacuccacccaggaccucuuccugcccuucuucagcaacgucacgugguuccacgccauccacguguccgggaccaacggcaccaagcgguucgacaacccggugcugcccuucaacgacggggucuacuucgcgagcaccgagaaguccaacaucauccgcggcuggaucuucgggacgacccucgacagcaagacccagucccugcugaucgugaacaacgccaccaacguggucaucaaggugugcgaguuccaguucugcaacgaccccuuccucggcguguacuaccacaagaacaacaagagcuggauggaguccgaguuccgggucuacagcuccgccaacaacugcacguucgaguacgugagccagcccuuccugauggaccuggagggcaagcaggggaacuucaagaaccuccgcgaguucguguucaagaacaucgacggcuacuucaagaucuacuccaagcacaccccgaucaaccugguccgggaccugccccagggguucagcgcccucgagccccugguggaccugcccaucggcaucaacaucacccgcuuccagacccuccuggcccugcaccgguccuaccucacgccgggggacagcagcuccggcuggaccgcgggcgccgccgccuacuacgugggguaccugcagccccgcaccuuccugcucaaguacaacgagaacggcaccaucacggacgcggucgacugcgcccuggacccccugagcgagaccaagugcacccucaaguccuucaccguggagaaggggaucuaccagacgagcaacuuccgggugcagcccaccgaguccaucguccgcuucccgaacaucaccaaccugugccccuucggcgagguguucaacgccacccgguucgccagcgucuacgccuggaaccgcaagcggaucuccaacugcguggcggacuacagcgugcuguacaacuccgccagcuucuccacguucaagugcuacggcgucagccccaccaagcucaacgaccugugcuucaccaacguguacgccgacuccuucgugauccgcggggacgagguccggcagaucgcccccggccagaccgggaagaucgccgacuacaacuacaagcugccggacgacuucacgggcugcgugaucgcguggaacagcaacaaccucgacuccaaggucgggggcaacuacaacuaccuguaccgccuguuccgcaagagcaaccucaagcccuucgagcgggacaucuccaccgagaucuaccaggccggcagcacccccugcaacgggguggagggcuucaacugcuacuucccccugcaguccuacggguuccagccgaccaacggcgugggguaccagcccuaccggguggucgugcugagcuucgagcuccugcacgcccccgccacggugugcggccccaagaaguccaccaaccuggucaagaacaagugcgugaacuucaacuucaacggccucaccgggaccggcgugcugaccgagagcaacaagaaguuccugccguuccagcaguucgggcgcgacaucgccgacacgaccgacgcgguccgcgacccccagacccuggagauccucgacaucacccccugcagcuucggcgggguguccgugaucacgccgggcaccaacaccagcaaccaggucgccgugcuguaccagggcgugaacugcaccgagguccccguggccauccacgccgaccagcugacgcccaccuggcggguguacuccaccggcagcaacgucuuccagacccgcgccgggugccucaucggcgcggagcacgugaacaacuccuacgagugcgacauccccaucggggccggcaucugcgccagcuaccagacgcagaccaacuccccgcggcgcgcccggagcguggcgucccagagcaucaucgccuacaccaugucccugggcgccgagaacagcgucgccuacuccaacaacagcaucgccauccccaccaacuucacgaucuccgugaccaccgagauccugcccgugagcaugaccaagacgagcgucgacugcaccauguacaucugcggggacuccaccgagugcagcaaccuccugcugcaguacggcuccuucugcacccagcucaaccgcgcgcugacggggaucgccguggagcaggacaagaacacccaggagguguucgcccaggucaagcagaucuacaagacgcccccgaucaaggacuucggcggguucaacuucagccagauccugcccgaccccuccaagcccagcaagcgguccuucaucgaggaccuccuguucaacaaggugacccuggccgacgccggcuucaucaagcaguacggcgacugccucggggacaucgcggcccgcgaccugaucugcgcccagaaguucaacggccugaccgugcucccgccccugcugaccgacgagaugaucgcccaguacaccagcgcccuccuggcggggaccaucacguccggcuggaccuucggggccggcgccgcccugcagauccccuucgcgaugcagauggccuaccgguucaacggcaucggggucacccagaacgugcucuacgagaaccagaagcugaucgccaaccaguucaacagcgccaucggcaagauccaggacucccugagcuccaccgccagcgcgcucgggaagcugcaggacguggucaaccagaacgcccaggcccugaacacgcucgugaagcagcuguccagcaacuucggcgccaucuccagcgugcugaacgacauccucucccgccuggacaaggucgaggccgaggugcagaucgaccggcugaucaccgggcgccuccagagccugcagaccuacgugacccagcagcugauccgggcggccgagauccgcgccagcgccaaccucgccgcgaccaagauguccgagugcguccugggccagagcaagcggguggacuucugcggcaagggguaccaccugauguccuucccccagagcgccccgcacggcguggucuuccuccacgugacguacguccccgcccaggagaagaacuucaccaccgcccccgcgaucugccacgacgggaaggcccacuucccccgcgagggcguguucguguccaacgggacccacugguucgucacgcagcggaacuucuacgagccgcagaucaucaccaccgacaacaccuucgugagcggcaacugcgacguggucaucggcaucgugaacaacacgguguacgacccccugcagcccgagcuggacuccuucaaggaggagcucgacaaguacuucaagaaccacaccagccccgacgucgaccugggggacaucuccggcaucaacgccagcguggugaacauccagaaggagaucgaccgccugaacgaggucgccaagaaccucaacgagucccugaucgaccugcaggagcucgggaaguacgagcaguacaucaaguggccgugguacaucuggcugggcuucaucgccggccugaucgcgaucgugaucgugaccaucaugcucugcugcaugaccagcugcugcuccugccugaaggggugcugcagcugcggcuccugcugcaaguucgacgaggacgacagcgagcccguccugaagggggugaagcuccacuacacgugaggacuagucccuguucccagagcccacuuuuuuuucuuuuuuugaaauaaaauagccugucuuucagaucucaaaggcucuuuucagagccaccaaaaaaaaaaaaaaaaaaaaaaaaaaaaaaaaaaaaaaaaaaaaaaaaaaaaaaaaaaaaaaaaaaaaaaaaaaaaaaaaaaaaaaaaaaaaaaaaaaaaa

SEQ ID NO: 23639 - RNA, 4185 nt, Artificial Sequence
  SARS-CoV-2/Wuhan/WIV05/2019__EPI_ISL_402128 spike protein mRNA gc (1-1273)(H69del_V70del_A222V_Y453F_S477N_D614G_I692V)
aggagagggcgcuuggcuugcaaggacccugagcugcggcauugaagcacacccaacccaacucgacugaagucagccucacugaaccggaucugagaaucuucucucucugggcuugccagggcucuccgaaccuagcuagcauccucuucaauuccaacuagaaagcuuaccauguucguguuccugguccuccugccccuggugagcucccagugcgugaaccucaccacccgcacgcagcugccgcccgccuacaccaacagcuucacccggggcgucuacuaccccgacaagguguuccgcuccagcgugcugcacuccacccaggaccucuuccugcccuucuucagcaacgucacgugguuccacgccaucuccgggaccaacggcaccaagcgguucgacaacccggugcugcccuucaacgacggggucuacuucgcgagcaccgagaaguccaacaucauccgcggcuggaucuucgggacgacccucgacagcaagacccagucccugcugaucgugaacaacgccaccaacguggucaucaaggugugcgaguuccaguucugcaacgaccccuuccucggcguguacuaccacaagaacaacaagagcuggauggaguccgaguuccgggucuacagcuccgccaacaacugcacguucgaguacgugagccagcccuuccugauggaccuggagggcaagcaggggaacuucaagaaccuccgcgaguucguguucaagaacaucgacggcuacuucaagaucuacuccaagcacaccccgaucaaccugguccgggaccugccccagggguucagcguccucgagccccugguggaccugcccaucggcaucaacaucacccgcuuccagacccuccuggcccugcaccgguccuaccucacgccgggggacagcagcuccggcuggaccgcgggcgccgccgccuacuacgugggguaccugcagccccgcaccuuccugcucaaguacaacgagaacggcaccaucacggacgcggucgacugcgcccuggacccccugagcgagaccaagugcacccucaaguccuucaccguggagaaggggaucuaccagacgagcaacuuccgggugcagcccaccgaguccaucguccgcuucccgaacaucaccaaccugugccccuucggcgagguguucaacgccacccgguucgccagcgucuacgccuggaaccgcaagcggaucuccaacugcguggcggacuacagcgugcuguacaacuccgccagcuucuccacguucaagugcuacggcgucagccccaccaagcucaacgaccugugcuucaccaacguguacgccgacuccuucgugauccgcggggacgagguccggcagaucgcccccggccagaccgggaagaucgccgacuacaacuacaagcugccggacgacuucacgggcugcgugaucgcguggaacagcaacaaccucgacuccaaggucgggggcaacuacaacuaccuguuccgccuguuccgcaagagcaaccucaagcccuucgagcgggacaucuccaccgagaucuaccaggccggcaacacccccugcaacgggguggagggcuucaacugcuacuucccccugcaguccuacggguuccagccgaccaacggcgugggguaccagcccuaccggguggucgugcugagcuucgagcuccugcacgcccccgccacggugugcggccccaagaaguccaccaaccuggucaagaacaagugcgugaacuucaacuucaacggccucaccgggaccggcgugcugaccgagagcaacaagaaguuccugccguuccagcaguucgggcgcgacaucgccgacacgaccgacgcgguccgcgacccccagacccuggagauccucgacaucacccccugcagcuucggcgggguguccgugaucacgccgggcaccaacaccagcaaccaggucgccgugcuguaccagggcgugaacugcaccgagguccccguggccauccacgccgaccagcugacgcccaccuggcggguguacuccaccggcagcaacgucuuccagacccgcgccgggugccucaucggcgcggagcacgugaacaacuccuacgagugcgacauccccaucggggccggcaucugcgccagcuaccagacgcagaccaacuccccgcggcgcgcccggagcguggcgucccagagcgucaucgccuacaccaugucccugggcgccgagaacagcgucgccuacuccaacaacagcaucgccauccccaccaacuucacgaucuccgugaccaccgagauccugcccgugagcaugaccaagacgagcgucgacugcaccauguacaucugcggggacuccaccgagugcagcaaccuccugcugcaguacggcuccuucugcacccagcucaaccgcgcgcugacggggaucgccguggagcaggacaagaacacccaggagguguucgcccaggucaagcagaucuacaagacgcccccgaucaaggacuucggcggguucaacuucagccagauccugcccgaccccuccaagcccagcaagcgguccuucaucgaggaccuccuguucaacaaggugacccuggccgacgccggcuucaucaagcaguacggcgacugccucggggacaucgcggcccgcgaccugaucugcgcccagaaguucaacggccugaccgugcucccgccccugcugaccgacgagaugaucgcccaguacaccagcgcccuccuggcggggaccaucacguccggcuggaccuucggggccggcgccgcccugcagauccccuucgcgaugcagauggccuaccgguucaacggcaucggggucacccagaacgugcucuacgagaaccagaagcugaucgccaaccaguucaacagcgccaucggcaagauccaggacucccugagcuccaccgccagcgcgcucgggaagcugcaggacguggucaaccagaacgcccaggcccugaacacgcucgugaagcagcuguccagcaacuucggcgccaucuccagcgugcugaacgacauccucucccgccuggacaaggucgaggccgaggugcagaucgaccggcugaucaccgggcgccuccagagccugcagaccuacgugacccagcagcugauccgggcggccgagauccgcgccagcgccaaccucgccgcgaccaagauguccgagugcguccugggccagagcaagcggguggacuucugcggcaagggguaccaccugauguccuucccccagagcgccccgcacggcguggucuuccuccacgugacguacguccccgcccaggagaagaacuucaccaccgcccccgcgaucugccacgacgggaaggcccacuucccccgcgagggcguguucguguccaacgggacccacugguucgucacgcagcggaacuucuacgagccgcagaucaucaccaccgacaacaccuucgugagcggcaacugcgacguggucaucggcaucgugaacaacacgguguacgacccccugcagcccgagcuggacuccuucaaggaggagcucgacaaguacuucaagaaccacaccagccccgacgucgaccugggggacaucuccggcaucaacgccagcguggugaacauccagaaggagaucgaccgccugaacgaggucgccaagaaccucaacgagucccugaucgaccugcaggagcucgggaaguacgagcaguacaucaaguggccgugguacaucuggcugggcuucaucgccggccugaucgcgaucgugauggugaccaucaugcucugcugcaugaccagcugcugcuccugccugaaggggugcugcagcugcggcuccugcugcaaguucgacgaggacgacagcgagcccguccugaagggggugaagcuccacuacacgugaggacuagucccuguucccagagcccacuuuuuuuucuuuuuuugaaauaaaauagccugucuuucagaucucaaaggcucuuuucagagccaccaaaaaaaaaaaaaaaaaaaaaaaaaaaaaaaaaaaaaaaaaaaaaaaaaaaaaaaaaaaaaaaaaaaaaaaaaaaaaaaaaaaaaaaaaaaaaaaaaaaaa

SEQ ID NO: 23640 - RNA, 4185 nt, Artificial Sequence
  SARS-CoV-2/Wuhan/WIV05/2019__EPI_ISL_402128 spike protein mRNA gc (1-1273)(H69del_V70del_Y453F_D614G_I692V_M1229I)
aggagagggcgcuuggcuugcaaggacccugagcugcggcauugaagcacacccaacccaacucgacugaagucagccucacugaaccggaucugagaaucuucucucucugggcuugccagggcucuccgaaccuagcuagcauccucuucaauuccaacuagaaagcuuaccauguucguguuccugguccuccugccccuggugagcucccagugcgugaaccucaccacccgcacgcagcugccgcccgccuacaccaacagcuucacccggggcgucuacuaccccgacaagguguuccgcuccagcgugcugcacuccacccaggaccucuuccugcccuucuucagcaacgucacgugguuccacgccaucuccgggaccaacggcaccaagcgguucgacaacccggugcugcccuucaacgacggggucuacuucgcgagcaccgagaaguccaacaucauccgcggcuggaucuucgggacgacccucgacagcaagacccagucccugcugaucgugaacaacgccaccaacguggucaucaaggugugcgaguuccaguucugcaacgaccccuuccucggcguguacuaccacaagaacaacaagagcuggauggaguccgaguuccgggucuacagcuccgccaacaacugcacguucgaguacgugagccagcccuuccugauggaccuggagggcaagcaggggaacuucaagaaccuccgcgaguucguguucaagaacaucgacggcuacuucaagaucuacuccaagcacaccccgaucaaccugguccgggaccugccccagggguucagcgcccucgagccccugguggaccugcccaucggcaucaacaucacccgcuuccagacccuccuggcccugcaccgguccuaccucacgccgggggacagcagcuccggcuggaccgcgggcgccgccgccuacuacgugggguaccugcagccccgcaccuuccugcucaaguacaacgagaacggcaccaucacggacgcggucgacugcgcccuggacccccugagcgagaccaagugcacccucaaguccuucaccguggagaaggggaucuaccagacgagcaacuuccgggugcagcccaccgaguccaucguccgcuucccgaacaucaccaaccugugccccuucggcgagguguucaacgccacccgguucgccagcgucuacgccuggaaccgcaagcggaucuccaacugcguggcggacuacagcgugcuguacaacuccgccagcuucuccacguucaagugcuacggcgucagccccaccaagcucaacgaccugugcuucaccaacguguacgccgacuccuucgugauccgcggggacgagguccggcagaucgcccccggccagaccgggaagaucgccgacuacaacuacaagcugccggacgacuucacgggcugcgugaucgcguggaacagcaacaaccucgacuccaaggucgggggcaacuacaacuaccuguuccgccuguuccgcaagagcaaccucaagcccuucgagcgggacaucuccaccgagaucuaccaggccggcagcacccccugcaacgggguggagggcuucaacugcuacuucccccugcaguccuacggguuccagccgaccaacggcgugggguaccagcccuaccggguggucgugcugagcuucgagcuccugcacgcccccgccacggugugcggccccaagaaguccaccaaccuggucaagaacaagugcgugaacuucaacuucaacggccucaccgggaccggcgugcugaccgagagcaacaagaaguuccugccguuccagcaguucgggcgcgacaucgccgacacgaccgacgcgguccgcgacccccagacccuggagauccucgacaucacccccugcagcuucggcgggguguccgugaucacgccgggcaccaacaccagcaaccaggucgccgugcuguaccagggcgugaacugcaccgagguccccguggccauccacgccgaccagcugacgcccaccuggcggguguacuccaccggcagcaacgucuuccagacccgcgccgggugccucaucggcgcggagcacgugaacaacuccuacgagugcgacauccccaucggggccggcaucugcgccagcuaccagacgcagaccaacuccccgcggcgcgcccggagcguggcgucccagagcgugaucgccuacaccaugucccugggcgccgagaacagcgucgccuacuccaacaacagcaucgccauccccaccaacuucacgaucuccgugaccaccgagauccugcccgugagcaugaccaagacgagcgucgacugcaccauguacaucugcggggacuccaccgagugcagcaaccuccugcugcaguacggcuccuucugcacccagcucaaccgcgcgcugacggggaucgccguggagcaggacaagaacacccaggagguguucgcccaggucaagcagaucuacaagacgcccccgaucaaggacuucggcggguucaacuucagccagauccugcccgaccccuccaagcccagcaagcgguccuucaucgaggaccuccuguucaacaaggugacccuggccgacgccggcuucaucaagcaguacggcgacugccucggggacaucgcggcccgcgaccugaucugcgcccagaaguucaacggccugaccgugcucccgccccugcugaccgacgagaugaucgcccaguacaccagcgcccuccuggcggggaccaucacguccggcuggaccuucggggccggcgccgcccugcagauccccuucgcgaugcagauggccuaccgguucaacggcaucggggucacccagaacgugcucuacgagaaccagaagcugaucgccaaccaguucaacagcgccaucggcaagauccaggacucccugagcuccaccgccagcgcgcucgggaagcugcaggacguggucaaccagaacgcccaggcccugaacacgcucgugaagcagcuguccagcaacuucggcgccaucuccagcgugcugaacgacauccucucccgccuggacaaggucgaggccgaggugcagaucgaccggcugaucaccgggcgccuccagagccugcagaccuacgugacccagcagcugauccgggcggccgagauccgcgccagcgccaaccucgccgcgaccaagauguccgagugcguccugggccagagcaagcggguggacuucugcggcaagggguaccaccugauguccuucccccagagcgccccgcacggcguggucuuccuccacgugacguacguccccgcccaggagaagaacuucaccaccgcccccgcgaucugccacgacgggaaggcccacuucccccgcgagggcguguucguguccaacgggacccacugguucgucacgcagcggaacuucuacgagccgcagaucaucaccaccgacaacaccuucgugagcggcaacugcgacguggucaucggcaucgugaacaacacgguguacgacccccugcagcccgagcuggacuccuucaaggaggagcucgacaaguacuucaagaaccacaccagccccgacgucgaccugggggacaucuccggcaucaacgccagcguggugaacauccagaaggagaucgaccgccugaacgaggucgccaagaaccucaacgagucccugaucgaccugcaggagcucgggaaguacgagcaguacaucaaguggccgugguacaucuggcugggcuucaucgccggccugaucgcgaucgugaucgugaccaucaugcucugcugcaugaccagcugcugcuccugccugaaggggugcugcagcugcggcuccugcugcaaguucgacgaggacgacagcgagcccguccugaagggggugaagcuccacuacacgugaggacuagucccuguucccagagcccacuuuuuuuucuuuuuuugaaauaaaauagccugucuuucagaucucaaaggcucuuuucagagccaccaaaaaaaaaaaaaaaaaaaaaaaaaaaaaaaaaaaaaaaaaaaaaaaaaaaaaaaaaaaaaaaaaaaaaaaaaaaaaaaaaaaaaaaaaaaaaaaaaaaaa

SEQ ID NO: 23641 - RNA, 4182 nt, Artificial Sequence
  SARS-CoV-2/Wuhan/WIV05/2019__EPI_ISL_402128 spike protein mRNA gc (1-1273)(H69del_V70del_Y144del_N501Y_A570D_D614G_P681H_T716I_S982 A_D1118H)
aggagagggcgcuuggcuugcaaggacccugagcugcggcauugaagcacacccaacccaacucgacugaagucagccucacugaaccggaucugagaaucuucucucucugggcuugccagggcucuccgaaccuagcuagcauccucuucaauuccaacuagaaagcuuaccauguucguguuccugguccuccugccccuggugagcucccagugcgugaaccucaccacccgcacgcagcugccgcccgccuacaccaacagcuucacccggggcgucuacuaccccgacaagguguuccgcuccagcgugcugcacuccacccaggaccucuuccugcccuucuucagcaacgucacgugguuccacgccaucuccgggaccaacggcaccaagcgguucgacaacccggugcugcccuucaacgacggggucuacuucgcgagcaccgagaaguccaacaucauccgcggcuggaucuucgggacgacccucgacagcaagacccagucccugcugaucgugaacaacgccaccaacguggucaucaaggugugcgaguuccaguucugcaacgaccccuuccucggcguguaccacaagaacaacaagagcuggauggaguccgaguuccgggucuacagcuccgccaacaacugcacguucgaguacgugagccagcccuuccugauggaccuggagggcaagcaggggaacuucaagaaccuccgcgaguucguguucaagaacaucgacggcuacuucaagaucuacuccaagcacaccccgaucaaccugguccgggaccugccccagggguucagcgcccucgagccccugguggaccugcccaucggcaucaacaucacccgcuuccagacccuccuggcccugcaccgguccuaccucacgccgggggacagcagcuccggcuggaccgcgggcgccgccgccuacuacgugggguaccugcagccccgcaccuuccugcucaaguacaacgagaacggcaccaucacggacgcggucgacugcgcccuggacccccugagcgagaccaagugcacccucaaguccuucaccguggagaaggggaucuaccagacgagcaacuuccgggugcagcccaccgaguccaucguccgcuucccgaacaucaccaaccugugccccuucggcgagguguucaacgccacccgguucgccagcgucuacgccuggaaccgcaagcggaucuccaacugcguggcggacuacagcgugcuguacaacuccgccagcuucuccacguucaagugcuacggcgucagccccaccaagcucaacgaccugugcuucaccaacguguacgccgacuccuucgugauccgcggggacgagguccggcagaucgcccccggccagaccgggaagaucgccgacuacaacuacaagcugccggacgacuucacgggcugcgugaucgcguggaacagcaacaaccucgacuccaaggucgggggcaacuacaacuaccuguaccgccuguuccgcaagagcaaccucaagcccuucgagcgggacaucuccaccgagaucuaccaggccggcagcacccccugcaacgggguggagggcuucaacugcuacuucccccugcaguccuacggguuccagccgaccuacggcgugggguaccagcccuaccggguggucgugcugagcuucgagcuccugcacgcccccgccacggugugcggccccaagaaguccaccaaccuggucaagaacaagugcgugaacuucaacuucaacggccucaccgggaccggcgugcugaccgagagcaacaagaaguuccugccguuccagcaguucgggcgcgacaucgacgacacgaccgacgcgguccgcgacccccagacccuggagauccucgacaucacccccugcagcuucggcgggguguccgugaucacgccgggcaccaacaccagcaaccaggucgccgugcuguaccagggcgugaacugcaccgagguccccguggccauccacgccgaccagcugacgcccaccuggcggguguacuccaccggcagcaacgucuuccagacccgcgccgggugccucaucggcgcggagcacgugaacaacuccuacgagugcgacauccccaucggggccggcaucugcgccagcuaccagacgcagaccaacucccaccggcgcgcccggagcguggcgucccagagcaucaucgccuacaccaugucccugggcgccgagaacagcgucgccuacuccaacaacagcaucgccauccccaucaacuucacgaucuccgugaccaccgagauccugcccgugagcaugaccaagacgagcgucgacugcaccauguacaucugcggggacuccaccgagugcagcaaccuccugcugcaguacggcuccuucugcacccagcucaaccgcgcgcugacggggaucgccguggagcaggacaagaacacccaggagguguucgcccaggucaagcagaucuacaagacgcccccgaucaaggacuucggcggguucaacuucagccagauccugcccgaccccuccaagcccagcaagcgguccuucaucgaggaccuccuguucaacaaggugacccuggccgacgccggcuucaucaagcaguacggcgacugccucggggacaucgcggcccgcgaccugaucugcgcccagaaguucaacggccugaccgugcucccgccccugcugaccgacgagaugaucgcccaguacaccagcgcccuccuggcggggaccaucacguccggcuggaccuucggggccggcgccgcccugcagauccccuucgcgaugcagauggccuaccgguucaacggcaucggggucacccagaacgugcucuacgagaaccagaagcugaucgccaaccaguucaacagcgccaucggcaagauccaggacucccugagcuccaccgccagcgcgcucgggaagcugcaggacguggucaaccagaacgcccaggcccugaacacgcucgugaagcagcuguccagcaacuucggcgccaucuccagcgugcugaacgacauccucgcccgccuggacaaggucgaggccgaggugcagaucgaccggcugaucaccgggcgccuccagagccugcagaccuacgugacccagcagcugauccgggcggccgagauccgcgccagcgccaaccucgccgcgaccaagauguccgagugcguccugggccagagcaagcggguggacuucugcggcaagggguaccaccugauguccuucccccagagcgccccgcacggcguggucuuccuccacgugacguacguccccgcccaggagaagaacuucaccaccgcccccgcgaucugccacgacgggaaggcccacuucccccgcgagggcguguucguguccaacgggacccacugguucgucacgcagcggaacuucuacgagccgcagaucaucaccacccacaacaccuucgugagcggcaacugcgacguggucaucggcaucgugaacaacacgguguacgacccccugcagcccgagcuggacuccuucaaggaggagcucgacaaguacuucaagaaccacaccagccccgacgucgaccugggggacaucuccggcaucaacgccagcguggugaacauccagaaggagaucgaccgccugaacgaggucgccaagaaccucaacgagucccugaucgaccugcaggagcucgggaaguacgagcaguacaucaaguggccgugguacaucuggcugggcuucaucgccggccugaucgcgaucgugauggugaccaucaugcucugcugcaugaccagcugcugcuccugccugaaggggugcugcagcugcggcuccugcugcaaguucgacgaggacgacagcgagcccguccugaagggggugaagcuccacuacacgugaggacuagucccuguucccagagcccacuuuuuuuucuuuuuuugaaauaaaauagccugucuuucagaucucaaaggcucuuuucagagccaccaaaaaaaaaaaaaaaaaaaaaaaaaaaaaaaaaaaaaaaaaaaaaaaaaaaaaaaaaaaaaaaaaaaaaaaaaaaaaaaaaaaaaaaaaaaaaaaaaaaaa

SEQ ID NO: 23642 - RNA, 4191 nt, Artificial Sequence
  SARS-CoV-2/Wuhan/WIV05/2019__EPI_ISL_402128 spike protein mRNA gc (1-1273)(K417N_E484K_N501Y_D614G)
aggagagggcgcuuggcuugcaaggacccugagcugcggcauugaagcacacccaacccaacucgacugaagucagccucacugaaccggaucugagaaucuucucucucugggcuugccagggcucuccgaaccuagcuagcauccucuucaauuccaacuagaaagcuuaccauguucguguuccugguccuccugccccuggugagcucccagugcgugaaccucaccacccgcacgcagcugccgcccgccuacaccaacagcuucacccggggcgucuacuaccccgacaagguguuccgcuccagcgugcugcacuccacccaggaccucuuccugcccuucuucagcaacgucacgugguuccacgccauccacguguccgggaccaacggcaccaagcgguucgacaacccggugcugcccuucaacgacggggucuacuucgcgagcaccgagaaguccaacaucauccgcggcuggaucuucgggacgacccucgacagcaagacccagucccugcugaucgugaacaacgccaccaacguggucaucaaggugugcgaguuccaguucugcaacgaccccuuccucggcguguacuaccacaagaacaacaagagcuggauggaguccgaguuccgggucuacagcuccgccaacaacugcacguucgaguacgugagccagcccuuccugauggaccuggagggcaagcaggggaacuucaagaaccuccgcgaguucguguucaagaacaucgacggcuacuucaagaucuacuccaagcacaccccgaucaaccugguccgggaccugccccagggguucagcgcccucgagccccugguggaccugcccaucggcaucaacaucacccgcuuccagacccuccuggcccugcaccgguccuaccucacgccgggggacagcagcuccggcuggaccgcgggcgccgccgccuacuacgugggguaccugcagccccgcaccuuccugcucaaguacaacgagaacggcaccaucacggacgcggucgacugcgcccuggacccccugagcgagaccaagugcacccucaaguccuucaccguggagaaggggaucuaccagacgagcaacuuccgggugcagcccaccgaguccaucguccgcuucccgaacaucaccaaccugugccccuucggcgagguguucaacgccacccgguucgccagcgucuacgccuggaaccgcaagcggaucuccaacugcguggcggacuacagcgugcuguacaacuccgccagcuucuccacguucaagugcuacggcgucagccccaccaagcucaacgaccugugcuucaccaacguguacgccgacuccuucgugauccgcggggacgagguccggcagaucgcccccggccagaccgggaacaucgccgacuacaacuacaagcugccggacgacuucacgggcugcgugaucgcguggaacagcaacaaccucgacuccaaggucgggggcaacuacaacuaccuguaccgccuguuccgcaagagcaaccucaagcccuucgagcgggacaucuccaccgagaucuaccaggccggcagcacccccugcaacggggugaagggcuucaacugcuacuucccccugcaguccuacggguuccagccgaccuacggcgugggguaccagcccuaccggguggucgugcugagcuucgagcuccugcacgcccccgccacggugugcggccccaagaaguccaccaaccuggucaagaacaagugcgugaacuucaacuucaacggccucaccgggaccggcgugcugaccgagagcaacaagaaguuccugccguuccagcaguucgggcgcgacaucgccgacacgaccgacgcgguccgcgacccccagacccuggagauccucgacaucacccccugcagcuucggcgggguguccgugaucacgccgggcaccaacaccagcaaccaggucgccgugcuguaccagggcgugaacugcaccgagguccccguggccauccacgccgaccagcugacgcccaccuggcggguguacuccaccggcagcaacgucuuccagacccgcgccgggugccucaucggcgcggagcacgugaacaacuccuacgagugcgacauccccaucggggccggcaucugcgccagcuaccagacgcagaccaacuccccgcggcgcgcccggagcguggcgucccagagcaucaucgccuacaccaugucccugggcgccgagaacagcgucgccuacuccaacaacagcaucgccauccccaccaacuucacgaucuccgugaccaccgagauccugcccgugagcaugaccaagacgagcgucgacugcaccauguacaucugcggggacuccaccgagugcagcaaccuccugcugcaguacggcuccuucugcacccagcucaaccgcgcgcugacggggaucgccguggagcaggacaagaacacccaggagguguucgcccaggucaagcagaucuacaagacgcccccgaucaaggacuucggcggguucaacuucagccagauccugcccgaccccuccaagcccagcaagcgguccuucaucgaggaccuccuguucaacaaggugacccuggccgacgccggcuucaucaagcaguacggcgacugccucggggacaucgcggcccgcgaccugaucugcgcccagaaguucaacggccugaccgugcucccgccccugcugaccgacgagaugaucgcccaguacaccagcgcccuccuggcggggaccaucacguccggcuggaccuucggggccggcgccgcccugcagauccccuucgcgaugcagauggccuaccgguucaacggcaucggggucacccagaacgugcucuacgagaaccagaagcugaucgccaaccaguucaacagcgccaucggcaagauccaggacucccugagcuccaccgccagcgcgcucgggaagcugcaggacguggucaaccagaacgcccaggcccugaacacgcucgugaagcagcuguccagcaacuucggcgccaucuccagcgugcugaacgacauccucucccgccuggacaaggucgaggccgaggugcagaucgaccggcugaucaccgggcgccuccagagccugcagaccuacgugacccagcagcugauccgggcggccgagauccgcgccagcgccaaccucgccgcgaccaagauguccgagugcguccugggccagagcaagcggguggacuucugcggcaagggguaccaccugauguccuucccccagagcgccccgcacggcguggucuuccuccacgugacguacguccccgcccaggagaagaacuucaccaccgcccccgcgaucugccacgacgggaaggcccacuucccccgcgagggcguguucguguccaacgggacccacugguucgucacgcagcggaacuucuacgagccgcagaucaucaccaccgacaacaccuucgugagcggcaacugcgacguggucaucggcaucgugaacaacacgguguacgacccccugcagcccgagcuggacuccuucaaggaggagcucgacaaguacuucaagaaccacaccagccccgacgucgaccugggggacaucuccggcaucaacgccagcguggugaacauccagaaggagaucgaccgccugaacgaggucgccaagaaccucaacgagucccugaucgaccugcaggagcucgggaaguacgagcaguacaucaaguggccgugguacaucuggcugggcuucaucgccggccugaucgcgaucgugauggugaccaucaugcucugcugcaugaccagcugcugcuccugccugaaggggugcugcagcugcggcuccugcugcaaguucgacgaggacgacagcgagcccguccugaagggggugaagcuccacuacacgugaggacuagucccuguucccagagcccacuuuuuuuucuuuuuuugaaauaaaauagccugucuuucagaucucaaaggcucuuuucagagccaccaaaaaaaaaaaaaaaaaaaaaaaaaaaaaaaaaaaaaaaaaaaaaaaaaaaaaaaaaaaaaaaaaaaaaaaaaaaaaaaaaaaaaaaaaaaaaaaaaaaaa

SEQ ID NO: 23643 - RNA, 4182 nt, Artificial Sequence
  SARS-CoV-2/Wuhan/WIV05/2019__EPI_ISL_402128 spike protein mRNA gc (1-1273)(L18F_D80A_D215G_L242del_A243del_L244del_R246I_K417N_E484 K_N501Y_D614G_A701V)
aggagagggcgcuuggcuugcaaggacccugagcugcggcauugaagcacacccaacccaacucgacugaagucagccucacugaaccggaucugagaaucuucucucucugggcuugccagggcucuccgaaccuagcuagcauccucuucaauuccaacuagaaagcuuaccauguucguguuccugguccuccugccccuggugagcucccagugcgugaacuucaccacccgcacgcagcugccgcccgccuacaccaacagcuucacccggggcgucuacuaccccgacaagguguuccgcuccagcgugcugcacuccacccaggaccucuuccugcccuucuucagcaacgucacgugguuccacgccauccacguguccgggaccaacggcaccaagcgguucgccaacccggugcugcccuucaacgacggggucuacuucgcgagcaccgagaaguccaacaucauccgcggcuggaucuucgggacgacccucgacagcaagacccagucccugcugaucgugaacaacgccaccaacguggucaucaaggugugcgaguuccaguucugcaacgaccccuuccucggcguguacuaccacaagaacaacaagagcuggauggaguccgaguuccgggucuacagcuccgccaacaacugcacguucgaguacgugagccagcccuuccugauggaccuggagggcaagcaggggaacuucaagaaccuccgcgaguucguguucaagaacaucgacggcuacuucaagaucuacuccaagcacaccccgaucaaccugguccggggccugccccagggguucagcgcccucgagccccugguggaccugcccaucggcaucaacaucacccgcuuccagacccuccacaucuccuaccucacgccgggggacagcagcuccggcuggaccgcgggcgccgccgccuacuacgugggguaccugcagccccgcaccuuccugcucaaguacaacgagaacggcaccaucacggacgcggucgacugcgcccuggacccccugagcgagaccaagugcacccucaaguccuucaccguggagaaggggaucuaccagacgagcaacuuccgggugcagcccaccgaguccaucguccgcuucccgaacaucaccaaccugugccccuucggcgagguguucaacgccacccgguucgccagcgucuacgccuggaaccgcaagcggaucuccaacugcguggcggacuacagcgugcuguacaacuccgccagcuucuccacguucaagugcuacggcgucagccccaccaagcucaacgaccugugcuucaccaacguguacgccgacuccuucgugauccgcggggacgagguccggcagaucgcccccggccagaccgggaacaucgccgacuacaacuacaagcugccggacgacuucacgggcugcgugaucgcguggaacagcaacaaccucgacuccaaggucgggggcaacuacaacuaccuguaccgccuguuccgcaagagcaaccucaagcccuucgagcgggacaucuccaccgagaucuaccaggccggcagcacccccugcaacggggugaagggcuucaacugcuacuucccccugcaguccuacggguuccagccgaccuacggcgugggguaccagcccuaccggguggucgugcugagcuucgagcuccugcacgcccccgccacggugugcggccccaagaaguccaccaaccuggucaagaacaagugcgugaacuucaacuucaacggccucaccgggaccggcgugcugaccgagagcaacaagaaguuccugccguuccagcaguucgggcgcgacaucgccgacacgaccgacgcgguccgcgacccccagacccuggagauccucgacaucacccccugcagcuucggcgggguguccgugaucacgccgggcaccaacaccagcaaccaggucgccgugcuguaccagggcgugaacugcaccgagguccccguggccauccacgccgaccagcugacgcccaccuggcggguguacuccaccggcagcaacgucuuccagacccgcgccgggugccucaucggcgcggagcacgugaacaacuccuacgagugcgacauccccaucggggccggcaucugcgccagcuaccagacgcagaccaacuccccgcggcgcgcccggagcguggcgucccagagcaucaucgccuacaccaugucccugggcguggagaacagcgucgccuacuccaacaacagcaucgccauccccaccaacuucacgaucuccgugaccaccgagauccugcccgugagcaugaccaagacgagcgucgacugcaccauguacaucugcggggacuccaccgagugcagcaaccuccugcugcaguacggcuccuucugcacccagcucaaccgcgcgcugacggggaucgccguggagcaggacaagaacacccaggagguguucgcccaggucaagcagaucuacaagacgcccccgaucaaggacuucggcggguucaacuucagccagauccugcccgaccccuccaagcccagcaagcgguccuucaucgaggaccuccuguucaacaaggugacccuggccgacgccggcuucaucaagcaguacggcgacugccucggggacaucgcggcccgcgaccugaucugcgcccagaaguucaacggccugaccgugcucccgccccugcugaccgacgagaugaucgcccaguacaccagcgcccuccuggcggggaccaucacguccggcuggaccuucggggccggcgccgcccugcagauccccuucgcgaugcagauggccuaccgguucaacggcaucggggucacccagaacgugcucuacgagaaccagaagcugaucgccaaccaguucaacagcgccaucggcaagauccaggacucccugagcuccaccgccagcgcgcucgggaagcugcaggacguggucaaccagaacgcccaggcccugaacacgcucgugaagcagcuguccagcaacuucggcgccaucuccagcgugcugaacgacauccucucccgccuggacaaggucgaggccgaggugcagaucgaccggcugaucaccgggcgccuccagagccugcagaccuacgugacccagcagcugauccgggcggccgagauccgcgccagcgccaaccucgccgcgaccaagauguccgagugcguccugggccagagcaagcggguggacuucugcggcaagggguaccaccugauguccuucccccagagcgccccgcacggcguggucuuccuccacgugacguacguccccgcccaggagaagaacuucaccaccgcccccgcgaucugccacgacgggaaggcccacuucccccgcgagggcguguucguguccaacgggacccacugguucgucacgcagcggaacuucuacgagccgcagaucaucaccaccgacaacaccuucgugagcggcaacugcgacguggucaucggcaucgugaacaacacgguguacgacccccugcagcccgagcuggacuccuucaaggaggagcucgacaaguacuucaagaaccacaccagccccgacgucgaccugggggacaucuccggcaucaacgccagcguggugaacauccagaaggagaucgaccgccugaacgaggucgccaagaaccucaacgagucccugaucgaccugcaggagcucgggaaguacgagcaguacaucaaguggccgugguacaucuggcugggcuucaucgccggccugaucgcgaucgugauggugaccaucaugcucugcugcaugaccagcugcugcuccugccugaaggggugcugcagcugcggcuccugcugcaaguucgacgaggacgacagcgagcccguccugaagggggugaagcuccacuacacgugaggacuagucccuguucccagagcccacuuuuuuuucuuuuuuugaaauaaaauagccugucuuucagaucucaaaggcucuuuucagagccaccaaaaaaaaaaaaaaaaaaaaaaaaaaaaaaaaaaaaaaaaaaaaaaaaaaaaaaaaaaaaaaaaaaaaaaaaaaaaaaaaaaaaaaaaaaaaaaaaaaaaa

SEQ ID NO: 23644 - RNA, 4191 nt, Artificial Sequence
  SARS-CoV-2/Wuhan/WIV05/2019__EPI_ISL_402128 spike protein mRNA gc (1-1273)(E484K_D614G)
aggagagggcgcuuggcuugcaaggacccugagcugcggcauugaagcacacccaacccaacucgacugaagucagccucacugaaccggaucugagaaucuucucucucugggcuugccagggcucuccgaaccuagcuagcauccucuucaauuccaacuagaaagcuuaccauguucguguuccugguccuccugccccuggugagcucccagugcgugaaccucaccacccgcacgcagcugccgcccgccuacaccaacagcuucacccggggcgucuacuaccccgacaagguguuccgcuccagcgugcugcacuccacccaggaccucuuccugcccuucuucagcaacgucacgugguuccacgccauccacguguccgggaccaacggcaccaagcgguucgacaacccggugcugcccuucaacgacggggucuacuucgcgagcaccgagaaguccaacaucauccgcggcuggaucuucgggacgacccucgacagcaagacccagucccugcugaucgugaacaacgccaccaacguggucaucaaggugugcgaguuccaguucugcaacgaccccuuccucggcguguacuaccacaagaacaacaagagcuggauggaguccgaguuccgggucuacagcuccgccaacaacugcacguucgaguacgugagccagcccuuccugauggaccuggagggcaagcaggggaacuucaagaaccuccgcgaguucguguucaagaacaucgacggcuacuucaagaucuacuccaagcacaccccgaucaaccugguccgggaccugccccagggguucagcgcccucgagccccugguggaccugcccaucggcaucaacaucacccgcuuccagacccuccuggcccugcaccgguccuaccucacgccgggggacagcagcuccggcuggaccgcgggcgccgccgccuacuacgugggguaccugcagccccgcaccuuccugcucaaguacaacgagaacggcaccaucacggacgcggucgacugcgcccuggacccccugagcgagaccaagugcacccucaaguccuucaccguggagaaggggaucuaccagacgagcaacuuccgggugcagcccaccgaguccaucguccgcuucccgaacaucaccaaccugugccccuucggcgagguguucaacgccacccgguucgccagcgucuacgccuggaaccgcaagcggaucuccaacugcguggcggacuacagcgugcuguacaacuccgccagcuucuccacguucaagugcuacggcgucagccccaccaagcucaacgaccugugcuucaccaacguguacgccgacuccuucgugauccgcggggacgagguccggcagaucgcccccggccagaccgggaagaucgccgacuacaacuacaagcugccggacgacuucacgggcugcgugaucgcguggaacagcaacaaccucgacuccaaggucgggggcaacuacaacuaccuguaccgccuguuccgcaagagcaaccucaagcccuucgagcgggacaucuccaccgagaucuaccaggccggcagcacccccugcaacggggugaagggcuucaacugcuacuucccccugcaguccuacggguuccagccgaccaacggcgugggguaccagcccuaccggguggucgugcugagcuucgagcuccugcacgcccccgccacggugugcggccccaagaaguccaccaaccuggucaagaacaagugcgugaacuucaacuucaacggccucaccgggaccggcgugcugaccgagagcaacaagaaguuccugccguuccagcaguucgggcgcgacaucgccgacacgaccgacgcgguccgcgacccccagacccuggagauccucgacaucacccccugcagcuucggcgggguguccgugaucacgccgggcaccaacaccagcaaccaggucgccgugcuguaccagggcgugaacugcaccgagguccccguggccauccacgccgaccagcugacgcccaccuggcggguguacuccaccggcagcaacgucuuccagacccgcgccgggugccucaucggcgcggagcacgugaacaacuccuacgagugcgacauccccaucggggccggcaucugcgccagcuaccagacgcagaccaacuccccgcggcgcgcccggagcguggcgucccagagcaucaucgccuacaccaugucccugggcgccgagaacagcgucgccuacuccaacaacagcaucgccauccccaccaacuucacgaucuccgugaccaccgagauccugcccgugagcaugaccaagacgagcgucgacugcaccauguacaucugcggggacuccaccgagugcagcaaccuccugcugcaguacggcuccuucugcacccagcucaaccgcgcgcugacggggaucgccguggagcaggacaagaacacccaggagguguucgcccaggucaagcagaucuacaagacgcccccgaucaaggacuucggcggguucaacuucagccagauccugcccgaccccuccaagcccagcaagcgguccuucaucgaggaccuccuguucaacaaggugacccuggccgacgccggcuucaucaagcaguacggcgacugccucggggacaucgcggcccgcgaccugaucugcgcccagaaguucaacggccugaccgugcucccgccccugcugaccgacgagaugaucgcccaguacaccagcgcccuccuggcggggaccaucacguccggcuggaccuucggggccggcgccgcccugcagauccccuucgcgaugcagauggccuaccgguucaacggcaucggggucacccagaacgugcucuacgagaaccagaagcugaucgccaaccaguucaacagcgccaucggcaagauccaggacucccugagcuccaccgccagcgcgcucgggaagcugcaggacguggucaaccagaacgcccaggcccugaacacgcucgugaagcagcuguccagcaacuucggcgccaucuccagcgugcugaacgacauccucucccgccuggacaaggucgaggccgaggugcagaucgaccggcugaucaccgggcgccuccagagccugcagaccuacgugacccagcagcugauccgggcggccgagauccgcgccagcgccaaccucgccgcgaccaagauguccgagugcguccugggccagagcaagcggguggacuucugcggcaagggguaccaccugauguccuucccccagagcgccccgcacggcguggucuuccuccacgugacguacguccccgcccaggagaagaacuucaccaccgcccccgcgaucugccacgacgggaaggcccacuucccccgcgagggcguguucguguccaacgggacccacugguucgucacgcagcggaacuucuacgagccgcagaucaucaccaccgacaacaccuucgugagcggcaacugcgacguggucaucggcaucgugaacaacacgguguacgacccccugcagcccgagcuggacuccuucaaggaggagcucgacaaguacuucaagaaccacaccagccccgacgucgaccugggggacaucuccggcaucaacgccagcguggugaacauccagaaggagaucgaccgccugaacgaggucgccaagaaccucaacgagucccugaucgaccugcaggagcucgggaaguacgagcaguacaucaaguggccgugguacaucuggcugggcuucaucgccggccugaucgcgaucgugauggugaccaucaugcucugcugcaugaccagcugcugcuccugccugaaggggugcugcagcugcggcuccugcugcaaguucgacgaggacgacagcgagcccguccugaagggggugaagcuccacuacacgugaggacuagucccuguucccagagcccacuuuuuuuucuuuuuuugaaauaaaauagccugucuuucagaucucaaaggcucuuuucagagccaccaaaaaaaaaaaaaaaaaaaaaaaaaaaaaaaaaaaaaaaaaaaaaaaaaaaaaaaaaaaaaaaaaaaaaaaaaaaaaaaaaaaaaaaaaaaaaaaaaaaaa

SEQ ID NO: 23645 - RNA, 4191 nt, Artificial Sequence
  SARS-CoV-2/Wuhan/WIV05/2019__EPI_ISL_402128 spike protein mRNA gc (1-1273)(L18F_T20N_P26S_D138Y_R190S_K417T_E484K_N501Y_D614G_H655Y _T1027I)
aggagagggcgcuuggcuugcaaggacccugagcugcggcauugaagcacacccaacccaacucgacugaagucagccucacugaaccggaucugagaaucuucucucucugggcuugccagggcucuccgaaccuagcuagcauccucuucaauuccaacuagaaagcuuaccauguucguguuccugguccuccugccccuggugagcucccagugcgugaacuucaccaaccgcacgcagcugccgagcgccuacaccaacagcuucacccggggcgucuacuaccccgacaagguguuccgcuccagcgugcugcacuccacccaggaccucuuccugcccuucuucagcaacgucacgugguuccacgccauccacguguccgggaccaacggcaccaagcgguucgacaacccggugcugcccuucaacgacggggucuacuucgcgagcaccgagaaguccaacaucauccgcggcuggaucuucgggacgacccucgacagcaagacccagucccugcugaucgugaacaacgccaccaacguggucaucaaggugugcgaguuccaguucugcaacuaccccuuccucggcguguacuaccacaagaacaacaagagcuggauggaguccgaguuccgggucuacagcuccgccaacaacugcacguucgaguacgugagccagcccuuccugauggaccuggagggcaagcaggggaacuucaagaaccucagcgaguucguguucaagaacaucgacggcuacuucaagaucuacuccaagcacaccccgaucaaccugguccgggaccugccccagggguucagcgcccucgagccccugguggaccugcccaucggcaucaacaucacccgcuuccagacccuccuggcccugcaccgguccuaccucacgccgggggacagcagcuccggcuggaccgcgggcgccgccgccuacuacgugggguaccugcagccccgcaccuuccugcucaaguacaacgagaacggcaccaucacggacgcggucgacugcgcccuggacccccugagcgagaccaagugcacccucaaguccuucaccguggagaaggggaucuaccagacgagcaacuuccgggugcagcccaccgaguccaucguccgcuucccgaacaucaccaaccugugccccuucggcgagguguucaacgccacccgguucgccagcgucuacgccuggaaccgcaagcggaucuccaacugcguggcggacuacagcgugcuguacaacuccgccagcuucuccacguucaagugcuacggcgucagccccaccaagcucaacgaccugugcuucaccaacguguacgccgacuccuucgugauccgcggggacgagguccggcagaucgcccccggccagaccgggaccaucgccgacuacaacuacaagcugccggacgacuucacgggcugcgugaucgcguggaacagcaacaaccucgacuccaaggucgggggcaacuacaacuaccuguaccgccuguuccgcaagagcaaccucaagcccuucgagcgggacaucuccaccgagaucuaccaggccggcagcacccccugcaacggggugaagggcuucaacugcuacuucccccugcaguccuacggguuccagccgaccuacggcgugggguaccagcccuaccggguggucgugcugagcuucgagcuccugcacgcccccgccacggugugcggccccaagaaguccaccaaccuggucaagaacaagugcgugaacuucaacuucaacggccucaccgggaccggcgugcugaccgagagcaacaagaaguuccugccguuccagcaguucgggcgcgacaucgccgacacgaccgacgcgguccgcgacccccagacccuggagauccucgacaucacccccugcagcuucggcgggguguccgugaucacgccgggcaccaacaccagcaaccaggucgccgugcuguaccagggcgugaacugcaccgagguccccguggccauccacgccgaccagcugacgcccaccuggcggguguacuccaccggcagcaacgucuuccagacccgcgccgggugccucaucggcgcggaguacgugaacaacuccuacgagugcgacauccccaucggggccggcaucugcgccagcuaccagacgcagaccaacuccccgcggcgcgcccggagcguggcgucccagagcaucaucgccuacaccaugucccugggcgccgagaacagcgucgccuacuccaacaacagcaucgccauccccaccaacuucacgaucuccgugaccaccgagauccugcccgugagcaugaccaagacgagcgucgacugcaccauguacaucugcggggacuccaccgagugcagcaaccuccugcugcaguacggcuccuucugcacccagcucaaccgcgcgcugacggggaucgccguggagcaggacaagaacacccaggagguguucgcccaggucaagcagaucuacaagacgcccccgaucaaggacuucggcggguucaacuucagccagauccugcccgaccccuccaagcccagcaagcgguccuucaucgaggaccuccuguucaacaaggugacccuggccgacgccggcuucaucaagcaguacggcgacugccucggggacaucgcggcccgcgaccugaucugcgcccagaaguucaacggccugaccgugcucccgccccugcugaccgacgagaugaucgcccaguacaccagcgcccuccuggcggggaccaucacguccggcuggaccuucggggccggcgccgcccugcagauccccuucgcgaugcagauggccuaccgguucaacggcaucggggucacccagaacgugcucuacgagaaccagaagcugaucgccaaccaguucaacagcgccaucggcaagauccaggacucccugagcuccaccgccagcgcgcucgggaagcugcaggacguggucaaccagaacgcccaggcccugaacacgcucgugaagcagcuguccagcaacuucggcgccaucuccagcgugcugaacgacauccucucccgccuggacaaggucgaggccgaggugcagaucgaccggcugaucaccgggcgccuccagagccugcagaccuacgugacccagcagcugauccgggcggccgagauccgcgccagcgccaaccucgccgcgaucaagauguccgagugcguccugggccagagcaagcggguggacuucugcggcaagggguaccaccugauguccuucccccagagcgccccgcacggcguggucuuccuccacgugacguacguccccgcccaggagaagaacuucaccaccgcccccgcgaucugccacgacgggaaggcccacuucccccgcgagggcguguucguguccaacgggacccacugguucgucacgcagcggaacuucuacgagccgcagaucaucaccaccgacaacaccuucgugagcggcaacugcgacguggucaucggcaucgugaacaacacgguguacgacccccugcagcccgagcuggacuccuucaaggaggagcucgacaaguacuucaagaaccacaccagccccgacgucgaccugggggacaucuccggcaucaacgccagcguggugaacauccagaaggagaucgaccgccugaacgaggucgccaagaaccucaacgagucccugaucgaccugcaggagcucgggaaguacgagcaguacaucaaguggccgugguacaucuggcugggcuucaucgccggccugaucgcgaucgugauggugaccaucaugcucugcugcaugaccagcugcugcuccugccugaaggggugcugcagcugcggcuccugcugcaaguucgacgaggacgacagcgagcccguccugaagggggugaagcuccacuacacgugaggacuagucccuguucccagagcccacuuuuuuuucuuuuuuugaaauaaaauagccugucuuucagaucucaaaggcucuuuucagagccaccaaaaaaaaaaaaaaaaaaaaaaaaaaaaaaaaaaaaaaaaaaaaaaaaaaaaaaaaaaaaaaaaaaaaaaaaaaaaaaaaaaaaaaaaaaaaaaaaaaaaa

SEQ ID NO: 23646 - RNA, 4191 nt, Artificial Sequence
  SARS-CoV-2/Wuhan/WIV05/2019__EPI_ISL_402128 spike protein mRNA gc (1-1273)(S13I_W152C_L452R_D614G)
aggagagggcgcuuggcuugcaaggacccugagcugcggcauugaagcacacccaacccaacucgacugaagucagccucacugaaccggaucugagaaucuucucucucugggcuugccagggcucuccgaaccuagcuagcauccucuucaauuccaacuagaaagcuuaccauguucguguuccugguccuccugccccuggugagcauccagugcgugaaccucaccacccgcacgcagcugccgcccgccuacaccaacagcuucacccggggcgucuacuaccccgacaagguguuccgcuccagcgugcugcacuccacccaggaccucuuccugcccuucuucagcaacgucacgugguuccacgccauccacguguccgggaccaacggcaccaagcgguucgacaacccggugcugcccuucaacgacggggucuacuucgcgagcaccgagaaguccaacaucauccgcggcuggaucuucgggacgacccucgacagcaagacccagucccugcugaucgugaacaacgccaccaacguggucaucaaggugugcgaguuccaguucugcaacgaccccuuccucggcguguacuaccacaagaacaacaagagcugcauggaguccgaguuccgggucuacagcuccgccaacaacugcacguucgaguacgugagccagcccuuccugauggaccuggagggcaagcaggggaacuucaagaaccuccgcgaguucguguucaagaacaucgacggcuacuucaagaucuacuccaagcacaccccgaucaaccugguccgggaccugccccagggguucagcgcccucgagccccugguggaccugcccaucggcaucaacaucacccgcuuccagacccuccuggcccugcaccgguccuaccucacgccgggggacagcagcuccggcuggaccgcgggcgccgccgccuacuacgugggguaccugcagccccgcaccuuccugcucaaguacaacgagaacggcaccaucacggacgcggucgacugcgcccuggacccccugagcgagaccaagugcacccucaaguccuucaccguggagaaggggaucuaccagacgagcaacuuccgggugcagcccaccgaguccaucguccgcuucccgaacaucaccaaccugugccccuucggcgagguguucaacgccacccgguucgccagcgucuacgccuggaaccgcaagcggaucuccaacugcguggcggacuacagcgugcuguacaacuccgccagcuucuccacguucaagugcuacggcgucagccccaccaagcucaacgaccugugcuucaccaacguguacgccgacuccuucgugauccgcggggacgagguccggcagaucgcccccggccagaccgggaagaucgccgacuacaacuacaagcugccggacgacuucacgggcugcgugaucgcguggaacagcaacaaccucgacuccaaggucgggggcaacuacaacuaccgcuaccgccuguuccgcaagagcaaccucaagcccuucgagcgggacaucuccaccgagaucuaccaggccggcagcacccccugcaacgggguggagggcuucaacugcuacuucccccugcaguccuacggguuccagccgaccaacggcgugggguaccagcccuaccggguggucgugcugagcuucgagcuccugcacgcccccgccacggugugcggccccaagaaguccaccaaccuggucaagaacaagugcgugaacuucaacuucaacggccucaccgggaccggcgugcugaccgagagcaacaagaaguuccugccguuccagcaguucgggcgcgacaucgccgacacgaccgacgcgguccgcgacccccagacccuggagauccucgacaucacccccugcagcuucggcgggguguccgugaucacgccgggcaccaacaccagcaaccaggucgccgugcuguaccagggcgugaacugcaccgagguccccguggccauccacgccgaccagcugacgcccaccuggcggguguacuccaccggcagcaacgucuuccagacccgcgccgggugccucaucggcgcggagcacgugaacaacuccuacgagugcgacauccccaucggggccggcaucugcgccagcuaccagacgcagaccaacuccccgcggcgcgcccggagcguggcgucccagagcaucaucgccuacaccaugucccugggcgccgagaacagcgucgccuacuccaacaacagcaucgccauccccaccaacuucacgaucuccgugaccaccgagauccugcccgugagcaugaccaagacgagcgucgacugcaccauguacaucugcggggacuccaccgagugcagcaaccuccugcugcaguacggcuccuucugcacccagcucaaccgcgcgcugacggggaucgccguggagcaggacaagaacacccaggagguguucgcccaggucaagcagaucuacaagacgcccccgaucaaggacuucggcggguucaacuucagccagauccugcccgaccccuccaagcccagcaagcgguccuucaucgaggaccuccuguucaacaaggugacccuggccgacgccggcuucaucaagcaguacggcgacugccucggggacaucgcggcccgcgaccugaucugcgcccagaaguucaacggccugaccgugcucccgccccugcugaccgacgagaugaucgcccaguacaccagcgcccuccuggcggggaccaucacguccggcuggaccuucggggccggcgccgcccugcagauccccuucgcgaugcagauggccuaccgguucaacggcaucggggucacccagaacgugcucuacgagaaccagaagcugaucgccaaccaguucaacagcgccaucggcaagauccaggacucccugagcuccaccgccagcgcgcucgggaagcugcaggacguggucaaccagaacgcccaggcccugaacacgcucgugaagcagcuguccagcaacuucggcgccaucuccagcgugcugaacgacauccucucccgccuggacaaggucgaggccgaggugcagaucgaccggcugaucaccgggcgccuccagagccugcagaccuacgugacccagcagcugauccgggcggccgagauccgcgccagcgccaaccucgccgcgaccaagauguccgagugcguccugggccagagcaagcggguggacuucugcggcaagggguaccaccugauguccuucccccagagcgccccgcacggcguggucuuccuccacgugacguacguccccgcccaggagaagaacuucaccaccgcccccgcgaucugccacgacgggaaggcccacuucccccgcgagggcguguucguguccaacgggacccacugguucgucacgcagcggaacuucuacgagccgcagaucaucaccaccgacaacaccuucgugagcggcaacugcgacguggucaucggcaucgugaacaacacgguguacgacccccugcagcccgagcuggacuccuucaaggaggagcucgacaaguacuucaagaaccacaccagccccgacgucgaccugggggacaucuccggcaucaacgccagcguggugaacauccagaaggagaucgaccgccugaacgaggucgccaagaaccucaacgagucccugaucgaccugcaggagcucgggaaguacgagcaguacaucaaguggccgugguacaucuggcugggcuucaucgccggccugaucgcgaucgugauggugaccaucaugcucugcugcaugaccagcugcugcuccugccugaaggggugcugcagcugcggcuccugcugcaaguucgacgaggacgacagcgagcccguccugaagggggugaagcuccacuacacgugaggacuagucccuguucccagagcccacuuuuuuuucuuuuuuugaaauaaaauagccugucuuucagaucucaaaggcucuuuucagagccaccaaaaaaaaaaaaaaaaaaaaaaaaaaaaaaaaaaaaaaaaaaaaaaaaaaaaaaaaaaaaaaaaaaaaaaaaaaaaaaaaaaaaaaaaaaaaaaaaaaaaa

SEQ ID NO: 23647 - RNA, 4191 nt, Artificial Sequence; identical to SEQ ID NO: 23629
  SARS-CoV-2/Wuhan/WIV05/2019__EPI_ISL_402128 spike protein mRNA gc (1-1273)

SEQ ID NO: 23648 - RNA, 4191 nt, Artificial Sequence
  SARS-CoV-2/Wuhan/WIV05/2019__EPI_ISL_402128 spike protein mRNA gc (1-1273)(D614G)
aggagagggcgcuuggcuugcaaggacccugagcugcggcauugaagcacacccaacccaacucgacugaagucagccucacugaaccggaucugagaaucuucucucucugggcuugccagggcucuccgaaccuagcuagcauccucuucaauuccaacuagaaagcuuaccauguucguguuccugguccuccugccccuggugagcucccagugcgugaaccucaccacccgcacgcagcugccgcccgccuacaccaacagcuucacccggggcgucuacuaccccgacaagguguuccgcuccagcgugcugcacuccacccaggaccucuuccugcccuucuucagcaacgucacgugguuccacgccauccacguguccgggaccaacggcaccaagcgguucgacaacccggugcugcccuucaacgacggggucuacuucgcgagcaccgagaaguccaacaucauccgcggcuggaucuucgggacgacccucgacagcaagacccagucccugcugaucgugaacaacgccaccaacguggucaucaaggugugcgaguuccaguucugcaacgaccccuuccucggcguguacuaccacaagaacaacaagagcuggauggaguccgaguuccgggucuacagcuccgccaacaacugcacguucgaguacgugagccagcccuuccugauggaccuggagggcaagcaggggaacuucaagaaccuccgcgaguucguguucaagaacaucgacggcuacuucaagaucuacuccaagcacaccccgaucaaccugguccgggaccugccccagggguucagcgcccucgagccccugguggaccugcccaucggcaucaacaucacccgcuuccagacccuccuggcccugcaccgguccuaccucacgccgggggacagcagcuccggcuggaccgcgggcgccgccgccuacuacgugggguaccugcagccccgcaccuuccugcucaaguacaacgagaacggcaccaucacggacgcggucgacugcgcccuggacccccugagcgagaccaagugcacccucaaguccuucaccguggagaaggggaucuaccagacgagcaacuuccgggugcagcccaccgaguccaucguccgcuucccgaacaucaccaaccugugccccuucggcgagguguucaacgccacccgguucgccagcgucuacgccuggaaccgcaagcggaucuccaacugcguggcggacuacagcgugcuguacaacuccgccagcuucuccacguucaagugcuacggcgucagccccaccaagcucaacgaccugugcuucaccaacguguacgccgacuccuucgugauccgcggggacgagguccggcagaucgcccccggccagaccgggaagaucgccgacuacaacuacaagcugccggacgacuucacgggcugcgugaucgcguggaacagcaacaaccucgacuccaaggucgggggcaacuacaacuaccuguaccgccuguuccgcaagagcaaccucaagcccuucgagcgggacaucuccaccgagaucuaccaggccggcagcacccccugcaacgggguggagggcuucaacugcuacuucccccugcaguccuacggguuccagccgaccaacggcgugggguaccagcccuaccggguggucgugcugagcuucgagcuccugcacgcccccgccacggugugcggccccaagaaguccaccaaccuggucaagaacaagugcgugaacuucaacuucaacggccucaccgggaccggcgugcugaccgagagcaacaagaaguuccugccguuccagcaguucgggcgcgacaucgccgacacgaccgacgcgguccgcgacccccagacccuggagauccucgacaucacccccugcagcuucggcgggguguccgugaucacgccgggcaccaacaccagcaaccaggucgccgugcuguaccagggcgugaacugcaccgagguccccguggccauccacgccgaccagcugacgcccaccuggcggguguacuccaccgggagcaacgucuuccagacccgcgccggcugccucaucggggcggagcacgugaacaacuccuacgagugcgacauccccaucggcgccggcaucugcgccagcuaccagacgcagaccaacuccccgcggcgcgcccggagcguggcgucccagagcaucaucgccuacaccaugucccugggggccgagaacagcgucgccuacuccaacaacagcaucgccauccccaccaacuucacgaucuccgugaccaccgagauccugcccgugagcaugaccaagacgagcgucgacugcaccauguacaucugcggcgacuccaccgagugcagcaaccuccugcugcaguacggguccuucugcacccagcucaaccgcgcgcugacgggcaucgccguggagcaggacaagaacacccaggagguguucgcccaggucaagcagaucuacaagacgcccccgaucaaggacuucgggggcuucaacuucagccagauccugcccgaccccuccaagcccagcaagcgguccuucaucgaggaccuccuguucaacaaggugacccuggccgacgccggcuucaucaagcaguacggggacugccucggcgacaucgcggcccgcgaccugaucugcgcccagaaguucaacgggcugaccgugcucccgccccugcugaccgacgagaugaucgcccaguacaccagcgcccuccuggcgggcaccaucacguccggguggaccuucggcgccggcgccgcccugcagauccccuucgcgaugcagauggccuaccgguucaacgggaucggcgucacccagaacgugcucuacgagaaccagaagcugaucgccaaccaguucaacagcgccaucgggaagauccaggacucccugagcuccaccgccagcgcgcucggcaagcugcaggacguggucaaccagaacgcccaggcccugaacacgcucgugaagcagcuguccagcaacuucggggccaucuccagcgugcugaacgacauccucucccgccuggacaaggucgaggccgaggugcagaucgaccggcugaucaccggccgccuccagagccugcagaccuacgugacccagcagcugauccgggcggccgagauccgcgccagcgccaaccucgccgcgaccaagauguccgagugcguccugggccagagcaagcggguggacuucugcgggaagggcuaccaccugauguccuucccccagagcgccccgcacgggguggucuuccuccacgugacguacguccccgcccaggagaagaacuucaccaccgcccccgcgaucugccacgacggcaaggcccacuucccccgcgaggggguguucguguccaacggcacccacugguucgucacgcagcggaacuucuacgagccgcagaucaucaccaccgacaacaccuucgugagcggcaacugcgacguggucaucgggaucgugaacaacacgguguacgacccccugcagcccgagcuggacuccuucaaggaggagcucgacaaguacuucaagaaccacaccagccccgacgucgaccugggcgacaucuccgggaucaacgccagcguggugaacauccagaaggagaucgaccgccugaacgaggucgccaagaaccucaacgagucccugaucgaccugcaggagcucggcaaguacgagcaguacaucaaguggccgugguacaucuggcugggcuucaucgccgggcugaucgcgaucgugauggugaccaucaugcucugcugcaugaccagcugcugcuccugccugaagggcugcugcagcugcggguccugcugcaaguucgacgaggacgacagcgagcccguccugaagggcgugaagcuccacuacacgugaggacuagucccuguucccagagcccacuuuuuuuucuuuuuuugaaauaaaauagccugucuuucagaucucaaaggcucuuuucagagccaccaaaaaaaaaaaaaaaaaaaaaaaaaaaaaaaaaaaaaaaaaaaaaaaaaaaaaaaaaaaaaaaaaaaaaaaaaaaaaaaaaaaaaaaaaaaaaaaaaaaaa

SEQ ID NO: 23649 - RNA, 4191 nt, Artificial Sequence
  SARS-CoV-2/Wuhan/WIV05/2019__EPI_ISL_402128 spike protein mRNA gc (1-1273)(A222V_D614G)
aggagagggcgcuuggcuugcaaggacccugagcugcggcauugaagcacacccaacccaacucgacugaagucagccucacugaaccggaucugagaaucuucucucucugggcuugccagggcucuccgaaccuagcuagcauccucuucaauuccaacuagaaagcuuaccauguucguguuccugguccuccugccccuggugagcucccagugcgugaaccucaccacccgcacgcagcugccgcccgccuacaccaacagcuucacccggggcgucuacuaccccgacaagguguuccgcuccagcgugcugcacuccacccaggaccucuuccugcccuucuucagcaacgucacgugguuccacgccauccacguguccgggaccaacggcaccaagcgguucgacaacccggugcugcccuucaacgacggggucuacuucgcgagcaccgagaaguccaacaucauccgcggcuggaucuucgggacgacccucgacagcaagacccagucccugcugaucgugaacaacgccaccaacguggucaucaaggugugcgaguuccaguucugcaacgaccccuuccucggcguguacuaccacaagaacaacaagagcuggauggaguccgaguuccgggucuacagcuccgccaacaacugcacguucgaguacgugagccagcccuuccugauggaccuggagggcaagcaggggaacuucaagaaccuccgcgaguucguguucaagaacaucgacggcuacuucaagaucuacuccaagcacaccccgaucaaccugguccgggaccugccccagggguucagcgugcucgagccccugguggaccugcccaucggcaucaacaucacccgcuuccagacccuccuggcccugcaccgguccuaccucacgccgggggacagcagcuccggcuggaccgccggcgcggccgccuacuacgucggguaccugcagccccgcaccuuccugcucaaguacaacgagaacggcaccaucacggacgccguggacugcgcgcuggacccccugagcgagaccaagugcacccucaaguccuucaccguggagaaggggaucuaccagacgagcaacuuccggguccagcccaccgaguccaucgugcgcuucccgaacaucaccaaccugugccccuucggcgaggucuucaacgccacccgguucgccagcguguacgccuggaaccgcaagcggaucuccaacugcguggccgacuacagcguccuguacaacuccgcgagcuucuccacguucaagugcuacggcgugagccccaccaagcucaacgaccugugcuucaccaacguguacgccgacuccuucgucauccgcggggacgaggugcggcagaucgcccccggccagaccgggaagaucgccgacuacaacuacaagcugccggacgacuucacgggcugcgugaucgccuggaacagcaacaaccucgacuccaaggucgggggcaacuacaacuaccuguaccgccuguuccgcaagagcaaccucaagcccuucgagcgggacaucuccaccgagaucuaccaggcgggcagcacccccugcaacgggguggagggcuucaacugcuacuucccccugcaguccuacggguuccagccgaccaacggcgugggguaccagcccuaccgggucguggugcugagcuucgagcuccugcacgcccccgccacggucugcggccccaagaaguccaccaaccuggugaagaacaagugcgugaacuucaacuucaacggccucaccgggaccggcguccugaccgagagcaacaagaaguuccugccguuccagcaguucgggcgcgacaucgccgacacgaccgacgccgugcgcgacccccagacccuggagauccucgacaucacccccugcagcuucggcgggguguccgucaucacgccgggcaccaacaccagcaaccagguggcggugcuguaccagggcgucaacugcaccgaggugcccguggccauccacgccgaccagcugacgcccaccuggcgggucuacuccaccgggagcaacguguuccagacccgcgccggcugccucaucggggccgagcacgugaacaacuccuacgagugcgacauccccaucggcgcgggcaucugcgccagcuaccagacgcagaccaacuccccgcggcgcgcccggagcgucgccucccagagcaucaucgcguacaccaugucccugggggccgagaacagcguggccuacuccaacaacagcaucgccauccccaccaacuucacgaucuccgugaccaccgagauccugcccgucagcaugaccaagacgagcguggacugcaccauguacaucugcggcgacuccaccgagugcagcaaccuccugcugcaguacggguccuucugcacccagcucaaccgcgcccugacgggcaucgcgguggagcaggacaagaacacccaggaggucuucgcccaggugaagcagaucuacaagacgcccccgaucaaggacuucgggggcuucaacuucagccagauccugcccgaccccuccaagcccagcaagcgguccuucaucgaggaccuccuguucaacaaggugacccuggccgacgccggcuucaucaagcaguacggggacugccucggcgacaucgccgcgcgcgaccugaucugcgcccagaaguucaacgggcugaccguccucccgccccugcugaccgacgagaugaucgcccaguacaccagcgcccuccuggccggcaccaucacguccggguggaccuucggcgcgggcgccgcccugcagauccccuucgccaugcagauggcguaccgguucaacgggaucggcgugacccagaacgugcucuacgagaaccagaagcugaucgccaaccaguucaacagcgccaucgggaagauccaggacucccugagcuccaccgccagcgcccucggcaagcugcaggacgucgugaaccagaacgcgcaggcccugaacacgcucgugaagcagcuguccagcaacuucggggccaucuccagcguccugaacgacauccucucccgccuggacaagguggaggccgaggugcagaucgaccggcugaucaccggccgccuccagagccugcagaccuacgucacccagcagcugauccgggccgcggagauccgcgccagcgccaaccucgccgccaccaagauguccgagugcgugcugggccagagcaagcggguggacuucugcgggaagggcuaccaccugauguccuucccccagagcgcgccgcacggggucguguuccuccacgucacguacgugcccgcccaggagaagaacuucaccaccgcccccgccaucugccacgacggcaaggcgcacuucccccgcgaggggguguucgucuccaacggcacccacugguucgugacgcagcggaacuucuacgagccgcagaucaucaccaccgacaacaccuucgugagcggcaacugcgacgucgugaucgggaucgugaacaacacggucuacgacccccugcagcccgagcuggacuccuucaaggaggagcucgacaaguacuucaagaaccacaccagccccgacguggaccugggcgacaucuccgggaucaacgccagcguggucaacauccagaaggagaucgaccgccugaacgagguggccaagaaccucaacgagucccugaucgaccugcaggagcucggcaaguacgagcaguacaucaaguggccgugguacaucuggcugggcuucaucgccgggcugaucgccaucgugauggucaccaucaugcucugcugcaugaccagcugcugcuccugccugaagggcugcugcagcugcggguccugcugcaaguucgacgaggacgacagcgagcccgugcugaagggcgugaagcuccacuacacgugaggacuagucccuguucccagagcccacuuuuuuuucuuuuuuugaaauaaaauagccugucuuucagaucucaaaggcucuuuucagagccaccaaaaaaaaaaaaaaaaaaaaaaaaaaaaaaaaaaaaaaaaaaaaaaaaaaaaaaaaaaaaaaaaaaaaaaaaaaaaaaaaaaaaaaaaaaaaaaaaaaaaa

SEQ ID NO: 23650 - RNA, 4191 nt, Artificial Sequence
  SARS-CoV-2/Wuhan/WIV05/2019__EPI_ISL_402128 spike protein mRNA gc (1-1273)(N439K_D614G)
aggagagggcgcuuggcuugcaaggacccugagcugcggcauugaagcacacccaacccaacucgacugaagucagccucacugaaccggaucugagaaucuucucucucugggcuugccagggcucuccgaaccuagcuagcauccucuucaauuccaacuagaaagcuuaccauguucguguuccugguccuccugccccuggugagcucccagugcgugaaccucaccacccgcacgcagcugccgcccgccuacaccaacagcuucacccggggcgucuacuaccccgacaagguguuccgcuccagcgugcugcacuccacccaggaccucuuccugcccuucuucagcaacgucacgugguuccacgccauccacguguccgggaccaacggcaccaagcgguucgacaacccggugcugcccuucaacgacggggucuacuucgcgagcaccgagaaguccaacaucauccgcggcuggaucuucgggacgacccucgacagcaagacccagucccugcugaucgugaacaacgccaccaacguggucaucaaggugugcgaguuccaguucugcaacgaccccuuccucggcguguacuaccacaagaacaacaagagcuggauggaguccgaguuccgggucuacagcuccgccaacaacugcacguucgaguacgugagccagcccuuccugauggaccuggagggcaagcaggggaacuucaagaaccuccgcgaguucguguucaagaacaucgacggcuacuucaagaucuacuccaagcacaccccgaucaaccugguccgggaccugccccagggguucagcgcccucgagccccugguggaccugcccaucggcaucaacaucacccgcuuccagacccuccuggcccugcaccgguccuaccucacgccgggggacagcagcuccggcuggaccgcgggcgccgccgccuacuacgugggguaccugcagccccgcaccuuccugcucaaguacaacgagaacggcaccaucacggacgcggucgacugcgcccuggacccccugagcgagaccaagugcacccucaaguccuucaccguggagaaggggaucuaccagacgagcaacuuccgggugcagcccaccgaguccaucguccgcuucccgaacaucaccaaccugugccccuucggcgagguguucaacgccacccgguucgccagcgucuacgccuggaaccgcaagcggaucuccaacugcguggcggacuacagcgugcuguacaacuccgccagcuucuccacguucaagugcuacggcgucagccccaccaagcucaacgaccugugcuucaccaacguguacgccgacuccuucgugauccgcggggacgagguccggcagaucgcccccggccagaccgggaagaucgccgacuacaacuacaagcugccggacgacuucacgggcugcgugaucgcguggaacagcaagaaccucgacuccaaggucgggggcaacuacaacuaccuguaccgccuguuccgcaagagcaaccucaagcccuucgagcgggacaucuccaccgagaucuaccaggccggcagcacccccugcaacgggguggagggcuucaacugcuacuucccccugcaguccuacggguuccagccgaccaacggcgugggguaccagcccuaccggguggucgugcugagcuucgagcuccugcacgcccccgccacggugugcggccccaagaaguccaccaaccuggucaagaacaagugcgugaacuucaacuucaacggccucaccgggaccggcgugcugaccgagagcaacaagaaguuccugccguuccagcaguucgggcgcgacaucgccgacacgaccgacgcgguccgcgacccccagacccuggagauccucgacaucacccccugcagcuucggcgggguguccgugaucacgccgggcaccaacaccagcaaccaggucgccgugcuguaccagggcgugaacugcaccgagguccccguggccauccacgccgaccagcugacgcccaccuggcggguguacuccaccgggagcaacgucuuccagacccgcgccggcugccucaucggggcggagcacgugaacaacuccuacgagugcgacauccccaucggcgccggcaucugcgccagcuaccagacgcagaccaacuccccgcggcgcgcccggagcguggcgucccagagcaucaucgccuacaccaugucccugggggccgagaacagcgucgccuacuccaacaacagcaucgccauccccaccaacuucacgaucuccgugaccaccgagauccugcccgugagcaugaccaagacgagcgucgacugcaccauguacaucugcggcgacuccaccgagugcagcaaccuccugcugcaguacggguccuucugcacccagcucaaccgcgcgcugacgggcaucgccguggagcaggacaagaacacccaggagguguucgcccaggucaagcagaucuacaagacgcccccgaucaaggacuucgggggcuucaacuucagccagauccugcccgaccccuccaagcccagcaagcgguccuucaucgaggaccuccuguucaacaaggugacccuggccgacgccggcuucaucaagcaguacggggacugccucggcgacaucgcggcccgcgaccugaucugcgcccagaaguucaacgggcugaccgugcucccgccccugcugaccgacgagaugaucgcccaguacaccagcgcccuccuggcgggcaccaucacguccggguggaccuucggcgccggcgccgcccugcagauccccuucgcgaugcagauggccuaccgguucaacgggaucggcgucacccagaacgugcucuacgagaaccagaagcugaucgccaaccaguucaacagcgccaucgggaagauccaggacucccugagcuccaccgccagcgcgcucggcaagcugcaggacguggucaaccagaacgcccaggcccugaacacgcucgugaagcagcuguccagcaacuucggggccaucuccagcgugcugaacgacauccucucccgccuggacaaggucgaggccgaggugcagaucgaccggcugaucaccggccgccuccagagccugcagaccuacgugacccagcagcugauccgggcggccgagauccgcgccagcgccaaccucgccgcgaccaagauguccgagugcguccugggccagagcaagcggguggacuucugcgggaagggcuaccaccugauguccuucccccagagcgccccgcacgggguggucuuccuccacgugacguacguccccgcccaggagaagaacuucaccaccgcccccgcgaucugccacgacggcaaggcccacuucccccgcgaggggguguucguguccaacggcacccacugguucgucacgcagcggaacuucuacgagccgcagaucaucaccaccgacaacaccuucgugagcggcaacugcgacguggucaucgggaucgugaacaacacgguguacgacccccugcagcccgagcuggacuccuucaaggaggagcucgacaaguacuucaagaaccacaccagccccgacgucgaccugggcgacaucuccgggaucaacgccagcguggugaacauccagaaggagaucgaccgccugaacgaggucgccaagaaccucaacgagucccugaucgaccugcaggagcucggcaaguacgagcaguacaucaaguggccgugguacaucuggcugggcuucaucgccgggcugaucgcgaucgugauggugaccaucaugcucugcugcaugaccagcugcugcuccugccugaagggcugcugcagcugcggguccugcugcaaguucgacgaggacgacagcgagcccguccugaagggcgugaagcuccacuacacgugaggacuagucccuguucccagagcccacuuuuuuuucuuuuuuugaaauaaaauagccugucuuucagaucucaaaggcucuuuucagagccaccaaaaaaaaaaaaaaaaaaaaaaaaaaaaaaaaaaaaaaaaaaaaaaaaaaaaaaaaaaaaaaaaaaaaaaaaaaaaaaaaaaaaaaaaaaaaaaaaaaaaa

SEQ ID NO: 23651 - RNA, 4191 nt, Artificial Sequence
  SARS-CoV-2/Wuhan/WIV05/2019__EPI_ISL_402128 spike protein mRNA gc (1-1273)(S477N_D614G)
aggagagggcgcuuggcuugcaaggacccugagcugcggcauugaagcacacccaacccaacucgacugaagucagccucacugaaccggaucugagaaucuucucucucugggcuugccagggcucuccgaaccuagcuagcauccucuucaauuccaacuagaaagcuuaccauguucguguuccugguccuccugccccuggugagcucccagugcgugaaccucaccacccgcacgcagcugccgcccgccuacaccaacagcuucacccggggcgucuacuaccccgacaagguguuccgcuccagcgugcugcacuccacccaggaccucuuccugcccuucuucagcaacgucacgugguuccacgccauccacguguccgggaccaacggcaccaagcgguucgacaacccggugcugcccuucaacgacggggucuacuucgcgagcaccgagaaguccaacaucauccgcggcuggaucuucgggacgacccucgacagcaagacccagucccugcugaucgugaacaacgccaccaacguggucaucaaggugugcgaguuccaguucugcaacgaccccuuccucggcguguacuaccacaagaacaacaagagcuggauggaguccgaguuccgggucuacagcuccgccaacaacugcacguucgaguacgugagccagcccuuccugauggaccuggagggcaagcaggggaacuucaagaaccuccgcgaguucguguucaagaacaucgacggcuacuucaagaucuacuccaagcacaccccgaucaaccugguccgggaccugccccagggguucagcgcccucgagccccugguggaccugcccaucggcaucaacaucacccgcuuccagacccuccuggcccugcaccgguccuaccucacgccgggggacagcagcuccggcuggaccgcgggcgccgccgccuacuacgugggguaccugcagccccgcaccuuccugcucaaguacaacgagaacggcaccaucacggacgcggucgacugcgcccuggacccccugagcgagaccaagugcacccucaaguccuucaccguggagaaggggaucuaccagacgagcaacuuccgggugcagcccaccgaguccaucguccgcuucccgaacaucaccaaccugugccccuucggcgagguguucaacgccacccgguucgccagcgucuacgccuggaaccgcaagcggaucuccaacugcguggcggacuacagcgugcuguacaacuccgccagcuucuccacguucaagugcuacggcgucagccccaccaagcucaacgaccugugcuucaccaacguguacgccgacuccuucgugauccgcggggacgagguccggcagaucgcccccggccagaccgggaagaucgccgacuacaacuacaagcugccggacgacuucacgggcugcgugaucgcguggaacagcaacaaccucgacuccaaggucgggggcaacuacaacuaccuguaccgccuguuccgcaagagcaaccucaagcccuucgagcgggacaucuccaccgagaucuaccaggccggcaacacccccugcaacgggguggagggcuucaacugcuacuucccccugcagagcuacggguuccagccgaccaacggcgugggguaccagcccuaccggguggucgugcuguccuucgagcuccugcacgcccccgccacggugugcggccccaagaaguccaccaaccuggucaagaacaagugcgugaacuucaacuucaacggccucaccgggaccggcgugcugaccgagagcaacaagaaguuccugccguuccagcaguucgggcgcgacaucgccgacacgaccgacgcgguccgcgacccccagacccuggagauccucgacaucacccccugcagcuucggcggggugagcgugaucacgccgggcaccaacaccuccaaccaggucgccgugcuguaccagggcgugaacugcaccgagguccccguggccauccacgccgaccagcugacgcccaccuggcggguguacagcaccggguccaacgucuuccagacccgcgccggcugccucaucggggcggagcacgugaacaacagcuacgagugcgacauccccaucggcgccggcaucugcgccuccuaccagacgcagaccaacagcccgcggcgcgcccgguccguggcgagccaguccaucaucgccuacaccaugagccugggggccgagaacuccgucgccuacagcaacaacuccaucgccauccccaccaacuucacgaucagcgugaccaccgagauccugcccguguccaugaccaagacgagcgucgacugcaccauguacaucugcggcgacagcaccgagugcuccaaccuccugcugcaguacgggagcuucugcacccagcucaaccgcgcgcugacgggcaucgccguggagcaggacaagaacacccaggagguguucgcccaggucaagcagaucuacaagacgcccccgaucaaggacuucgggggcuucaacuucucccagauccugcccgaccccagcaagcccuccaagcggagcuucaucgaggaccuccuguucaacaaggugacccuggccgacgccggcuucaucaagcaguacggggacugccucggcgacaucgcggcccgcgaccugaucugcgcccagaaguucaacgggcugaccgugcucccgccccugcugaccgacgagaugaucgcccaguacaccuccgcccuccuggcgggcaccaucacgagcggguggaccuucggcgccggcgccgcccugcagauccccuucgcgaugcagauggccuaccgguucaacgggaucggcgucacccagaacgugcucuacgagaaccagaagcugaucgccaaccaguucaacuccgccaucgggaagauccaggacagccuguccagcaccgccuccgcgcucggcaagcugcaggacguggucaaccagaacgcccaggcccugaacacgcucgugaagcagcugagcuccaacuucggggccaucagcuccgugcugaacgacauccucagccgccuggacaaggucgaggccgaggugcagaucgaccggcugaucaccggccgccuccagucccugcagaccuacgugacccagcagcugauccgggcggccgagauccgcgccagcgccaaccucgccgcgaccaagaugagcgagugcguccugggccaguccaagcggguggacuucugcgggaagggcuaccaccugaugagcuucccccaguccgccccgcacgggguggucuuccuccacgugacguacguccccgcccaggagaagaacuucaccaccgcccccgcgaucugccacgacggcaaggcccacuucccccgcgaggggguguucgugagcaacggcacccacugguucgucacgcagcggaacuucuacgagccgcagaucaucaccaccgacaacaccuucguguccggcaacugcgacguggucaucgggaucgugaacaacacgguguacgacccccugcagcccgagcuggacagcuucaaggaggagcucgacaaguacuucaagaaccacaccucccccgacgucgaccugggcgacaucagcgggaucaacgccuccguggugaacauccagaaggagaucgaccgccugaacgaggucgccaagaaccucaacgagagccugaucgaccugcaggagcucggcaaguacgagcaguacaucaaguggccgugguacaucuggcugggcuucaucgccgggcugaucgcgaucgugauggugaccaucaugcucugcugcaugaccuccugcugcagcugccugaagggcugcugcuccugcgggagcugcugcaaguucgacgaggacgacuccgagcccguccugaagggcgugaagcuccacuacacgugaggacuagucccuguucccagagcccacuuuuuuuucuuuuuuugaaauaaaauagccugucuuucagaucucaaaggcucuuuucagagccaccaaaaaaaaaaaaaaaaaaaaaaaaaaaaaaaaaaaaaaaaaaaaaaaaaaaaaaaaaaaaaaaaaaaaaaaaaaaaaaaaaaaaaaaaaaaaaaaaaaaaa

SEQ ID NO: 23652 - RNA, 4191 nt, Artificial Sequence
  SARS-CoV-2/Wuhan/WIV05/2019__EPI_ISL_402128 spike protein mRNA gc (1-1273)(N501Y_D614G)
aggagagggcgcuuggcuugcaaggacccugagcugcggcauugaagcacacccaacccaacucgacugaagucagccucacugaaccggaucugagaaucuucucucucugggcuugccagggcucuccgaaccuagcuagcauccucuucaauuccaacuagaaagcuuaccauguucguguuccugguccuccugccccuggugagcucccagugcgugaaccucaccacccgcacgcagcugccgcccgccuacaccaacagcuucacccggggcgucuacuaccccgacaagguguuccgcuccagcgugcugcacuccacccaggaccucuuccugcccuucuucagcaacgucacgugguuccacgccauccacguguccgggaccaacggcaccaagcgguucgacaacccggugcugcccuucaacgacggggucuacuucgcgagcaccgagaaguccaacaucauccgcggcuggaucuucgggacgacccucgacagcaagacccagucccugcugaucgugaacaacgccaccaacguggucaucaaggugugcgaguuccaguucugcaacgaccccuuccucggcguguacuaccacaagaacaacaagagcuggauggaguccgaguuccgggucuacagcuccgccaacaacugcacguucgaguacgugagccagcccuuccugauggaccuggagggcaagcaggggaacuucaagaaccuccgcgaguucguguucaagaacaucgacggcuacuucaagaucuacuccaagcacaccccgaucaaccugguccgggaccugccccagggguucagcgcccucgagccccugguggaccugcccaucggcaucaacaucacccgcuuccagacccuccuggcccugcaccgguccuaccucacgccgggggacagcagcuccggcuggaccgcgggcgccgccgccuacuacgugggguaccugcagccccgcaccuuccugcucaaguacaacgagaacggcaccaucacggacgcggucgacugcgcccuggacccccugagcgagaccaagugcacccucaaguccuucaccguggagaaggggaucuaccagacgagcaacuuccgggugcagcccaccgaguccaucguccgcuucccgaacaucaccaaccugugccccuucggcgagguguucaacgccacccgguucgccagcgucuacgccuggaaccgcaagcggaucuccaacugcguggcggacuacagcgugcuguacaacuccgccagcuucuccacguucaagugcuacggcgucagccccaccaagcucaacgaccugugcuucaccaacguguacgccgacuccuucgugauccgcggggacgagguccggcagaucgcccccggccagaccgggaagaucgccgacuacaacuacaagcugccggacgacuucacgggcugcgugaucgcguggaacagcaacaaccucgacuccaaggucgggggcaacuacaacuaccuguaccgccuguuccgcaagagcaaccucaagcccuucgagcgggacaucuccaccgagaucuaccaggccggcagcacccccugcaacgggguggagggcuucaacugcuacuucccccugcaguccuacggguuccagccgaccuacggcgugggguaccagcccuaccggguggucgugcugagcuucgagcuccugcacgcccccgccacggugugcggccccaagaaguccaccaaccuggucaagaacaagugcgugaacuucaacuucaacggccucaccgggaccggcgugcugaccgagagcaacaagaaguuccugccguuccagcaguucgggcgcgacaucgccgacacgaccgacgcgguccgcgacccccagacccuggagauccucgacaucacccccugcagcuucggcgggguguccgugaucacgccgggcaccaacaccagcaaccaggucgccgugcuguaccagggcgugaacugcaccgagguccccguggccauccacgccgaccagcugacgcccaccuggcggguguacuccaccgggagcaacgucuuccagacccgcgccggcugccucaucggggcggagcacgugaacaacuccuacgagugcgacauccccaucggcgccggcaucugcgccagcuaccagacgcagaccaacuccccgcggcgcgcccggagcguggcgucccagagcaucaucgccuacaccaugucccugggggccgagaacagcgucgccuacuccaacaacagcaucgccauccccaccaacuucacgaucuccgugaccaccgagauccugcccgugagcaugaccaagacgagcgucgacugcaccauguacaucugcggcgacuccaccgagugcagcaaccuccugcugcaguacggguccuucugcacccagcucaaccgcgcgcugacgggcaucgccguggagcaggacaagaacacccaggagguguucgcccaggucaagcagaucuacaagacgcccccgaucaaggacuucgggggcuucaacuucagccagauccugcccgaccccuccaagcccagcaagcgguccuucaucgaggaccuccuguucaacaaggugacccuggccgacgccggcuucaucaagcaguacggggacugccucggcgacaucgcggcccgcgaccugaucugcgcccagaaguucaacgggcugaccgugcucccgccccugcugaccgacgagaugaucgcccaguacaccagcgcccuccuggcgggcaccaucacguccggguggaccuucggcgccggcgccgcccugcagauccccuucgcgaugcagauggccuaccgguucaacgggaucggcgucacccagaacgugcucuacgagaaccagaagcugaucgccaaccaguucaacagcgccaucgggaagauccaggacucccugagcuccaccgccagcgcgcucggcaagcugcaggacguggucaaccagaacgcccaggcccugaacacgcucgugaagcagcuguccagcaacuucggggccaucuccagcgugcugaacgacauccucucccgccuggacaaggucgaggccgaggugcagaucgaccggcugaucaccggccgccuccagagccugcagaccuacgugacccagcagcugauccgggcggccgagauccgcgccagcgccaaccucgccgcgaccaagauguccgagugcguccugggccagagcaagcggguggacuucugcgggaagggcuaccaccugauguccuucccccagagcgccccgcacgggguggucuuccuccacgugacguacguccccgcccaggagaagaacuucaccaccgcccccgcgaucugccacgacggcaaggcccacuucccccgcgaggggguguucguguccaacggcacccacugguucgucacgcagcggaacuucuacgagccgcagaucaucaccaccgacaacaccuucgugagcggcaacugcgacguggucaucgggaucgugaacaacacgguguacgacccccugcagcccgagcuggacuccuucaaggaggagcucgacaaguacuucaagaaccacaccagccccgacgucgaccugggcgacaucuccgggaucaacgccagcguggugaacauccagaaggagaucgaccgccugaacgaggucgccaagaaccucaacgagucccugaucgaccugcaggagcucggcaaguacgagcaguacaucaaguggccgugguacaucuggcugggcuucaucgccgggcugaucgcgaucgugauggugaccaucaugcucugcugcaugaccagcugcugcuccugccugaagggcugcugcagcugcggguccugcugcaaguucgacgaggacgacagcgagcccguccugaagggcgugaagcuccacuacacgugaggacuagucccuguucccagagcccacuuuuuuuucuuuuuuugaaauaaaauagccugucuuucagaucucaaaggcucuuuucagagccaccaaaaaaaaaaaaaaaaaaaaaaaaaaaaaaaaaaaaaaaaaaaaaaaaaaaaaaaaaaaaaaaaaaaaaaaaaaaaaaaaaaaaaaaaaaaaaaaaaaaaa

SEQ ID NO: 23653 - RNA, 4185 nt, Artificial Sequence
  SARS-CoV-2/Wuhan/WIV05/2019__EPI_ISL_402128 spike protein mRNA gc (1-1273)(H69del_V70del_D614G)
aggagagggcgcuuggcuugcaaggacccugagcugcggcauugaagcacacccaacccaacucgacugaagucagccucacugaaccggaucugagaaucuucucucucugggcuugccagggcucuccgaaccuagcuagcauccucuucaauuccaacuagaaagcuuaccauguucguguuccugguccuccugccccuggugagcucccagugcgugaaccucaccacccgcacgcagcugccgcccgccuacaccaacagcuucacccggggcgucuacuaccccgacaagguguuccgcuccagcgugcugcacuccacccaggaccucuuccugcccuucuucagcaacgucacgugguuccacgccaucuccgggaccaacggcaccaagcgguucgacaacccggugcugcccuucaacgacgggguguacuucgcgagcaccgagaaguccaacaucauccgcggcuggaucuucgggacgacccucgacagcaagacccagucccugcugaucgucaacaacgccaccaacguggugaucaaggucugcgaguuccaguucugcaacgaccccuuccucggcguguacuaccacaagaacaacaagagcuggauggaguccgaguuccggguguacagcuccgccaacaacugcacguucgaguacgucagccagcccuuccugauggaccuggagggcaagcaggggaacuucaagaaccuccgcgaguucguguucaagaacaucgacggcuacuucaagaucuacuccaagcacaccccgaucaaccuggugcgggaccugccccagggguucagcgcccucgagccccuggucgaccugcccaucggcaucaacaucacccgcuuccagacccuccuggcccugcaccgguccuaccucacgccgggggacagcagcuccggcuggaccgcgggcgccgccgccuacuacgugggguaccugcagccccgcaccuuccugcucaaguacaacgagaacggcaccaucacggacgcgguggacugcgcccuggacccccugagcgagaccaagugcacccucaaguccuucaccgucgagaaggggaucuaccagacgagcaacuuccgggugcagcccaccgaguccaucgugcgcuucccgaacaucaccaaccugugccccuucggcgaggucuucaacgccacccgguucgccagcguguacgccuggaaccgcaagcggaucuccaacugcgucgcggacuacagcgugcuguacaacuccgccagcuucuccacguucaagugcuacggcgugagccccaccaagcucaacgaccugugcuucaccaacgucuacgccgacuccuucgugauccgcggggacgaggugcggcagaucgcccccggccagaccgggaagaucgccgacuacaacuacaagcugccggacgacuucacgggcugcgucaucgcguggaacagcaacaaccucgacuccaaggucgggggcaacuacaacuaccuguaccgccuguuccgcaagagcaaccucaagcccuucgagcgggacaucuccaccgagaucuaccaggccggcagcacccccugcaacgggguggagggcuucaacugcuacuucccccugcaguccuacggguuccagccgaccaacggcgugggguaccagcccuaccggguggugguccugagcuucgagcuccugcacgcccccgccacggugugcggccccaagaaguccaccaaccuggugaagaacaagugcgucaacuucaacuucaacggccucaccgggaccggcgugcugaccgagagcaacaagaaguuccugccguuccagcaguucgggcgcgacaucgccgacacgaccgacgcggugcgcgacccccagacccuggagauccucgacaucacccccugcagcuucggcggggucuccgugaucacgccgggcaccaacaccagcaaccagguggccguccuguaccagggcgugaacugcaccgaggugcccgucgccauccacgccgaccagcugacgcccaccuggcggguguacuccaccgggagcaacguguuccagacccgcgccggcugccucaucggggcggagcacgucaacaacuccuacgagugcgacauccccaucggcgccggcaucugcgccagcuaccagacgcagaccaacuccccgcggcgcgcccggagcguggcgucccagagcaucaucgccuacaccaugucccugggggccgagaacagcguggccuacuccaacaacagcaucgccauccccaccaacuucacgaucuccgucaccaccgagauccugcccgugagcaugaccaagacgagcguggacugcaccauguacaucugcggcgacuccaccgagugcagcaaccuccugcugcaguacggguccuucugcacccagcucaaccgcgcgcugacgggcaucgccgucgagcaggacaagaacacccaggagguguucgcccaggugaagcagaucuacaagacgcccccgaucaaggacuucgggggcuucaacuucagccagauccugcccgaccccuccaagcccagcaagcgguccuucaucgaggaccuccuguucaacaaggucacccuggccgacgccggcuucaucaagcaguacggggacugccucggcgacaucgcggcccgcgaccugaucugcgcccagaaguucaacgggcugaccgugcucccgccccugcugaccgacgagaugaucgcccaguacaccagcgcccuccuggcgggcaccaucacguccggguggaccuucggcgccggcgccgcccugcagauccccuucgcgaugcagauggccuaccgguucaacgggaucggcgugacccagaacguccucuacgagaaccagaagcugaucgccaaccaguucaacagcgccaucgggaagauccaggacucccugagcuccaccgccagcgcgcucggcaagcugcaggacguggugaaccagaacgcccaggcccugaacacgcucgucaagcagcuguccagcaacuucggggccaucuccagcgugcugaacgacauccucucccgccuggacaagguggaggccgagguccagaucgaccggcugaucaccggccgccuccagagccugcagaccuacgugacccagcagcugauccgggcggccgagauccgcgccagcgccaaccucgccgcgaccaagauguccgagugcgugcugggccagagcaagcgggucgacuucugcgggaagggcuaccaccugauguccuucccccagagcgccccgcacggggugguguuccuccacgucacguacgugcccgcccaggagaagaacuucaccaccgcccccgcgaucugccacgacggcaaggcccacuucccccgcgagggggucuucguguccaacggcacccacugguucgugacgcagcggaacuucuacgagccgcagaucaucaccaccgacaacaccuucgucagcggcaacugcgacguggugaucgggaucgucaacaacacgguguacgacccccugcagcccgagcuggacuccuucaaggaggagcucgacaaguacuucaagaaccacaccagccccgacguggaccugggcgacaucuccgggaucaacgccagcgucgugaacauccagaaggagaucgaccgccugaacgagguggccaagaaccucaacgagucccugaucgaccugcaggagcucggcaaguacgagcaguacaucaaguggccgugguacaucuggcugggcuucaucgccgggcugaucgcgaucgucauggugaccaucaugcucugcugcaugaccagcugcugcuccugccugaagggcugcugcagcugcggguccugcugcaaguucgacgaggacgacagcgagcccgugcugaagggcgucaagcuccacuacacgugaggacuagucccuguucccagagcccacuuuuuuuucuuuuuuugaaauaaaauagccugucuuucagaucucaaaggcucuuuucagagccaccaaaaaaaaaaaaaaaaaaaaaaaaaaaaaaaaaaaaaaaaaaaaaaaaaaaaaaaaaaaaaaaaaaaaaaaaaaaaaaaaaaaaaaaaaaaaaaaaaaaaa

SEQ ID NO: 23654 - RNA, 4191 nt, Artificial Sequence
  SARS-CoV-2/Wuhan/WIV05/2019__EPI_ISL_402128 spike protein mRNA gc (1-1273)(Y453F_D614G)
aggagagggcgcuuggcuugcaaggacccugagcugcggcauugaagcacacccaacccaacucgacugaagucagccucacugaaccggaucugagaaucuucucucucugggcuugccagggcucuccgaaccuagcuagcauccucuucaauuccaacuagaaagcuuaccauguucguguuccugguccuccugccccuggugagcucccagugcgugaaccucaccacccgcacgcagcugccgcccgccuacaccaacagcuucacccggggcgucuacuaccccgacaagguguuccgcuccagcgugcugcacuccacccaggaccucuuccugcccuucuucagcaacgucacgugguuccacgccauccacguguccgggaccaacggcaccaagcgguucgacaacccggugcugcccuucaacgacggggucuacuucgcgagcaccgagaaguccaacaucauccgcggcuggaucuucgggacgacccucgacagcaagacccagucccugcugaucgugaacaacgccaccaacguggucaucaaggugugcgaguuccaguucugcaacgaccccuuccucggcguguacuaccacaagaacaacaagagcuggauggaguccgaguuccgggucuacagcuccgccaacaacugcacguucgaguacgugagccagcccuuccugauggaccuggagggcaagcaggggaacuucaagaaccuccgcgaguucguguucaagaacaucgacggcuacuucaagaucuacuccaagcacaccccgaucaaccugguccgggaccugccccagggguucagcgcccucgagccccugguggaccugcccaucggcaucaacaucacccgcuuccagacccuccuggcccugcaccgguccuaccucacgccgggggacagcagcuccggcuggaccgcgggcgccgccgccuacuacgugggguaccugcagccccgcaccuuccugcucaaguacaacgagaacggcaccaucacggacgcggucgacugcgcccuggacccccugagcgagaccaagugcacccucaaguccuucaccguggagaaggggaucuaccagacgagcaacuuccgggugcagcccaccgaguccaucguccgcuucccgaacaucaccaaccugugccccuucggcgagguguucaacgccacccgguucgccagcgucuacgccuggaaccgcaagcggaucuccaacugcguggcggacuacagcgugcuguacaacuccgccagcuucuccacguucaagugcuacggcgucagccccaccaagcucaacgaccugugcuucaccaacguguacgccgacuccuucgugauccgcggggacgagguccggcagaucgcccccggccagaccgggaagaucgccgacuacaacuacaagcugccggacgacuucacgggcugcgugaucgcguggaacagcaacaaccucgacuccaaggucgggggcaacuacaacuaccuguuccgccuguuccgcaagagcaaccucaagcccuucgagcgggacaucuccaccgagaucuaccaggccggcagcacccccugcaacgggguggagggcuucaacugcuacuucccccugcaguccuacggguuccagccgaccaacggcgugggguaccagcccuaccggguggucgugcugagcuucgagcuccugcacgcccccgccacggugugcggccccaagaaguccaccaaccuggucaagaacaagugcgugaacuucaacuucaacggccucaccgggaccggcgugcugaccgagagcaacaagaaguuccugccguuccagcaguucgggcgcgacaucgccgacacgaccgacgcgguccgcgacccccagacccuggagauccucgacaucacccccugcagcuucggcgggguguccgugaucacgccgggcaccaacaccagcaaccaggucgccgugcuguaccagggcgugaacugcaccgagguccccguggccauccacgccgaccagcugacgcccaccuggcggguguacuccaccgggagcaacgucuuccagacccgcgccggcugccucaucggggcggagcacgugaacaacuccuacgagugcgacauccccaucggcgccggcaucugcgccagcuaccagacgcagaccaacuccccgcggcgcgcccggagcguggcgucccagagcaucaucgccuacaccaugucccugggggccgagaacagcgucgccuacuccaacaacagcaucgccauccccaccaacuucacgaucuccgugaccaccgagauccugcccgugagcaugaccaagacgagcgucgacugcaccauguacaucugcggcgacuccaccgagugcagcaaccuccugcugcaguacggguccuucugcacccagcucaaccgcgcgcugacgggcaucgccguggagcaggacaagaacacccaggagguguucgcccaggucaagcagaucuacaagacgcccccgaucaaggacuucgggggcuucaacuucagccagauccugcccgaccccuccaagcccagcaagcgguccuucaucgaggaccuccuguucaacaaggugacccuggccgacgccggcuucaucaagcaguacggggacugccucggcgacaucgcggcccgcgaccugaucugcgcccagaaguucaacgggcugaccgugcucccgccccugcugaccgacgagaugaucgcccaguacaccagcgcccuccuggcgggcaccaucacguccggguggaccuucggcgccggcgccgcccugcagauccccuucgcgaugcagauggccuaccgguucaacgggaucggcgucacccagaacgugcucuacgagaaccagaagcugaucgccaaccaguucaacagcgccaucgggaagauccaggacucccugagcuccaccgccagcgcgcucggcaagcugcaggacguggucaaccagaacgcccaggcccugaacacgcucgugaagcagcuguccagcaacuucggggccaucuccagcgugcugaacgacauccucucccgccuggacaaggucgaggccgaggugcagaucgaccggcugaucaccggccgccuccagagccugcagaccuacgugacccagcagcugauccgggcggccgagauccgcgccagcgccaaccucgccgcgaccaagauguccgagugcguccugggccagagcaagcggguggacuucugcgggaagggcuaccaccugauguccuucccccagagcgccccgcacgggguggucuuccuccacgugacguacguccccgcccaggagaagaacuucaccaccgcccccgcgaucugccacgacggcaaggcccacuucccccgcgaggggguguucguguccaacggcacccacugguucgucacgcagcggaacuucuacgagccgcagaucaucaccaccgacaacaccuucgugagcggcaacugcgacguggucaucgggaucgugaacaacacgguguacgacccccugcagcccgagcuggacuccuucaaggaggagcucgacaaguacuucaagaaccacaccagccccgacgucgaccugggcgacaucuccgggaucaacgccagcguggugaacauccagaaggagaucgaccgccugaacgaggucgccaagaaccucaacgagucccugaucgaccugcaggagcucggcaaguacgagcaguacaucaaguggccgugguacaucuggcugggcuucaucgccgggcugaucgcgaucgugauggugaccaucaugcucugcugcaugaccagcugcugcuccugccugaagggcugcugcagcugcggguccugcugcaaguucgacgaggacgacagcgagcccguccugaagggcgugaagcuccacuacacgugaggacuagucccuguucccagagcccacuuuuuuuucuuuuuuugaaauaaaauagccugucuuucagaucucaaaggcucuuuucagagccaccaaaaaaaaaaaaaaaaaaaaaaaaaaaaaaaaaaaaaaaaaaaaaaaaaaaaaaaaaaaaaaaaaaaaaaaaaaaaaaaaaaaaaaaaaaaaaaaaaaaaa

SEQ ID NO: 23655 - RNA, 4191 nt, Artificial Sequence
  SARS-CoV-2/Wuhan/WIV05/2019__EPI_ISL_402128 spike protein mRNA gc (1-1273)(D614G_I692V)
aggagagggcgcuuggcuugcaaggacccugagcugcggcauugaagcacacccaacccaacucgacugaagucagccucacugaaccggaucugagaaucuucucucucugggcuugccagggcucuccgaaccuagcuagcauccucuucaauuccaacuagaaagcuuaccauguucguguuccugguccuccugccccuggugagcucccagugcgugaaccucaccacccgcacgcagcugccgcccgccuacaccaacagcuucacccggggcgucuacuaccccgacaagguguuccgcuccagcgugcugcacuccacccaggaccucuuccugcccuucuucagcaacgucacgugguuccacgccauccacguguccgggaccaacggcaccaagcgguucgacaacccggugcugcccuucaacgacggggucuacuucgcgagcaccgagaaguccaacaucauccgcggcuggaucuucgggacgacccucgacagcaagacccagucccugcugaucgugaacaacgccaccaacguggucaucaaggugugcgaguuccaguucugcaacgaccccuuccucggcguguacuaccacaagaacaacaagagcuggauggaguccgaguuccgggucuacagcuccgccaacaacugcacguucgaguacgugagccagcccuuccugauggaccuggagggcaagcaggggaacuucaagaaccuccgcgaguucguguucaagaacaucgacggcuacuucaagaucuacuccaagcacaccccgaucaaccugguccgggaccugccccagggguucagcgcccucgagccccugguggaccugcccaucggcaucaacaucacccgcuuccagacccuccuggcccugcaccgguccuaccucacgccgggggacagcagcuccggcuggaccgcgggcgccgccgccuacuacgugggguaccugcagccccgcaccuuccugcucaaguacaacgagaacggcaccaucacggacgcggucgacugcgcccuggacccccugagcgagaccaagugcacccucaaguccuucaccguggagaaggggaucuaccagacgagcaacuuccgggugcagcccaccgaguccaucguccgcuucccgaacaucaccaaccugugccccuucggcgagguguucaacgccacccgguucgccagcgucuacgccuggaaccgcaagcggaucuccaacugcguggcggacuacagcgugcuguacaacuccgccagcuucuccacguucaagugcuacggcgucagccccaccaagcucaacgaccugugcuucaccaacguguacgccgacuccuucgugauccgcggggacgagguccggcagaucgcccccggccagaccgggaagaucgccgacuacaacuacaagcugccggacgacuucacgggcugcgugaucgcguggaacagcaacaaccucgacuccaaggucgggggcaacuacaacuaccuguaccgccuguuccgcaagagcaaccucaagcccuucgagcgggacaucuccaccgagaucuaccaggccggcagcacccccugcaacgggguggagggcuucaacugcuacuucccccugcaguccuacggguuccagccgaccaacggcgugggguaccagcccuaccggguggucgugcugagcuucgagcuccugcacgcccccgccacggugugcggccccaagaaguccaccaaccuggucaagaacaagugcgugaacuucaacuucaacggccucaccgggaccggcgugcugaccgagagcaacaagaaguuccugccguuccagcaguucgggcgcgacaucgccgacacgaccgacgcgguccgcgacccccagacccuggagauccucgacaucacccccugcagcuucggcgggguguccgugaucacgccgggcaccaacaccagcaaccaggucgccgugcuguaccagggcgugaacugcaccgagguccccguggccauccacgccgaccagcugacgcccaccuggcggguguacuccaccgggagcaacgucuuccagacccgcgccggcugccucaucggggcggagcacgugaacaacuccuacgagugcgacauccccaucggcgccggcaucugcgccagcuaccagacgcagaccaacuccccgcggcgcgcccggagcguggcgucccagagcgucaucgccuacaccaugucccugggggccgagaacagcguggccuacuccaacaacagcaucgccauccccaccaacuucacgaucuccgugaccaccgagauccugcccgucagcaugaccaagacgagcguggacugcaccauguacaucugcggcgacuccaccgagugcagcaaccuccugcugcaguacggguccuucugcacccagcucaaccgcgcgcugacgggcaucgccguggagcaggacaagaacacccaggaggucuucgcccaggugaagcagaucuacaagacgcccccgaucaaggacuucgggggcuucaacuucagccagauccugcccgaccccuccaagcccagcaagcgguccuucaucgaggaccuccuguucaacaaggugacccuggccgacgccggcuucaucaagcaguacggggacugccucggcgacaucgcggcccgcgaccugaucugcgcccagaaguucaacgggcugaccguccucccgccccugcugaccgacgagaugaucgcccaguacaccagcgcccuccuggcgggcaccaucacguccggguggaccuucggcgccggcgccgcccugcagauccccuucgcgaugcagauggccuaccgguucaacgggaucggcgugacccagaacgugcucuacgagaaccagaagcugaucgccaaccaguucaacagcgccaucgggaagauccaggacucccugagcuccaccgccagcgcgcucggcaagcugcaggacgucgugaaccagaacgcccaggcccugaacacgcucgugaagcagcuguccagcaacuucggggccaucuccagcguccugaacgacauccucucccgccuggacaagguggaggccgaggugcagaucgaccggcugaucaccggccgccuccagagccugcagaccuacgucacccagcagcugauccgggcggccgagauccgcgccagcgccaaccucgccgcgaccaagauguccgagugcgugcugggccagagcaagcggguggacuucugcgggaagggcuaccaccugauguccuucccccagagcgccccgcacggggucguguuccuccacgucacguacgugcccgcccaggagaagaacuucaccaccgcccccgcgaucugccacgacggcaaggcccacuucccccgcgaggggguguucgucuccaacggcacccacugguucgugacgcagcggaacuucuacgagccgcagaucaucaccaccgacaacaccuucgugagcggcaacugcgacgucgugaucgggaucgugaacaacacggucuacgacccccugcagcccgagcuggacuccuucaaggaggagcucgacaaguacuucaagaaccacaccagccccgacguggaccugggcgacaucuccgggaucaacgccagcguggucaacauccagaaggagaucgaccgccugaacgagguggccaagaaccucaacgagucccugaucgaccugcaggagcucggcaaguacgagcaguacaucaaguggccgugguacaucuggcugggcuucaucgccgggcugaucgcgaucgugauggucaccaucaugcucugcugcaugaccagcugcugcuccugccugaagggcugcugcagcugcggguccugcugcaaguucgacgaggacgacagcgagcccgugcugaagggcgugaagcuccacuacacgugaggacuagucccuguucccagagcccacuuuuuuuucuuuuuuugaaauaaaauagccugucuuucagaucucaaaggcucuuuucagagccaccaaaaaaaaaaaaaaaaaaaaaaaaaaaaaaaaaaaaaaaaaaaaaaaaaaaaaaaaaaaaaaaaaaaaaaaaaaaaaaaaaaaaaaaaaaaaaaaaaaaaa

SEQ ID NO: 23656 - RNA, 4191 nt, Artificial Sequence
  SARS-CoV-2/Wuhan/WIV05/2019__EPI_ISL_402128 spike protein mRNA gc (1-1273)(D614G_M1229I)
aggagagggcgcuuggcuugcaaggacccugagcugcggcauugaagcacacccaacccaacucgacugaagucagccucacugaaccggaucugagaaucuucucucucugggcuugccagggcucuccgaaccuagcuagcauccucuucaauuccaacuagaaagcuuaccauguucguguuccugguccuccugccccuggugagcucccagugcgugaaccucaccacccgcacgcagcugccgcccgccuacaccaacagcuucacccggggcgucuacuaccccgacaagguguuccgcuccagcgugcugcacuccacccaggaccucuuccugcccuucuucagcaacgucacgugguuccacgccauccacguguccgggaccaacggcaccaagcgguucgacaacccggugcugcccuucaacgacggggucuacuucgcgagcaccgagaaguccaacaucauccgcggcuggaucuucgggacgacccucgacagcaagacccagucccugcugaucgugaacaacgccaccaacguggucaucaaggugugcgaguuccaguucugcaacgaccccuuccucggcguguacuaccacaagaacaacaagagcuggauggaguccgaguuccgggucuacagcuccgccaacaacugcacguucgaguacgugagccagcccuuccugauggaccuggagggcaagcaggggaacuucaagaaccuccgcgaguucguguucaagaacaucgacggcuacuucaagaucuacuccaagcacaccccgaucaaccugguccgggaccugccccagggguucagcgcccucgagccccugguggaccugcccaucggcaucaacaucacccgcuuccagacccuccuggcccugcaccgguccuaccucacgccgggggacagcagcuccggcuggaccgcgggcgccgccgccuacuacgugggguaccugcagccccgcaccuuccugcucaaguacaacgagaacggcaccaucacggacgcggucgacugcgcccuggacccccugagcgagaccaagugcacccucaaguccuucaccguggagaaggggaucuaccagacgagcaacuuccgggugcagcccaccgaguccaucguccgcuucccgaacaucaccaaccugugccccuucggcgagguguucaacgccacccgguucgccagcgucuacgccuggaaccgcaagcggaucuccaacugcguggcggacuacagcgugcuguacaacuccgccagcuucuccacguucaagugcuacggcgucagccccaccaagcucaacgaccugugcuucaccaacguguacgccgacuccuucgugauccgcggggacgagguccggcagaucgcccccggccagaccgggaagaucgccgacuacaacuacaagcugccggacgacuucacgggcugcgugaucgcguggaacagcaacaaccucgacuccaaggucgggggcaacuacaacuaccuguaccgccuguuccgcaagagcaaccucaagcccuucgagcgggacaucuccaccgagaucuaccaggccggcagcacccccugcaacgggguggagggcuucaacugcuacuucccccugcaguccuacggguuccagccgaccaacggcgugggguaccagcccuaccggguggucgugcugagcuucgagcuccugcacgcccccgccacggugugcggccccaagaaguccaccaaccuggucaagaacaagugcgugaacuucaacuucaacggccucaccgggaccggcgugcugaccgagagcaacaagaaguuccugccguuccagcaguucgggcgcgacaucgccgacacgaccgacgcgguccgcgacccccagacccuggagauccucgacaucacccccugcagcuucggcgggguguccgugaucacgccgggcaccaacaccagcaaccaggucgccgugcuguaccagggcgugaacugcaccgagguccccguggccauccacgccgaccagcugacgcccaccuggcggguguacuccaccgggagcaacgucuuccagacccgcgccggcugccucaucggggcggagcacgugaacaacuccuacgagugcgacauccccaucggcgccggcaucugcgccagcuaccagacgcagaccaacuccccgcggcgcgcccggagcguggcgucccagagcaucaucgccuacaccaugucccugggggccgagaacagcgucgccuacuccaacaacagcaucgccauccccaccaacuucacgaucuccgugaccaccgagauccugcccgugagcaugaccaagacgagcgucgacugcaccauguacaucugcggcgacuccaccgagugcagcaaccuccugcugcaguacggguccuucugcacccagcucaaccgcgcgcugacgggcaucgccguggagcaggacaagaacacccaggagguguucgcccaggucaagcagaucuacaagacgcccccgaucaaggacuucgggggcuucaacuucagccagauccugcccgaccccuccaagcccagcaagcgguccuucaucgaggaccuccuguucaacaaggugacccuggccgacgccggcuucaucaagcaguacggggacugccucggcgacaucgcggcccgcgaccugaucugcgcccagaaguucaacgggcugaccgugcucccgccccugcugaccgacgagaugaucgcccaguacaccagcgcccuccuggcgggcaccaucacguccggguggaccuucggcgccggcgccgcccugcagauccccuucgcgaugcagauggccuaccgguucaacgggaucggcgucacccagaacgugcucuacgagaaccagaagcugaucgccaaccaguucaacagcgccaucgggaagauccaggacucccugagcuccaccgccagcgcgcucggcaagcugcaggacguggucaaccagaacgcccaggcccugaacacgcucgugaagcagcuguccagcaacuucggggccaucuccagcgugcugaacgacauccucucccgccuggacaaggucgaggccgaggugcagaucgaccggcugaucaccggccgccuccagagccugcagaccuacgugacccagcagcugauccgggcggccgagauccgcgccagcgccaaccucgccgcgaccaagauguccgagugcguccugggccagagcaagcggguggacuucugcgggaagggcuaccaccugauguccuucccccagagcgccccgcacgggguggucuuccuccacgugacguacguccccgcccaggagaagaacuucaccaccgcccccgcgaucugccacgacggcaaggcccacuucccccgcgaggggguguucguguccaacggcacccacugguucgucacgcagcggaacuucuacgagccgcagaucaucaccaccgacaacaccuucgugagcggcaacugcgacguggucaucgggaucgugaacaacacgguguacgacccccugcagcccgagcuggacuccuucaaggaggagcucgacaaguacuucaagaaccacaccagccccgacgucgaccugggcgacaucuccgggaucaacgccagcguggugaacauccagaaggagaucgaccgccugaacgaggucgccaagaaccucaacgagucccugaucgaccugcaggagcucggcaaguacgagcaguacaucaaguggccgugguacaucuggcugggcuucaucgccgggcugaucgcgaucgugaucgugaccaucaugcucugcugcaugaccagcugcugcuccugccugaagggcugcugcagcugcggguccugcugcaaguucgacgaggacgacagcgagcccguccugaagggcgugaagcuccacuacacgugaggacuagucccuguucccagagcccacuuuuuuuucuuuuuuugaaauaaaauagccugucuuucagaucucaaaggcucuuuucagagccaccaaaaaaaaaaaaaaaaaaaaaaaaaaaaaaaaaaaaaaaaaaaaaaaaaaaaaaaaaaaaaaaaaaaaaaaaaaaaaaaaaaaaaaaaaaaaaaaaaaaaa

SEQ ID NO: 23657 - RNA, 4185 nt, Artificial Sequence
  SARS-CoV-2/Wuhan/WIV05/2019__EPI_ISL_402128 spike protein mRNA gc (1-1273)(H69del_V70del_A222V_Y453F_S477N_D614G_I692V)
aggagagggcgcuuggcuugcaaggacccugagcugcggcauugaagcacacccaacccaacucgacugaagucagccucacugaaccggaucugagaaucuucucucucugggcuugccagggcucuccgaaccuagcuagcauccucuucaauuccaacuagaaagcuuaccauguucguguuccugguccuccugccccuggugagcucccagugcgugaaccucaccacccgcacgcagcugccgcccgccuacaccaacagcuucacccggggcgucuacuaccccgacaagguguuccgcuccagcgugcugcacuccacccaggaccucuuccugcccuucuucagcaacgucacgugguuccacgccaucuccgggaccaacggcaccaagcgguucgacaacccggugcugcccuucaacgacgggguguacuucgcgagcaccgagaaguccaacaucauccgcggcuggaucuucgggacgacccucgacagcaagacccagucccugcugaucgucaacaacgccaccaacguggugaucaaggucugcgaguuccaguucugcaacgaccccuuccucggcguguacuaccacaagaacaacaagagcuggauggaguccgaguuccggguguacagcuccgccaacaacugcacguucgaguacgucagccagcccuuccugauggaccuggagggcaagcaggggaacuucaagaaccuccgcgaguucguguucaagaacaucgacggcuacuucaagaucuacuccaagcacaccccgaucaaccuggugcgggaccugccccagggguucagcguccucgagccccugguggaccugcccaucggcaucaacaucacccgcuuccagacccuccuggcccugcaccgguccuaccucacgccgggggacagcagcuccggcuggaccgccggcgcggccgccuacuacgugggguaccugcagccccgcaccuuccugcucaaguacaacgagaacggcaccaucacggacgccgucgacugcgcgcuggacccccugagcgagaccaagugcacccucaaguccuucaccguggagaaggggaucuaccagacgagcaacuuccgggugcagcccaccgaguccaucguccgcuucccgaacaucaccaaccugugccccuucggcgagguguucaacgccacccgguucgccagcgucuacgccuggaaccgcaagcggaucuccaacugcguggccgacuacagcgugcuguacaacuccgcgagcuucuccacguucaagugcuacggcgucagccccaccaagcucaacgaccugugcuucaccaacguguacgccgacuccuucgugauccgcggggacgagguccggcagaucgcccccggccagaccgggaagaucgccgacuacaacuacaagcugccggacgacuucacgggcugcgugaucgccuggaacagcaacaaccucgacuccaaggucgggggcaacuacaacuaccuguuccgccuguuccgcaagagcaaccucaagcccuucgagcgggacaucuccaccgagaucuaccaggcgggcaacacccccugcaacgggguggagggcuucaacugcuacuucccccugcagagcuacggguuccagccgaccaacggcgugggguaccagcccuaccggguggucgugcuguccuucgagcuccugcacgcccccgccacggugugcggccccaagaaguccaccaaccuggucaagaacaagugcgugaacuucaacuucaacggccucaccgggaccggcgugcugaccgagagcaacaagaaguuccugccguuccagcaguucgggcgcgacaucgccgacacgaccgacgccguccgcgacccccagacccuggagauccucgacaucacccccugcagcuucggcggggugagcgugaucacgccgggcaccaacaccuccaaccaggucgcggugcuguaccagggcgugaacugcaccgagguccccguggccauccacgccgaccagcugacgcccaccuggcggguguacagcaccggguccaacgucuuccagacccgcgccggcugccucaucggggccgagcacgugaacaacagcuacgagugcgacauccccaucggcgcgggcaucugcgccuccuaccagacgcagaccaacagcccgcggcgcgcccgguccguggccagccaguccgucaucgcguacaccaugagccugggggccgagaacuccguggccuacagcaacaacuccaucgccauccccaccaacuucacgaucagcgugaccaccgagauccugcccgucuccaugaccaagacgagcguggacugcaccauguacaucugcggcgacagcaccgagugcuccaaccuccugcugcaguacgggagcuucugcacccagcucaaccgcgcccugacgggcaucgcgguggagcaggacaagaacacccaggaggucuucgcccaggugaagcagaucuacaagacgcccccgaucaaggacuucgggggcuucaacuucucccagauccugcccgaccccagcaagcccuccaagcggagcuucaucgaggaccuccuguucaacaaggugacccuggccgacgccggcuucaucaagcaguacggggacugccucggcgacaucgccgcgcgcgaccugaucugcgcccagaaguucaacgggcugaccguccucccgccccugcugaccgacgagaugaucgcccaguacaccuccgcccuccuggccggcaccaucacgagcggguggaccuucggcgcgggcgccgcccugcagauccccuucgccaugcagauggcguaccgguucaacgggaucggcgugacccagaacgugcucuacgagaaccagaagcugaucgccaaccaguucaacuccgccaucgggaagauccaggacagccuguccagcaccgccuccgcccucggcaagcugcaggacgucgugaaccagaacgcgcaggcccugaacacgcucgugaagcagcugagcuccaacuucggggccaucagcuccguccugaacgacauccucagccgccuggacaagguggaggccgaggugcagaucgaccggcugaucaccggccgccuccagucccugcagaccuacgucacccagcagcugauccgggccgcggagauccgcgccagcgccaaccucgccgccaccaagaugagcgagugcgugcugggccaguccaagcggguggacuucugcgggaagggcuaccaccugaugagcuucccccaguccgcgccgcacggggucguguuccuccacgucacguacgugcccgcccaggagaagaacuucaccaccgcccccgccaucugccacgacggcaaggcgcacuucccccgcgaggggguguucgucagcaacggcacccacugguucgugacgcagcggaacuucuacgagccgcagaucaucaccaccgacaacaccuucguguccggcaacugcgacgucgugaucgggaucgugaacaacacggucuacgacccccugcagcccgagcuggacagcuucaaggaggagcucgacaaguacuucaagaaccacaccucccccgacguggaccugggcgacaucagcgggaucaacgccuccguggucaacauccagaaggagaucgaccgccugaacgagguggccaagaaccucaacgagagccugaucgaccugcaggagcucggcaaguacgagcaguacaucaaguggccgugguacaucuggcugggcuucaucgccgggcugaucgccaucgugauggucaccaucaugcucugcugcaugaccuccugcugcagcugccugaagggcugcugcuccugcgggagcugcugcaaguucgacgaggacgacuccgagcccgugcugaagggcgugaagcuccacuacacgugaggacuagucccuguucccagagcccacuuuuuuuucuuuuuuugaaauaaaauagccugucuuucagaucucaaaggcucuuuucagagccaccaaaaaaaaaaaaaaaaaaaaaaaaaaaaaaaaaaaaaaaaaaaaaaaaaaaaaaaaaaaaaaaaaaaaaaaaaaaaaaaaaaaaaaaaaaaaaaaaaaaaa

SEQ ID NO: 23658 - RNA, 4185 nt, Artificial Sequence
  SARS-CoV-2/Wuhan/WIV05/2019__EPI_ISL_402128 spike protein mRNA gc (1-1273)(H69del_V70del_Y453F_D614G_I692V_M1229I)
aggagagggcgcuuggcuugcaaggacccugagcugcggcauugaagcacacccaacccaacucgacugaagucagccucacugaaccggaucugagaaucuucucucucugggcuugccagggcucuccgaaccuagcuagcauccucuucaauuccaacuagaaagcuuaccauguucguguuccugguccuccugccccuggugagcucccagugcgugaaccucaccacccgcacgcagcugccgcccgccuacaccaacagcuucacccggggcgucuacuaccccgacaagguguuccgcuccagcgugcugcacuccacccaggaccucuuccugcccuucuucagcaacgucacgugguuccacgccaucuccgggaccaacggcaccaagcgguucgacaacccggugcugcccuucaacgacgggguguacuucgcgagcaccgagaaguccaacaucauccgcggcuggaucuucgggacgacccucgacagcaagacccagucccugcugaucgucaacaacgccaccaacguggugaucaaggucugcgaguuccaguucugcaacgaccccuuccucggcguguacuaccacaagaacaacaagagcuggauggaguccgaguuccggguguacagcuccgccaacaacugcacguucgaguacgucagccagcccuuccugauggaccuggagggcaagcaggggaacuucaagaaccuccgcgaguucguguucaagaacaucgacggcuacuucaagaucuacuccaagcacaccccgaucaaccuggugcgggaccugccccagggguucagcgcccucgagccccuggucgaccugcccaucggcaucaacaucacccgcuuccagacccuccuggcccugcaccgguccuaccucacgccgggggacagcagcuccggcuggaccgcgggcgccgccgccuacuacgugggguaccugcagccccgcaccuuccugcucaaguacaacgagaacggcaccaucacggacgcgguggacugcgcccuggacccccugagcgagaccaagugcacccucaaguccuucaccgucgagaaggggaucuaccagacgagcaacuuccgggugcagcccaccgaguccaucgugcgcuucccgaacaucaccaaccugugccccuucggcgaggucuucaacgccacccgguucgccagcguguacgccuggaaccgcaagcggaucuccaacugcgucgcggacuacagcgugcuguacaacuccgccagcuucuccacguucaagugcuacggcgugagccccaccaagcucaacgaccugugcuucaccaacgucuacgccgacuccuucgugauccgcggggacgaggugcggcagaucgcccccggccagaccgggaagaucgccgacuacaacuacaagcugccggacgacuucacgggcugcgucaucgcguggaacagcaacaaccucgacuccaaggucgggggcaacuacaacuaccuguuccgccuguuccgcaagagcaaccucaagcccuucgagcgggacaucuccaccgagaucuaccaggccggcagcacccccugcaacgggguggagggcuucaacugcuacuucccccugcaguccuacggguuccagccgaccaacggcgugggguaccagcccuaccggguggugguccugagcuucgagcuccugcacgcccccgccacggugugcggccccaagaaguccaccaaccuggugaagaacaagugcgucaacuucaacuucaacggccucaccgggaccggcgugcugaccgagagcaacaagaaguuccugccguuccagcaguucgggcgcgacaucgccgacacgaccgacgcggugcgcgacccccagacccuggagauccucgacaucacccccugcagcuucggcggggucuccgugaucacgccgggcaccaacaccagcaaccagguggccguccuguaccagggcgugaacugcaccgaggugcccgucgccauccacgccgaccagcugacgcccaccuggcggguguacuccaccgggagcaacguguuccagacccgcgccggcugccucaucggggcggagcacgucaacaacuccuacgagugcgacauccccaucggcgccggcaucugcgccagcuaccagacgcagaccaacuccccgcggcgcgcccggagcguggcgucccagagcgugaucgccuacaccaugucccugggggccgagaacagcgucgccuacuccaacaacagcaucgccauccccaccaacuucacgaucuccgugaccaccgagauccugcccgugagcaugaccaagacgagcgucgacugcaccauguacaucugcggcgacuccaccgagugcagcaaccuccugcugcaguacggguccuucugcacccagcucaaccgcgcgcugacgggcaucgccguggagcaggacaagaacacccaggagguguucgcccaggucaagcagaucuacaagacgcccccgaucaaggacuucgggggcuucaacuucagccagauccugcccgaccccuccaagcccagcaagcgguccuucaucgaggaccuccuguucaacaaggugacccuggccgacgccggcuucaucaagcaguacggggacugccucggcgacaucgcggcccgcgaccugaucugcgcccagaaguucaacgggcugaccgugcucccgccccugcugaccgacgagaugaucgcccaguacaccagcgcccuccuggcgggcaccaucacguccggguggaccuucggcgccggcgccgcccugcagauccccuucgcgaugcagauggccuaccgguucaacgggaucggcgucacccagaacgugcucuacgagaaccagaagcugaucgccaaccaguucaacagcgccaucgggaagauccaggacucccugagcuccaccgccagcgcgcucggcaagcugcaggacguggucaaccagaacgcccaggcccugaacacgcucgugaagcagcuguccagcaacuucggggccaucuccagcgugcugaacgacauccucucccgccuggacaaggucgaggccgaggugcagaucgaccggcugaucaccggccgccuccagagccugcagaccuacgugacccagcagcugauccgggcggccgagauccgcgccagcgccaaccucgccgcgaccaagauguccgagugcguccugggccagagcaagcggguggacuucugcgggaagggcuaccaccugauguccuucccccagagcgccccgcacgggguggucuuccuccacgugacguacguccccgcccaggagaagaacuucaccaccgcccccgcgaucugccacgacggcaaggcccacuucccccgcgaggggguguucguguccaacggcacccacugguucgucacgcagcggaacuucuacgagccgcagaucaucaccaccgacaacaccuucgugagcggcaacugcgacguggucaucgggaucgugaacaacacgguguacgacccccugcagcccgagcuggacuccuucaaggaggagcucgacaaguacuucaagaaccacaccagccccgacgucgaccugggcgacaucuccgggaucaacgccagcguggugaacauccagaaggagaucgaccgccugaacgaggucgccaagaaccucaacgagucccugaucgaccugcaggagcucggcaaguacgagcaguacaucaaguggccgugguacaucuggcugggcuucaucgccgggcugaucgcgaucgugaucgugaccaucaugcucugcugcaugaccagcugcugcuccugccugaagggcugcugcagcugcggguccugcugcaaguucgacgaggacgacagcgagcccguccugaagggcgugaagcuccacuacacgugaggacuagucccuguucccagagcccacuuuuuuuucuuuuuuugaaauaaaauagccugucuuucagaucucaaaggcucuuuucagagccaccaaaaaaaaaaaaaaaaaaaaaaaaaaaaaaaaaaaaaaaaaaaaaaaaaaaaaaaaaaaaaaaaaaaaaaaaaaaaaaaaaaaaaaaaaaaaaaaaaaaaa

SEQ ID NO: 23659 - RNA, 4182 nt, Artificial Sequence
  SARS-CoV-2/Wuhan/WIV05/2019__EPI_ISL_402128 spike protein mRNA gc (1-1273)(H69del_V70del_Y144del_N501Y_A570D_D614G_P681H_T716I_S982 A_D1118H)
aggagagggcgcuuggcuugcaaggacccugagcugcggcauugaagcacacccaacccaacucgacugaagucagccucacugaaccggaucugagaaucuucucucucugggcuugccagggcucuccgaaccuagcuagcauccucuucaauuccaacuagaaagcuuaccauguucguguuccugguccuccugccccuggugagcucccagugcgugaaccucaccacccgcacgcagcugccgcccgccuacaccaacagcuucacccggggcgucuacuaccccgacaagguguuccgcuccagcgugcugcacuccacccaggaccucuuccugcccuucuucagcaacgucacgugguuccacgccaucuccgggaccaacggcaccaagcgguucgacaacccggugcugcccuucaacgacgggguguacuucgcgagcaccgagaaguccaacaucauccgcggcuggaucuucgggacgacccucgacagcaagacccagucccugcugaucgucaacaacgccaccaacguggugaucaaggucugcgaguuccaguucugcaacgaccccuuccucggcguguaccacaagaacaacaagagcuggauggaguccgaguuccggguguacagcuccgccaacaacugcacguucgaguacgucagccagcccuuccugauggaccuggagggcaagcaggggaacuucaagaaccuccgcgaguucguguucaagaacaucgacggcuacuucaagaucuacuccaagcacaccccgaucaaccuggugcgggaccugccccagggguucagcgcccucgagccccuggucgaccugcccaucggcaucaacaucacccgcuuccagacccuccuggcccugcaccgguccuaccucacgccgggggacagcagcuccggcuggaccgcgggcgccgccgccuacuacgugggguaccugcagccccgcaccuuccugcucaaguacaacgagaacggcaccaucacggacgcgguggacugcgcccuggacccccugagcgagaccaagugcacccucaaguccuucaccgucgagaaggggaucuaccagacgagcaacuuccgggugcagcccaccgaguccaucgugcgcuucccgaacaucaccaaccugugccccuucggcgaggucuucaacgccacccgguucgccagcguguacgccuggaaccgcaagcggaucuccaacugcgucgcggacuacagcgugcuguacaacuccgccagcuucuccacguucaagugcuacggcgugagccccaccaagcucaacgaccugugcuucaccaacgucuacgccgacuccuucgugauccgcggggacgaggugcggcagaucgcccccggccagaccgggaagaucgccgacuacaacuacaagcugccggacgacuucacgggcugcgucaucgcguggaacagcaacaaccucgacuccaaggucgggggcaacuacaacuaccuguaccgccuguuccgcaagagcaaccucaagcccuucgagcgggacaucuccaccgagaucuaccaggccggcagcacccccugcaacgggguggagggcuucaacugcuacuucccccugcaguccuacggguuccagccgaccuacggcgugggguaccagcccuaccggguggugguccugagcuucgagcuccugcacgcccccgccacggugugcggccccaagaaguccaccaaccuggugaagaacaagugcgucaacuucaacuucaacggccucaccgggaccggcgugcugaccgagagcaacaagaaguuccugccguuccagcaguucgggcgcgacaucgacgacacgaccgacgccgugcgcgacccccagacccuggagauccucgacaucacccccugcagcuucggcggggucuccgugaucacgccgggcaccaacaccagcaaccagguggcgguccuguaccagggcgugaacugcaccgaggugcccgucgccauccacgccgaccagcugacgcccaccuggcggguguacuccaccgggagcaacguguuccagacccgcgccggcugccucaucggggccgagcacgucaacaacuccuacgagugcgacauccccaucggcgcgggcaucugcgccagcuaccagacgcagaccaacucccaccggcgcgcccggagcguggccucccagagcaucaucgcguacaccaugucccugggggccgagaacagcguggccuacuccaacaacagcaucgccaucccgaucaacuucaccaucuccgucacgaccgagauccugcccgugagcaugaccaagaccagcguggacugcacgauguacaucugcggcgacuccaccgagugcagcaaccuccugcugcaguacggguccuucugcacccagcucaaccgcgcccugaccggcaucgcggucgagcaggacaagaacacgcaggagguguucgcccaggugaagcagaucuacaagaccccgcccaucaaggacuucgggggcuucaacuucagccagauccugcccgaccccuccaagcccagcaagcgguccuucaucgaggaccuccuguucaacaaggucacccuggccgacgccggcuucaucaagcaguacggggacugccucggcgacaucgccgcgcgcgaccugaucugcgcccagaaguucaacgggcugaccgugcugcccccgcuccugacggacgagaugaucgcccaguacaccagcgcccuccuggccggcaccaucaccuccggguggacguucggcgcgggcgccgcccugcagauccccuucgccaugcagauggcguaccgguucaacgggaucggcgugacccagaacguccucuacgagaaccagaagcugaucgccaaccaguucaacagcgccaucgggaagauccaggacucccugagcuccaccgccagcgcccucggcaagcugcaggacguggugaaccagaacgcgcaggcccugaacacccucgucaagcagcuguccagcaacuucggggccaucuccagcgugcugaacgacauccucgcccgccuggacaagguggaggccgagguccagaucgaccggcugaucacgggccgccuccagucccugcagaccuacgugacccagcagcugauccgggcggccgagauccgcgccagcgccaaccucgccgcgaccaagaugagcgagugcgugcugggccaguccaagcgggucgacuucugcgggaagggcuaccaccugaugagcuucccccaguccgcgccccacggggugguguuccuccacgucaccuacgugccggcccaggagaagaacuucacgaccgcccccgccaucugccacgacggcaaggcccacuucccccgcgagggggucuucgugagcaacggcacccacugguucgugacccagcggaacuucuacgagccccagaucaucacgacccacaacaccuucgucuccggcaacugcgacguggugaucgggaucgucaacaacaccguguacgacccgcugcagcccgagcuggacagcuucaaggaggagcucgacaaguacuucaagaaccacacgucccccgacguggaccugggcgacaucagcgggaucaacgccuccgucgugaacauccagaaggagaucgaccgccugaacgagguggccaagaaccucaacgagagccugaucgaccugcaggagcucggcaaguacgagcaguacaucaaguggcccugguacaucuggcugggcuucaucgccgggcugaucgcgaucgucauggugaccaucaugcucugcugcaugaccuccugcugcagcugccugaagggcugcugcuccugcgggagcugcugcaaguucgacgaggacgacuccgagccggugcugaagggcgucaagcuccacuacaccugaggacuagucccuguucccagagcccacuuuuuuuucuuuuuuugaaauaaaauagccugucuuucagaucucaaaggcucuuuucagagccaccaaaaaaaaaaaaaaaaaaaaaaaaaaaaaaaaaaaaaaaaaaaaaaaaaaaaaaaaaaaaaaaaaaaaaaaaaaaaaaaaaaaaaaaaaaaaaaaaaaaaa

SEQ ID NO: 23660 - RNA, 4191 nt, Artificial Sequence
  SARS-CoV-2/Wuhan/WIV05/2019__EPI_ISL_402128 spike protein mRNA gc (1-1273)(K417N_E484K_N501Y_D614G)
aggagagggcgcuuggcuugcaaggacccugagcugcggcauugaagcacacccaacccaacucgacugaagucagccucacugaaccggaucugagaaucuucucucucugggcuugccagggcucuccgaaccuagcuagcauccucuucaauuccaacuagaaagcuuaccauguucguguuccugguccuccugccccuggugagcucccagugcgugaaccucaccacccgcacgcagcugccgcccgccuacaccaacagcuucacccggggcgucuacuaccccgacaagguguuccgcuccagcgugcugcacuccacccaggaccucuuccugcccuucuucagcaacgucacgugguuccacgccauccacguguccgggaccaacggcaccaagcgguucgacaacccggugcugcccuucaacgacggggucuacuucgcgagcaccgagaaguccaacaucauccgcggcuggaucuucgggacgacccucgacagcaagacccagucccugcugaucgugaacaacgccaccaacguggucaucaaggugugcgaguuccaguucugcaacgaccccuuccucggcguguacuaccacaagaacaacaagagcuggauggaguccgaguuccgggucuacagcuccgccaacaacugcacguucgaguacgugagccagcccuuccugauggaccuggagggcaagcaggggaacuucaagaaccuccgcgaguucguguucaagaacaucgacggcuacuucaagaucuacuccaagcacaccccgaucaaccugguccgggaccugccccagggguucagcgcccucgagccccugguggaccugcccaucggcaucaacaucacccgcuuccagacccuccuggcccugcaccgguccuaccucacgccgggggacagcagcuccggcuggaccgcgggcgccgccgccuacuacgugggguaccugcagccccgcaccuuccugcucaaguacaacgagaacggcaccaucacggacgcggucgacugcgcccuggacccccugagcgagaccaagugcacccucaaguccuucaccguggagaaggggaucuaccagacgagcaacuuccgggugcagcccaccgaguccaucguccgcuucccgaacaucaccaaccugugccccuucggcgagguguucaacgccacccgguucgccagcgucuacgccuggaaccgcaagcggaucuccaacugcguggcggacuacagcgugcuguacaacuccgccagcuucuccacguucaagugcuacggcgucagccccaccaagcucaacgaccugugcuucaccaacguguacgccgacuccuucgugauccgcggggacgagguccggcagaucgcccccggccagaccgggaacaucgccgacuacaacuacaagcugccggacgacuucacgggcugcgugaucgcguggaacagcaacaaccucgacuccaaggucgggggcaacuacaacuaccuguaccgccuguuccgcaagagcaaccucaagcccuucgagcgggacaucuccaccgagaucuaccaggccggcagcacccccugcaacggggugaagggcuucaacugcuacuucccccugcaguccuacggguuccagccgaccuacggcgugggguaccagcccuaccggguggucgugcugagcuucgagcuccugcacgcccccgccacggugugcggccccaagaaguccaccaaccuggucaagaacaagugcgugaacuucaacuucaacggccucaccgggaccggcgugcugaccgagagcaacaagaaguuccugccguuccagcaguucgggcgcgacaucgccgacacgaccgacgcgguccgcgacccccagacccuggagauccucgacaucacccccugcagcuucggcgggguguccgugaucacgccgggcaccaacaccagcaaccaggucgccgugcuguaccagggcgugaacugcaccgagguccccguggccauccacgccgaccagcugacgcccaccuggcggguguacuccaccgggagcaacgucuuccagacccgcgccggcugccucaucggggcggagcacgugaacaacuccuacgagugcgacauccccaucggcgccggcaucugcgccagcuaccagacgcagaccaacuccccgcggcgcgcccggagcguggcgucccagagcaucaucgccuacaccaugucccugggggccgagaacagcgucgccuacuccaacaacagcaucgccauccccaccaacuucacgaucuccgugaccaccgagauccugcccgugagcaugaccaagacgagcgucgacugcaccauguacaucugcggcgacuccaccgagugcagcaaccuccugcugcaguacggguccuucugcacccagcucaaccgcgcgcugacgggcaucgccguggagcaggacaagaacacccaggagguguucgcccaggucaagcagaucuacaagacgcccccgaucaaggacuucgggggcuucaacuucagccagauccugcccgaccccuccaagcccagcaagcgguccuucaucgaggaccuccuguucaacaaggugacccuggccgacgccggcuucaucaagcaguacggggacugccucggcgacaucgcggcccgcgaccugaucugcgcccagaaguucaacgggcugaccgugcucccgccccugcugaccgacgagaugaucgcccaguacaccagcgcccuccuggcgggcaccaucacguccggguggaccuucggcgccggcgccgcccugcagauccccuucgcgaugcagauggccuaccgguucaacgggaucggcgucacccagaacgugcucuacgagaaccagaagcugaucgccaaccaguucaacagcgccaucgggaagauccaggacucccugagcuccaccgccagcgcgcucggcaagcugcaggacguggucaaccagaacgcccaggcccugaacacgcucgugaagcagcuguccagcaacuucggggccaucuccagcgugcugaacgacauccucucccgccuggacaaggucgaggccgaggugcagaucgaccggcugaucaccggccgccuccagagccugcagaccuacgugacccagcagcugauccgggcggccgagauccgcgccagcgccaaccucgccgcgaccaagauguccgagugcguccugggccagagcaagcggguggacuucugcgggaagggcuaccaccugauguccuucccccagagcgccccgcacgggguggucuuccuccacgugacguacguccccgcccaggagaagaacuucaccaccgcccccgcgaucugccacgacggcaaggcccacuucccccgcgaggggguguucguguccaacggcacccacugguucgucacgcagcggaacuucuacgagccgcagaucaucaccaccgacaacaccuucgugagcggcaacugcgacguggucaucgggaucgugaacaacacgguguacgacccccugcagcccgagcuggacuccuucaaggaggagcucgacaaguacuucaagaaccacaccagccccgacgucgaccugggcgacaucuccgggaucaacgccagcguggugaacauccagaaggagaucgaccgccugaacgaggucgccaagaaccucaacgagucccugaucgaccugcaggagcucggcaaguacgagcaguacaucaaguggccgugguacaucuggcugggcuucaucgccgggcugaucgcgaucgugauggugaccaucaugcucugcugcaugaccagcugcugcuccugccugaagggcugcugcagcugcggguccugcugcaaguucgacgaggacgacagcgagcccguccugaagggcgugaagcuccacuacacgugaggacuagucccuguucccagagcccacuuuuuuuucuuuuuuugaaauaaaauagccugucuuucagaucucaaaggcucuuuucagagccaccaaaaaaaaaaaaaaaaaaaaaaaaaaaaaaaaaaaaaaaaaaaaaaaaaaaaaaaaaaaaaaaaaaaaaaaaaaaaaaaaaaaaaaaaaaaaaaaaaaaaa

SEQ ID NO: 23661 - RNA, 4182 nt, Artificial Sequence
  SARS-CoV-2/Wuhan/WIV05/2019__EPI_ISL_402128 spike protein mRNA gc (1-1273)(L18F_D80A_D215G_L242del_A243del_L244del_R246I_K417N_E484 K_N501Y_D614G_A701V)
aggagagggcgcuuggcuugcaaggacccugagcugcggcauugaagcacacccaacccaacucgacugaagucagccucacugaaccggaucugagaaucuucucucucugggcuugccagggcucuccgaaccuagcuagcauccucuucaauuccaacuagaaagcuuaccauguucguguuccugguccuccugccccuggugagcucccagugcgugaacuucaccacccgcacgcagcucccgcccgccuacaccaacagcuucacccggggcgucuacuaccccgacaagguguuccgcuccagcgugcugcacuccacccaggaccuguuccuccccuucuucagcaacgucacgugguuccacgccauccacguguccgggaccaacggcaccaagcgguucgcgaacccggugcugcccuucaacgacggggucuacuucgccagcaccgagaaguccaacaucauccgcggcuggaucuucgggacgacccuggacagcaagacccagucccuccugaucgugaacaacgccaccaacguggucaucaaggugugcgaguuccaguucugcaacgaccccuuccugggcguguacuaccacaagaacaacaagagcuggauggaguccgaguuccgggucuacagcuccgccaacaacugcacguucgaguacgugagccagcccuuccucauggaccuggagggcaagcaggggaacuucaagaaccugcgcgaguucguguucaagaacaucgacggcuacuucaagaucuacuccaagcacaccccgaucaaccucguccgggggcugccccagggcuucagcgcccuggagccccucguggaccugcccaucgggaucaacaucacccgcuuccagacccugcacaucuccuaccucacgccgggcgacagcagcuccggcuggaccgcgggggccgccgccuacuacgugggcuaccugcagccccggaccuuccugcucaaguacaacgagaacgggaccaucacggacgcggucgacugcgcccuggacccccugagcgagaccaagugcacccucaaguccuucaccguggagaagggcaucuaccagacgagcaacuuccgcgugcagcccaccgaguccaucguccgguucccgaacaucaccaaccugugccccuucggcgagguguucaacgccacccgcuucgccagcgucuacgccuggaaccggaagcgcaucuccaacugcguggcggacuacagcgugcuguacaacuccgccagcuucuccacguucaagugcuacggggucagccccaccaagcucaacgaccugugcuucaccaacguguacgccgacuccuucgugauccggggcgacgagguccgccagaucgcccccgggcagaccggcaacaucgccgacuacaacuacaagcugccggacgacuucacggggugcgugaucgcguggaacagcaacaaccucgacuccaaggugggcggcaacuacaacuaccuguaccggcuguuccgcaagagcaaccucaagcccuucgagcgggacaucuccaccgagaucuaccaggccgggagcacccccugcaacggcgucaagggguucaacugcuacuucccccugcaguccuacggcuuccagccgaccuacggggugggcuaccagcccuaccgcguggucgugcugagcuucgagcuccugcacgcccccgccacggugugcggccccaagaaguccaccaaccuggucaagaacaagugcgugaacuucaacuucaacgggcucaccggcaccggggugcugaccgagagcaacaagaaguuccugccguuccagcaguucggccgggacaucgccgacacgaccgacgcgguccgcgacccccagacccucgagauccuggacaucacccccugcagcuucgggggcguguccgugaucacgccgggcaccaacaccagcaaccaggucgccgugcuguaccagggggugaacugcaccgagguccccguggccauccacgccgaccagcugacgcccaccuggcgcguguacuccaccggcagcaacgucuuccagacccgggccgggugccucaucggcgcggagcacgugaacaacuccuacgagugcgacauccccaucggcgccgggaucugcgccagcuaccagacgcagaccaacuccccgcgccgggcccgcagcguggcgucccagagcaucaucgccuacaccaugucccugggcgucgagaacagcguggccuacuccaacaacagcaucgccauccccaccaacuucacgaucuccgugaccaccgagauccugcccgucagcaugaccaagacgagcguggacugcaccauguacaucugcggggacuccaccgagugcagcaaccuccugcugcaguacggcuccuucugcacccagcucaaccgggcccugacggggaucgcgguggagcaggacaagaacacccaggaggucuucgcccaggugaagcagaucuacaagacgcccccgaucaaggacuucggcggcuucaacuucagccagauccugcccgaccccuccaagcccagcaagcgcuccuucaucgaggaccuccuguucaacaaggugacccuggccgacgccggguucaucaagcaguacggcgacugccucggggacaucgccgcgcgggaccugaucugcgcccagaaguucaacggccugaccguccucccgccccugcugaccgacgagaugaucgcccaguacaccagcgcccuccuggccgggaccaucacguccggcuggaccuucggcgcgggggccgcccugcagauccccuucgccaugcagauggcguaccgcuucaacggcaucggggugacccagaacgugcucuacgagaaccagaagcugaucgccaaccaguucaacagcgccaucggcaagauccaggacucccugagcuccaccgccagcgcccucgggaagcugcaggacgucgugaaccagaacgcgcaggcccugaacacgcucgugaagcagcuguccagcaacuucggcgccaucuccagcguccugaacgacauccucucccggcuggacaagguggaggccgaggugcagaucgaccgccugaucaccggccggcuccagagccugcagaccuacgucacccagcagcugauccgcgccgcggagauccgggccagcgccaaccucgccgccaccaagauguccgagugcgugcuggggcagagcaagcgcguggacuucugcggcaagggguaccaccugauguccuucccccagagcgcgccgcacggcgucguguuccuccacgucacguacgugcccgcccaggagaagaacuucaccaccgcccccgccaucugccacgacgggaaggcgcacuucccccgggagggcguguucgucuccaacggcacccacugguucgugacgcagcgcaacuucuacgagccgcagaucaucaccaccgacaacaccuucgugagcgggaacugcgacgucgugaucggcaucgugaacaacacggucuacgacccccugcagcccgagcuggacuccuucaaggaggagcucgacaaguacuucaagaaccacaccagccccgacguggaccugggggacaucuccggcaucaacgccagcguggucaacauccagaaggagaucgaccggcugaacgagguggccaagaaccucaacgagucccugaucgaccugcaggagcucggcaaguacgagcaguacaucaaguggccgugguacaucuggcugggguucaucgccggccugaucgccaucgugauggucaccaucaugcucugcugcaugaccagcugcugcuccugccugaaggggugcugcagcugcggcuccugcugcaaguucgacgaggacgacagcgagcccgugcugaagggggugaagcuccacuacacgugaggacuagucccuguucccagagcccacuuuuuuuucuuuuuuugaaauaaaauagccugucuuucagaucucaaaggcucuuuucagagccaccaaaaaaaaaaaaaaaaaaaaaaaaaaaaaaaaaaaaaaaaaaaaaaaaaaaaaaaaaaaaaaaaaaaaaaaaaaaaaaaaaaaaaaaaaaaaaaaaaaaaa

SEQ ID NO: 23662 - RNA, 4191 nt, Artificial Sequence
  SARS-CoV-2/Wuhan/WIV05/2019__EPI_ISL_402128 spike protein mRNA gc (1-1273)(E484K_D614G)
aggagagggcgcuuggcuugcaaggacccugagcugcggcauugaagcacacccaacccaacucgacugaagucagccucacugaaccggaucugagaaucuucucucucugggcuugccagggcucuccgaaccuagcuagcauccucuucaauuccaacuagaaagcuuaccauguucguguuccugguccuccugccccuggugagcucccagugcgugaaccucaccacccgcacgcagcugccgcccgccuacaccaacagcuucacccggggcgucuacuaccccgacaagguguuccgcuccagcgugcugcacuccacccaggaccucuuccugcccuucuucagcaacgucacgugguuccacgccauccacguguccgggaccaacggcaccaagcgguucgacaacccggugcugcccuucaacgacggggucuacuucgcgagcaccgagaaguccaacaucauccgcggcuggaucuucgggacgacccucgacagcaagacccagucccugcugaucgugaacaacgccaccaacguggucaucaaggugugcgaguuccaguucugcaacgaccccuuccucggcguguacuaccacaagaacaacaagagcuggauggaguccgaguuccgggucuacagcuccgccaacaacugcacguucgaguacgugagccagcccuuccugauggaccuggagggcaagcaggggaacuucaagaaccuccgcgaguucguguucaagaacaucgacggcuacuucaagaucuacuccaagcacaccccgaucaaccugguccgggaccugccccagggguucagcgcccucgagccccugguggaccugcccaucggcaucaacaucacccgcuuccagacccuccuggcccugcaccgguccuaccucacgccgggggacagcagcuccggcuggaccgcgggcgccgccgccuacuacgugggguaccugcagccccgcaccuuccugcucaaguacaacgagaacggcaccaucacggacgcggucgacugcgcccuggacccccugagcgagaccaagugcacccucaaguccuucaccguggagaaggggaucuaccagacgagcaacuuccgggugcagcccaccgaguccaucguccgcuucccgaacaucaccaaccugugccccuucggcgagguguucaacgccacccgguucgccagcgucuacgccuggaaccgcaagcggaucuccaacugcguggcggacuacagcgugcuguacaacuccgccagcuucuccacguucaagugcuacggcgucagccccaccaagcucaacgaccugugcuucaccaacguguacgccgacuccuucgugauccgcggggacgagguccggcagaucgcccccggccagaccgggaagaucgccgacuacaacuacaagcugccggacgacuucacgggcugcgugaucgcguggaacagcaacaaccucgacuccaaggucgggggcaacuacaacuaccuguaccgccuguuccgcaagagcaaccucaagcccuucgagcgggacaucuccaccgagaucuaccaggccggcagcacccccugcaacggggugaagggcuucaacugcuacuucccccugcaguccuacggguuccagccgaccaacggcgugggguaccagcccuaccggguggucgugcugagcuucgagcuccugcacgcccccgccacggugugcggccccaagaaguccaccaaccuggucaagaacaagugcgugaacuucaacuucaacggccucaccgggaccggcgugcugaccgagagcaacaagaaguuccugccguuccagcaguucgggcgcgacaucgccgacacgaccgacgcgguccgcgacccccagacccuggagauccucgacaucacccccugcagcuucggcgggguguccgugaucacgccgggcaccaacaccagcaaccaggucgccgugcuguaccagggcgugaacugcaccgagguccccguggccauccacgccgaccagcugacgcccaccuggcggguguacuccaccgggagcaacgucuuccagacccgcgccggcugccucaucggggcggagcacgugaacaacuccuacgagugcgacauccccaucggcgccggcaucugcgccagcuaccagacgcagaccaacuccccgcggcgcgcccggagcguggcgucccagagcaucaucgccuacaccaugucccugggggccgagaacagcgucgccuacuccaacaacagcaucgccauccccaccaacuucacgaucuccgugaccaccgagauccugcccgugagcaugaccaagacgagcgucgacugcaccauguacaucugcggcgacuccaccgagugcagcaaccuccugcugcaguacggguccuucugcacccagcucaaccgcgcgcugacgggcaucgccguggagcaggacaagaacacccaggagguguucgcccaggucaagcagaucuacaagacgcccccgaucaaggacuucgggggcuucaacuucagccagauccugcccgaccccuccaagcccagcaagcgguccuucaucgaggaccuccuguucaacaaggugacccuggccgacgccggcuucaucaagcaguacggggacugccucggcgacaucgcggcccgcgaccugaucugcgcccagaaguucaacgggcugaccgugcucccgccccugcugaccgacgagaugaucgcccaguacaccagcgcccuccuggcgggcaccaucacguccggguggaccuucggcgccggcgccgcccugcagauccccuucgcgaugcagauggccuaccgguucaacgggaucggcgucacccagaacgugcucuacgagaaccagaagcugaucgccaaccaguucaacagcgccaucgggaagauccaggacucccugagcuccaccgccagcgcgcucggcaagcugcaggacguggucaaccagaacgcccaggcccugaacacgcucgugaagcagcuguccagcaacuucggggccaucuccagcgugcugaacgacauccucucccgccuggacaaggucgaggccgaggugcagaucgaccggcugaucaccggccgccuccagagccugcagaccuacgugacccagcagcugauccgggcggccgagauccgcgccagcgccaaccucgccgcgaccaagauguccgagugcguccugggccagagcaagcggguggacuucugcgggaagggcuaccaccugauguccuucccccagagcgccccgcacgggguggucuuccuccacgugacguacguccccgcccaggagaagaacuucaccaccgcccccgcgaucugccacgacggcaaggcccacuucccccgcgaggggguguucguguccaacggcacccacugguucgucacgcagcggaacuucuacgagccgcagaucaucaccaccgacaacaccuucgugagcggcaacugcgacguggucaucgggaucgugaacaacacgguguacgacccccugcagcccgagcuggacuccuucaaggaggagcucgacaaguacuucaagaaccacaccagccccgacgucgaccugggcgacaucuccgggaucaacgccagcguggugaacauccagaaggagaucgaccgccugaacgaggucgccaagaaccucaacgagucccugaucgaccugcaggagcucggcaaguacgagcaguacaucaaguggccgugguacaucuggcugggcuucaucgccgggcugaucgcgaucgugauggugaccaucaugcucugcugcaugaccagcugcugcuccugccugaagggcugcugcagcugcggguccugcugcaaguucgacgaggacgacagcgagcccguccugaagggcgugaagcuccacuacacgugaggacuagucccuguucccagagcccacuuuuuuuucuuuuuuugaaauaaaauagccugucuuucagaucucaaaggcucuuuucagagccaccaaaaaaaaaaaaaaaaaaaaaaaaaaaaaaaaaaaaaaaaaaaaaaaaaaaaaaaaaaaaaaaaaaaaaaaaaaaaaaaaaaaaaaaaaaaaaaaaaaaaa

SEQ ID NO: 23663 - RNA, 4191 nt, Artificial Sequence
  SARS-CoV-2/Wuhan/WIV05/2019__EPI_ISL_402128 spike protein mRNA gc (1-1273)(L18F_T20N_P26S_D138Y_R190S_K417T_E484K_N501Y_D614G_H655Y _T1027I)
aggagagggcgcuuggcuugcaaggacccugagcugcggcauugaagcacacccaacccaacucgacugaagucagccucacugaaccggaucugagaaucuucucucucugggcuugccagggcucuccgaaccuagcuagcauccucuucaauuccaacuagaaagcuuaccauguucguguuccugguccuccugccccuggugagcucccagugcgugaacuucaccaaccgcacccagcucccgagcgccuacacgaacuccuucacccggggcgucuacuaccccgacaagguguuccgcagcuccgugcugcacagcacccaggaccuguuccuccccuucuucuccaacgucaccugguuccacgccauccacgugagcgggacgaacggcaccaagcgguucgacaaccccgugcugccguucaacgacggggucuacuucgcguccaccgagaaguccaacaucauccgcggcuggaucuucgggaccacgcuggacuccaagacccagagccuccugaucgugaacaacgccaccaacguggucaucaaggugugcgaguuccaguucugcaacuaccccuuccugggcguguacuaccacaagaacaacaaguccuggauggagagcgaguuccgggucuacuccagcgccaacaacugcaccuucgaguacgugucccagcccuuccucauggaccuggagggcaagcaggggaacuucaagaaccugagcgaguucguguucaagaacaucgacggcuacuucaagaucuacuccaagcacacgcccaucaaccucguccgcgaccugccgcagggguucagcgcccuggagccccucguggaccugcccaucggcaucaacaucacccgguuccagacccugcucgcccugcaccgcagcuaccugacccccggggacuccagcuccggcuggacggcgggcgccgccgccuacuacgugggguaccuccagccgcggaccuuccugcugaaguacaacgagaacggcaccaucaccgacgcggucgacugcgcccucgacccccugagcgagacgaagugcacccugaaguccuucaccguggagaaggggaucuaccagaccagcaacuuccgcgugcagcccacggaguccaucguccgguuccccaacaucaccaaccucugcccguucggcgagguguucaacgccacccgcuucgccagcgucuacgccuggaaccggaagcgcaucuccaacugcguggcggacuacagcgugcuguacaacuccgccagcuucuccaccuucaagugcuacggcgucagccccacgaagcugaacgaccucugcuucaccaacguguacgccgacuccuucgugauccgcggggacgagguccggcagaucgcccccggccagaccgggaccaucgccgacuacaacuacaagcugcccgacgacuucacgggcugcgugaucgcguggaacagcaacaaccuggacuccaaggucgggggcaacuacaacuaccucuaccggcuguuccgcaagagcaaccugaagccguucgagcgggacaucuccaccgagaucuaccaggccggcagcacccccugcaacggggugaagggcuucaacugcuacuucccccuccagagcuacggguuccagcccaccuacggcgugggguaccagccguaccgcguggucgugcuguccuucgagcugcuccacgcccccgccacggugugcggccccaagaaguccaccaaccuggucaagaacaagugcgugaacuucaacuucaacggccugaccgggaccggcgugcucaccgagagcaacaagaaguuccugcccuuccagcaguucgggcgggacaucgccgacacgaccgacgcgguccgcgacccgcagacccuggagauccuggacaucacccccugcagcuucggcgggguguccgugaucacgcccggcaccaacaccagcaaccaggucgccgugcucuaccagggcgugaacugcaccgaggucccgguggccauccacgccgaccagcugacgcccaccuggcgcguguacuccaccgggagcaacgucuuccagacccgggccggcugccugaucggggcggaguacgugaacaacuccuacgagugcgacauccccaucggcgccggcaucugcgccagcuaccagacgcagaccaacagcccccgccgggcccgcagcguggcgucccagagcaucaucgccuacaccaugucccucggggccgagaacagcgucgccuacuccaacaacagcaucgccaucccgaccaacuucacgaucagcgugaccaccgagauccugcccguguccaugaccaagacgagcgucgacugcaccauguacaucugcggcgacuccaccgagugcagcaaccugcuccugcaguacggguccuucugcacccagcugaaccgggcgcucacgggcaucgccguggagcaggacaagaacacccaggagguguucgcccaggucaagcagaucuacaagaccccgcccaucaaggacuucgggggcuucaacuucagccagauccugcccgaccccuccaagcccagcaagcgcuccuucaucgaggaccuccuguucaacaaggugacccuggccgacgccggcuucaucaagcaguacggggacugccugggcgacaucgcggcccgggaccucaucugcgcccagaaguucaacgggcugacggugcugcccccgcuccugaccgacgagaugaucgcccaguacaccagcgcccugcucgcgggcaccaucacguccggguggaccuucggcgccggcgccgcccugcagauccccuucgcgaugcagauggccuaccgcuucaacgggaucggcgucacccagaacgugcuguacgagaaccagaagcucaucgccaaccaguucaacagcgccaucgggaagauccaggacucccugagcuccaccgccagcgcgcugggcaagcuccaggacguggucaaccagaacgcccaggcccugaacacgcuggugaagcagcucuccagcaacuucggggccaucuccagcgugcugaacgacauccugagccggcucgacaaggucgaggccgaggugcagaucgaccgccugaucaccggccggcugcagucccuccagaccuacgugacccagcagcugauccgcgcggccgagauccgggccagcgccaaccuggccgcgaucaagauguccgagugcguccucggccagagcaagcgcguggacuucugcgggaagggcuaccaccugauguccuucccccagagcgcgccccacgggguggucuuccugcacgugaccuacgucccggcccaggagaagaacuucacgaccgcccccgccaucugccacgacggcaaggcccacuucccccgggaggggguguucguguccaacggcacccacugguucgucacccagcgcaacuucuacgagccccagaucaucacgaccgacaacaccuucgugagcggcaacugcgacguggucaucgggaucgugaacaacaccguguacgacccgcuccagcccgagcuggacuccuucaaggaggagcuggacaaguacuucaagaaccacacgagccccgacgucgaccucggcgacaucuccgggaucaacgccagcguggugaacauccagaaggagaucgaccggcugaacgaggucgccaagaaccugaacgagucccucaucgaccugcaggagcugggcaaguacgagcaguacaucaaguggcccugguacaucuggcucggcuucaucgccgggcugaucgcgaucgugauggugaccaucaugcugugcugcaugaccagcugcugcuccugccucaagggcugcugcagcugcggguccugcugcaaguucgacgaggacgacagcgagccgguccugaagggcgugaagcugcacuacaccugaggacuagucccuguucccagagcccacuuuuuuuucuuuuuuugaaauaaaauagccugucuuucagaucucaaaggcucuuuucagagccaccaaaaaaaaaaaaaaaaaaaaaaaaaaaaaaaaaaaaaaaaaaaaaaaaaaaaaaaaaaaaaaaaaaaaaaaaaaaaaaaaaaaaaaaaaaaaaaaaaaaaa

SEQ ID NO: 23664 - RNA, 4191 nt, Artificial Sequence
  SARS-CoV-2/Wuhan/WIV05/2019__EPI_ISL_402128 spike protein mRNA gc (1-1273)(S13I_W152C_L452R_D614G)
aggagagggcgcuuggcuugcaaggacccugagcugcggcauugaagcacacccaacccaacucgacugaagucagccucacugaaccggaucugagaaucuucucucucugggcuugccagggcucuccgaaccuagcuagcauccucuucaauuccaacuagaaagcuuaccauguucguguuccugguccuccugccccuggugagcauccagugcgugaaccucaccacccgcacgcagcugccgcccgccuacaccaacuccuucacccggggcgucuacuaccccgacaagguguuccgcagcuccgugcugcacagcacccaggaccucuuccugcccuucuucuccaacgucacgugguuccacgccauccacgugagcgggaccaacggcaccaagcgguucgacaacccggugcugcccuucaacgacggggucuacuucgcguccaccgagaaguccaacaucauccgcggcuggaucuucgggacgacccucgacagcaagacccagagccugcugaucgugaacaacgccaccaacguggucaucaaggugugcgaguuccaguucugcaacgaccccuuccucggcguguacuaccacaagaacaacaaguccugcauggagagcgaguuccgggucuacuccagcgccaacaacugcacguucgaguacgugucccagcccuuccugauggaccuggagggcaagcaggggaacuucaagaaccuccgcgaguucguguucaagaacaucgacggcuacuucaagaucuacagcaagcacaccccgaucaaccugguccgggaccugccccagggguucuccgcccucgagccccugguggaccugcccaucggcaucaacaucacccgcuuccagacccuccuggcccugcaccggagcuaccucacgccgggggacuccagcagcggcuggaccgcgggcgccgccgccuacuacgugggguaccugcagccccgcaccuuccugcucaaguacaacgagaacggcaccaucacggacgcggucgacugcgcccuggacccccuguccgagaccaagugcacccucaagagcuucaccguggagaaggggaucuaccagacguccaacuuccgggugcagcccaccgagagcaucguccgcuucccgaacaucaccaaccugugccccuucggcgagguguucaacgccacccgguucgccuccgucuacgccuggaaccgcaagcggaucagcaacugcguggcggacuacuccgugcuguacaacagcgccuccuucagcacguucaagugcuacggcgucucccccaccaagcucaacgaccugugcuucaccaacguguacgccgacagcuucgugauccgcggggacgagguccggcagaucgcccccggccagaccgggaagaucgccgacuacaacuacaagcugccggacgacuucacgggcugcgugaucgcguggaacuccaacaaccucgacagcaaggucgggggcaacuacaacuaccgcuaccggcuguuccgcaaguccaaccugaagcccuucgagcgggacaucagcaccgagaucuaccaggccggcuccacccccugcaacgggguggagggcuucaacugcuacuucccccuccagagcuacggguuccagccgaccaacggcgugggguaccagcccuaccgcguggucgugcuguccuucgagcugcuccacgcccccgccacggugugcggccccaagaaguccaccaaccuggucaagaacaagugcgugaacuucaacuucaacggccugaccgggaccggcgugcucaccgagagcaacaagaaguuccugccguuccagcaguucgggcgcgacaucgccgacacgaccgacgcgguccgggacccccagacccuggagauccuggacaucacccccugcagcuucggcggggugagcgugaucacgccgggcaccaacaccuccaaccaggucgccgugcucuaccagggcgugaacugcaccgagguccccguggccauccacgccgaccagcugacgcccaccuggcgcguguacagcaccggguccaacgucuuccagacccgggccggcugccugaucggggcggagcacgugaacaacagcuacgagugcgacauccccaucggcgccggcaucugcgccuccuaccagacgcagaccaacagcccgcgccgggcccgcuccguggcgagccaguccaucaucgccuacaccaugagccucggggccgagaacuccgucgccuacagcaacaacuccaucgccauccccaccaacuucacgaucagcgugaccaccgagauccugcccguguccaugaccaagacgagcgucgacugcaccauguacaucugcggcgacagcaccgagugcuccaaccugcuccugcaguacgggagcuucugcacccagcugaaccgggcgcucacgggcaucgccguggagcaggacaagaacacccaggagguguucgcccaggucaagcagaucuacaagacgcccccgaucaaggacuucgggggcuucaacuucucccagauccugcccgaccccagcaagcccuccaagcgcagcuucaucgaggaccuccuguucaacaaggugacccuggccgacgccggcuucaucaagcaguacggggacugccugggcgacaucgcggcccgggaccucaucugcgcccagaaguucaacgggcugaccgugcugccgccccuccugaccgacgagaugaucgcccaguacaccuccgcccugcucgcgggcaccaucacgagcggguggaccuucggcgccggcgccgcccugcagauccccuucgcgaugcagauggccuaccgcuucaacgggaucggcgucacccagaacgugcuguacgagaaccagaagcucaucgccaaccaguucaacuccgccaucgggaagauccaggacagccuguccagcaccgccuccgcgcugggcaagcuccaggacguggucaaccagaacgcccaggcccugaacacgcuggugaagcagcucagcuccaacuucggggccaucagcuccgugcugaacgacauccugagccggcucgacaaggucgaggccgaggugcagaucgaccgccugaucaccggccggcugcagucccuccagaccuacgugacccagcagcugauccgcgcggccgagauccgggccagcgccaaccuggccgcgaccaagaugagcgagugcguccucggccaguccaagcgcguggacuucugcgggaagggcuaccaccugaugagcuucccccaguccgccccgcacgggguggucuuccugcacgugacguacguccccgcccaggagaagaacuucaccaccgcccccgcgaucugccacgacggcaaggcccacuucccccgggaggggguguucgugagcaacggcacccacugguucgucacgcagcgcaacuucuacgagccgcagaucaucaccaccgacaacaccuucguguccggcaacugcgacguggucaucgggaucgugaacaacacgguguacgacccccuccagcccgagcuggacagcuucaaggaggagcuggacaaguacuucaagaaccacaccucccccgacgucgaccucggcgacaucagcgggaucaacgccuccguggugaacauccagaaggagaucgaccggcugaacgaggucgccaagaaccugaacgagagccucaucgaccugcaggagcugggcaaguacgagcaguacaucaaguggccgugguacaucuggcucggcuucaucgccgggcugaucgcgaucgugauggugaccaucaugcugugcugcaugaccuccugcugcagcugccucaagggcugcugcuccugcgggagcugcugcaaguucgacgaggacgacuccgagcccguccugaagggcgugaagcugcacuacacgugaggacuagucccuguucccagagcccacuuuuuuuucuuuuuuugaaauaaaauagccugucuuucagaucucaaaggcucuuuucagagccaccaaaaaaaaaaaaaaaaaaaaaaaaaaaaaaaaaaaaaaaaaaaaaaaaaaaaaaaaaaaaaaaaaaaaaaaaaaaaaaaaaaaaaaaaaaaaaaaaaaaaa

SEQ ID NO: 23665 - RNA, 4191 nt, Artificial Sequence
  SARS-CoV-2/Wuhan/WIV05/2019__EPI_ISL_402128 spike protein mRNA gc (1-1273)
aggagagggcgcuuggcuugcaaggacccugagcugcggcauugaagcacacccaacccaacucgacugaagucagccucacugaaccggaucugagaaucuucucucucugggcuugccagggcucuccgaaccuagcuagcauccucuucaauuccaacuagaaagcuuaccauguucguguuccuggugcugcugccccuggugagcagccagugcgugaaccugaccacccggacccagcugccaccagccuacaccaacagcuucacccggggcgucuacuaccccgacaagguguuccggagcagcguccugcacagcacccaggaccuguuccugcccuucuucagcaacgugaccugguuccacgccauccacgugagcggcaccaacggcaccaagcgguucgacaaccccgugcugcccuucaacgacggcguguacuucgccagcaccgagaagagcaacaucauccggggcuggaucuucggcaccacccuggacagcaagacccagagccugcugaucgugaauaacgccaccaacguggugaucaaggugugcgaguuccaguucugcaacgaccccuuccugggcguguacuaccacaagaacaacaagagcuggauggagagcgaguuccggguguacagcagcgccaacaacugcaccuucgaguacgugagccagcccuuccugauggaccuggagggcaagcagggcaacuucaagaaccugcgggaguucguguucaagaacaucgacggcuacuucaagaucuacagcaagcacaccccaaucaaccuggugcgggaucugccccagggcuucucagcccuggagccccugguggaccugcccaucggcaucaacaucacccgguuccagacccugcuggcccugcaccggagcuaccugaccccaggcgacagcagcagcggguggacagcaggcgcggcugcuuacuacgugggcuaccugcagccccggaccuuccugcugaaguacaacgagaacggcaccaucaccgacgccguggacugcgcccuggacccucugagcgagaccaagugcacccugaagagcuucaccguggagaagggcaucuaccagaccagcaacuuccgggugcagcccaccgagagcaucgugcgguuccccaacaucaccaaccugugccccuucggcgagguguucaacgccacccgguucgccagcguguacgccuggaaccggaagcggaucagcaacugcguggccgacuacagcgugcuguacaacagcgccagcuucagcaccuucaagugcuacggcgugagccccaccaagcugaacgaccugugcuucaccaacguguacgccgacagcuucgugauccguggcgacgaggugcggcagaucgcacccggccagacaggcaagaucgccgacuacaacuacaagcugcccgacgacuucaccggcugcgugaucgccuggaacagcaacaaccucgacagcaaggugggcggcaacuacaacuaccuguaccggcuguuccggaagagcaaccugaagcccuucgagcgggacaucagcaccgagaucuaccaagccggcuccaccccuugcaacggcguggagggcuucaacugcuacuucccucugcagagcuacggcuuccagcccaccaacggcgugggcuaccagcccuaccgggugguggugcugagcuucgagcugcugcacgccccagccaccguguguggccccaagaagagcaccaaccuggugaagaacaagugcgugaacuucaacuucaacggccuuaccggcaccggcgugcugaccgagagcaacaagaaauuccugcccuuucagcaguucggccgggacaucgccgacaccaccgacgcugugcgggauccccagacccuggagauccuggacaucaccccuugcagcuucggcggcgugagcgugaucaccccaggcaccaacaccagcaaccagguggccgugcuguaccaggacgugaacugcaccgaggugcccguggccauccacgccgaccagcugacacccaccuggcgggucuacagcaccggcagcaacguguuccagacccgggccgguugccugaucggcgccgagcacgugaacaacagcuacgagugcgacauccccaucggcgccggcaucugugccagcuaccagacccagaccaauucaccccggagggcaaggagcguggccagccagagcaucaucgccuacaccaugagccugggcgccgagaacagcguggccuacagcaacaacagcaucgccauccccaccaacuucaccaucagcgugaccaccgagauucugcccgugagcaugaccaagaccagcguggacugcaccauguacaucugcggcgacagcaccgagugcagcaaccugcugcugcaguacggcagcuucugcacccagcugaaccgggcccugaccggcaucgccguggagcaggacaagaacacccaggagguguucgcccaggugaagcagaucuacaagaccccucccaucaaggacuucggcggcuucaacuucagccagauccugcccgaccccagcaagcccagcaagcggagcuucaucgaggaccugcuguucaacaaggugacccuagccgacgccggcuucaucaagcaguacggcgacugccucggcgacauagccgcccgggaccugaucugcgcccagaaguucaacggccugaccgugcugccuccccugcugaccgacgagaugaucgcccaguacaccagcgcccuguuagccggaaccaucaccagcggcuggacuuucggcgcuggagccgcucugcagauccccuucgccaugcagauggccuaccgguucaacggcaucggcgugacccagaacgugcuguacgagaaccagaagcugaucgccaaccaguucaacagcgccaucggcaagauccaggacagccugagcagcaccgcuagcgcccugggcaagcugcaggacguggugaaccagaacgcccaggcccugaacacccuggugaagcagcugagcagcaacuucggcgccaucagcagcgugcugaacgacauccugagccggcuggacaaggucgaggccgaggugcagaucgaccggcugaucacuggccggcugcagagccugcagaccuacgugacccagcagcugauccgggccgccgagauucgggccagcgccaaccuggccgccaccaagaugagcgagugcgugcugggccagagcaagcggguggacuucugcggcaagggcuaccaccugaugagcuuuccccagagcgcaccccacggagugguguuccugcacgugaccuacgugcccgcccaggagaagaacuucaccaccgccccagccaucugccacgacggcaaggcccacuuuccccgggagggcguguucgugagcaacggcacccacugguucgugacccagcggaacuucuacgagccccagaucaucaccaccgacaacaccuucgugagcggcaacugcgacguggugaucggcaucgugaacaacaccguguacgauccccugcagcccgagcuggacagcuucaaggaggagcuggacaaguacuucaagaaucacaccagccccgacguggaccugggcgacaucagcggcaucaacgccagcguggugaacauccagaaggagaucgaucggcugaacgagguggccaagaaccugaacgagagccugaucgaccugcaggagcugggcaaguacgagcaguacaucaaguggcccugguacaucuggcugggcuucaucgccggccugaucgccaucgugauggugaccaucaugcugugcugcaugaccagcugcugcagcugccugaagggcuguugcagcugcggcagcugcugcaaguucgacgaggacgacagcgagcccgugcugaagggcgugaagcugcacuacaccugaggacuagucccuguucccagagcccacuuuuuuuucuuuuuuugaaauaaaauagccugucuuucagaucucaaaggcucuuuucagagccaccaaaaaaaaaaaaaaaaaaaaaaaaaaaaaaaaaaaaaaaaaaaaaaaaaaaaaaaaaaaaaaaaaaaaaaaaaaaaaaaaaaaaaaaaaaaaaaaaaaaaa

SEQ ID NO: 23666 - RNA, 4191 nt, Artificial Sequence
  SARS-CoV-2/Wuhan/WIV05/2019__EPI_ISL_402128 spike protein mRNA gc (1-1273)(D614G)
aggagagggcgcuuggcuugcaaggacccugagcugcggcauugaagcacacccaacccaacucgacugaagucagccucacugaaccggaucugagaaucuucucucucugggcuugccagggcucuccgaaccuagcuagcauccucuucaauuccaacuagaaagcuuaccauguucguguuccuggugcugcugccccuggugagcagccagugcgugaaccugaccacccggacccagcugccaccagccuacaccaacagcuucacccggggcgucuacuaccccgacaagguguuccggagcagcguccugcacagcacccaggaccuguuccugcccuucuucagcaacgugaccugguuccacgccauccacgugagcggcaccaacggcaccaagcgguucgacaaccccgugcugcccuucaacgacggcguguacuucgccagcaccgagaagagcaacaucauccggggcuggaucuucggcaccacccuggacagcaagacccagagccugcugaucgugaauaacgccaccaacguggugaucaaggugugcgaguuccaguucugcaacgaccccuuccugggcguguacuaccacaagaacaacaagagcuggauggagagcgaguuccggguguacagcagcgccaacaacugcaccuucgaguacgugagccagcccuuccugauggaccuggagggcaagcagggcaacuucaagaaccugcgggaguucguguucaagaacaucgacggcuacuucaagaucuacagcaagcacaccccaaucaaccuggugcgggaucugccccagggcuucucagcccuggagccccugguggaccugcccaucggcaucaacaucacccgguuccagacccugcuggcccugcaccggagcuaccugaccccaggcgacagcagcagcggguggacagcaggcgcggcugcuuacuacgugggcuaccugcagccccggaccuuccugcugaaguacaacgagaacggcaccaucaccgacgccguggacugcgcccuggacccucugagcgagaccaagugcacccugaagagcuucaccguggagaagggcaucuaccagaccagcaacuuccgggugcagcccaccgagagcaucgugcgguuccccaacaucaccaaccugugccccuucggcgagguguucaacgccacccgguucgccagcguguacgccuggaaccggaagcggaucagcaacugcguggccgacuacagcgugcuguacaacagcgccagcuucagcaccuucaagugcuacggcgugagccccaccaagcugaacgaccugugcuucaccaacguguacgccgacagcuucgugauccguggcgacgaggugcggcagaucgcacccggccagacaggcaagaucgccgacuacaacuacaagcugcccgacgacuucaccggcugcgugaucgccuggaacagcaacaaccucgacagcaaggugggcggcaacuacaacuaccuguaccggcuguuccggaagagcaaccugaagcccuucgagcgggacaucagcaccgagaucuaccaagccggcuccaccccuugcaacggcguggagggcuucaacugcuacuucccucugcagagcuacggcuuccagcccaccaacggcgugggcuaccagcccuaccgggugguggugcugagcuucgagcugcugcacgccccagccaccguguguggccccaagaagagcaccaaccuggugaagaacaagugcgugaacuucaacuucaacggccuuaccggcaccggcgugcugaccgagagcaacaagaaauuccugcccuuucagcaguucggccgggacaucgccgacaccaccgacgcugugcgggauccccagacccuggagauccuggacaucaccccuugcagcuucggcggcgugagcgugaucaccccaggcaccaacaccagcaaccagguggccgugcuguaccagggcgugaacugcaccgaggugcccguggccauccacgccgaccagcugacacccaccuggcgggucuacagcaccggcagcaacguguuccagacccgggccgguugccugaucggcgccgagcacgugaacaacagcuacgagugcgacauccccaucggcgccggcaucugugccagcuaccagacccagaccaauucaccccggagggcaaggagcguggccagccagagcaucaucgccuacaccaugagccugggcgccgagaacagcguggccuacagcaacaacagcaucgccauccccaccaacuucaccaucagcgugaccaccgagauucugcccgugagcaugaccaagaccagcguggacugcaccauguacaucugcggcgacagcaccgagugcagcaaccugcugcugcaguacggcagcuucugcacccagcugaaccgggcccugaccggcaucgccguggagcaggacaagaacacccaggagguguucgcccaggugaagcagaucuacaagaccccucccaucaaggacuucggcggcuucaacuucagccagauccugcccgaccccagcaagcccagcaagcggagcuucaucgaggaccugcuguucaacaaggugacccuagccgacgccggcuucaucaagcaguacggcgacugccucggcgacauagccgcccgggaccugaucugcgcccagaaguucaacggccugaccgugcugccuccccugcugaccgacgagaugaucgcccaguacaccagcgcccuguuagccggaaccaucaccagcggcuggacuuucggcgcuggagccgcucugcagauccccuucgccaugcagauggccuaccgguucaacggcaucggcgugacccagaacgugcuguacgagaaccagaagcugaucgccaaccaguucaacagcgccaucggcaagauccaggacagccugagcagcaccgcuagcgcccugggcaagcugcaggacguggugaaccagaacgcccaggcccugaacacccuggugaagcagcugagcagcaacuucggcgccaucagcagcgugcugaacgacauccugagccggcuggacaaggucgaggccgaggugcagaucgaccggcugaucacuggccggcugcagagccugcagaccuacgugacccagcagcugauccgggccgccgagauucgggccagcgccaaccuggccgccaccaagaugagcgagugcgugcugggccagagcaagcggguggacuucugcggcaagggcuaccaccugaugagcuuuccccagagcgcaccccacggagugguguuccugcacgugaccuacgugcccgcccaggagaagaacuucaccaccgccccagccaucugccacgacggcaaggcccacuuuccccgggagggcguguucgugagcaacggcacccacugguucgugacccagcggaacuucuacgagccccagaucaucaccaccgacaacaccuucgugagcggcaacugcgacguggugaucggcaucgugaacaacaccguguacgauccccugcagcccgagcuggacagcuucaaggaggagcuggacaaguacuucaagaaucacaccagccccgacguggaccugggcgacaucagcggcaucaacgccagcguggugaacauccagaaggagaucgaucggcugaacgagguggccaagaaccugaacgagagccugaucgaccugcaggagcugggcaaguacgagcaguacaucaaguggcccugguacaucuggcugggcuucaucgccggccugaucgccaucgugauggugaccaucaugcugugcugcaugaccagcugcugcagcugccugaagggcuguugcagcugcggcagcugcugcaaguucgacgaggacgacagcgagcccgugcugaagggcgugaagcugcacuacaccugaggacuagucccuguucccagagcccacuuuuuuuucuuuuuuugaaauaaaauagccugucuuucagaucucaaaggcucuuuucagagccaccaaaaaaaaaaaaaaaaaaaaaaaaaaaaaaaaaaaaaaaaaaaaaaaaaaaaaaaaaaaaaaaaaaaaaaaaaaaaaaaaaaaaaaaaaaaaaaaaaaaaa

SEQ ID NO: 23667 - RNA, 4191 nt, Artificial Sequence
  SARS-CoV-2/Wuhan/WIV05/2019__EPI_ISL_402128 spike protein mRNA gc (1-1273)(A222V_D614G)
aggagagggcgcuuggcuugcaaggacccugagcugcggcauugaagcacacccaacccaacucgacugaagucagccucacugaaccggaucugagaaucuucucucucugggcuugccagggcucuccgaaccuagcuagcauccucuucaauuccaacuagaaagcuuaccauguucguguuccuggugcugcugccccuggugagcagccagugcgugaaccugaccacccggacccagcugccaccagccuacaccaacagcuucacccggggcgucuacuaccccgacaagguguuccggagcagcguccugcacagcacccaggaccuguuccugcccuucuucagcaacgugaccugguuccacgccauccacgugagcggcaccaacggcaccaagcgguucgacaaccccgugcugcccuucaacgacggcguguacuucgccagcaccgagaagagcaacaucauccggggcuggaucuucggcaccacccuggacagcaagacccagagccugcugaucgugaauaacgccaccaacguggugaucaaggugugcgaguuccaguucugcaacgaccccuuccugggcguguacuaccacaagaacaacaagagcuggauggagagcgaguuccggguguacagcagcgccaacaacugcaccuucgaguacgugagccagcccuuccugauggaccuggagggcaagcagggcaacuucaagaaccugcgggaguucguguucaagaacaucgacggcuacuucaagaucuacagcaagcacaccccaaucaaccuggugcgggaucugccccagggcuucucagugcuggagccccugguggaccugcccaucggcaucaacaucacccgguuccagacccugcuggcccugcaccggagcuaccugaccccaggcgacagcagcagcggguggacagcaggcgcggcugcuuacuacgugggcuaccugcagccccggaccuuccugcugaaguacaacgagaacggcaccaucaccgacgccguggacugcgcccuggacccucugagcgagaccaagugcacccugaagagcuucaccguggagaagggcaucuaccagaccagcaacuuccgggugcagcccaccgagagcaucgugcgguuccccaacaucaccaaccugugccccuucggcgagguguucaacgccacccgguucgccagcguguacgccuggaaccggaagcggaucagcaacugcguggccgacuacagcgugcuguacaacagcgccagcuucagcaccuucaagugcuacggcgugagccccaccaagcugaacgaccugugcuucaccaacguguacgccgacagcuucgugauccguggcgacgaggugcggcagaucgcacccggccagacaggcaagaucgccgacuacaacuacaagcugcccgacgacuucaccggcugcgugaucgccuggaacagcaacaaccucgacagcaaggugggcggcaacuacaacuaccuguaccggcuguuccggaagagcaaccugaagcccuucgagcgggacaucagcaccgagaucuaccaagccggcuccaccccuugcaacggcguggagggcuucaacugcuacuucccucugcagagcuacggcuuccagcccaccaacggcgugggcuaccagcccuaccgggugguggugcugagcuucgagcugcugcacgccccagccaccguguguggccccaagaagagcaccaaccuggugaagaacaagugcgugaacuucaacuucaacggccuuaccggcaccggcgugcugaccgagagcaacaagaaauuccugcccuuucagcaguucggccgggacaucgccgacaccaccgacgcugugcgggauccccagacccuggagauccuggacaucaccccuugcagcuucggcggcgugagcgugaucaccccaggcaccaacaccagcaaccagguggccgugcuguaccagggcgugaacugcaccgaggugcccguggccauccacgccgaccagcugacacccaccuggcgggucuacagcaccggcagcaacguguuccagacccgggccgguugccugaucggcgccgagcacgugaacaacagcuacgagugcgacauccccaucggcgccggcaucugugccagcuaccagacccagaccaauucaccccggagggcaaggagcguggccagccagagcaucaucgccuacaccaugagccugggcgccgagaacagcguggccuacagcaacaacagcaucgccauccccaccaacuucaccaucagcgugaccaccgagauucugcccgugagcaugaccaagaccagcguggacugcaccauguacaucugcggcgacagcaccgagugcagcaaccugcugcugcaguacggcagcuucugcacccagcugaaccgggcccugaccggcaucgccguggagcaggacaagaacacccaggagguguucgcccaggugaagcagaucuacaagaccccucccaucaaggacuucggcggcuucaacuucagccagauccugcccgaccccagcaagcccagcaagcggagcuucaucgaggaccugcuguucaacaaggugacccuagccgacgccggcuucaucaagcaguacggcgacugccucggcgacauagccgcccgggaccugaucugcgcccagaaguucaacggccugaccgugcugccuccccugcugaccgacgagaugaucgcccaguacaccagcgcccuguuagccggaaccaucaccagcggcuggacuuucggcgcuggagccgcucugcagauccccuucgccaugcagauggccuaccgguucaacggcaucggcgugacccagaacgugcuguacgagaaccagaagcugaucgccaaccaguucaacagcgccaucggcaagauccaggacagccugagcagcaccgcuagcgcccugggcaagcugcaggacguggugaaccagaacgcccaggcccugaacacccuggugaagcagcugagcagcaacuucggcgccaucagcagcgugcugaacgacauccugagccggcuggacaaggucgaggccgaggugcagaucgaccggcugaucacuggccggcugcagagccugcagaccuacgugacccagcagcugauccgggccgccgagauucgggccagcgccaaccuggccgccaccaagaugagcgagugcgugcugggccagagcaagcggguggacuucugcggcaagggcuaccaccugaugagcuuuccccagagcgcaccccacggagugguguuccugcacgugaccuacgugcccgcccaggagaagaacuucaccaccgccccagccaucugccacgacggcaaggcccacuuuccccgggagggcguguucgugagcaacggcacccacugguucgugacccagcggaacuucuacgagccccagaucaucaccaccgacaacaccuucgugagcggcaacugcgacguggugaucggcaucgugaacaacaccguguacgauccccugcagcccgagcuggacagcuucaaggaggagcuggacaaguacuucaagaaucacaccagccccgacguggaccugggcgacaucagcggcaucaacgccagcguggugaacauccagaaggagaucgaucggcugaacgagguggccaagaaccugaacgagagccugaucgaccugcaggagcugggcaaguacgagcaguacaucaaguggcccugguacaucuggcugggcuucaucgccggccugaucgccaucgugauggugaccaucaugcugugcugcaugaccagcugcugcagcugccugaagggcuguugcagcugcggcagcugcugcaaguucgacgaggacgacagcgagcccgugcugaagggcgugaagcugcacuacaccugaggacuagucccuguucccagagcccacuuuuuuuucuuuuuuugaaauaaaauagccugucuuucagaucucaaaggcucuuuucagagccaccaaaaaaaaaaaaaaaaaaaaaaaaaaaaaaaaaaaaaaaaaaaaaaaaaaaaaaaaaaaaaaaaaaaaaaaaaaaaaaaaaaaaaaaaaaaaaaaaaaaaa

SEQ ID NO: 23668 - RNA, 4191 nt, Artificial Sequence
  SARS-CoV-2/Wuhan/WIV05/2019__EPI_ISL_402128 spike protein mRNA gc (1-1273)(N439K_D614G)
aggagagggcgcuuggcuugcaaggacccugagcugcggcauugaagcacacccaacccaacucgacugaagucagccucacugaaccggaucugagaaucuucucucucugggcuugccagggcucuccgaaccuagcuagcauccucuucaauuccaacuagaaagcuuaccauguucguguuccuggugcugcugccccuggugagcagccagugcgugaaccugaccacccggacccagcugccaccagccuacaccaacagcuucacccggggcgucuacuaccccgacaagguguuccggagcagcguccugcacagcacccaggaccuguuccugcccuucuucagcaacgugaccugguuccacgccauccacgugagcggcaccaacggcaccaagcgguucgacaaccccgugcugcccuucaacgacggcguguacuucgccagcaccgagaagagcaacaucauccggggcuggaucuucggcaccacccuggacagcaagacccagagccugcugaucgugaauaacgccaccaacguggugaucaaggugugcgaguuccaguucugcaacgaccccuuccugggcguguacuaccacaagaacaacaagagcuggauggagagcgaguuccggguguacagcagcgccaacaacugcaccuucgaguacgugagccagcccuuccugauggaccuggagggcaagcagggcaacuucaagaaccugcgggaguucguguucaagaacaucgacggcuacuucaagaucuacagcaagcacaccccaaucaaccuggugcgggaucugccccagggcuucucagcccuggagccccugguggaccugcccaucggcaucaacaucacccgguuccagacccugcuggcccugcaccggagcuaccugaccccaggcgacagcagcagcggguggacagcaggcgcggcugcuuacuacgugggcuaccugcagccccggaccuuccugcugaaguacaacgagaacggcaccaucaccgacgccguggacugcgcccuggacccucugagcgagaccaagugcacccugaagagcuucaccguggagaagggcaucuaccagaccagcaacuuccgggugcagcccaccgagagcaucgugcgguuccccaacaucaccaaccugugccccuucggcgagguguucaacgccacccgguucgccagcguguacgccuggaaccggaagcggaucagcaacugcguggccgacuacagcgugcuguacaacagcgccagcuucagcaccuucaagugcuacggcgugagccccaccaagcugaacgaccugugcuucaccaacguguacgccgacagcuucgugauccguggcgacgaggugcggcagaucgcacccggccagacaggcaagaucgccgacuacaacuacaagcugcccgacgacuucaccggcugcgugaucgccuggaacagcaagaaccucgacagcaaggugggcggcaacuacaacuaccuguaccggcuguuccggaagagcaaccugaagcccuucgagcgggacaucagcaccgagaucuaccaagccggcuccaccccuugcaacggcguggagggcuucaacugcuacuucccucugcagagcuacggcuuccagcccaccaacggcgugggcuaccagcccuaccgggugguggugcugagcuucgagcugcugcacgccccagccaccguguguggccccaagaagagcaccaaccuggugaagaacaagugcgugaacuucaacuucaacggccuuaccggcaccggcgugcugaccgagagcaacaagaaauuccugcccuuucagcaguucggccgggacaucgccgacaccaccgacgcugugcgggauccccagacccuggagauccuggacaucaccccuugcagcuucggcggcgugagcgugaucaccccaggcaccaacaccagcaaccagguggccgugcuguaccagggcgugaacugcaccgaggugcccguggccauccacgccgaccagcugacacccaccuggcgggucuacagcaccggcagcaacguguuccagacccgggccgguugccugaucggcgccgagcacgugaacaacagcuacgagugcgacauccccaucggcgccggcaucugugccagcuaccagacccagaccaauucaccccggagggcaaggagcguggccagccagagcaucaucgccuacaccaugagccugggcgccgagaacagcguggccuacagcaacaacagcaucgccauccccaccaacuucaccaucagcgugaccaccgagauucugcccgugagcaugaccaagaccagcguggacugcaccauguacaucugcggcgacagcaccgagugcagcaaccugcugcugcaguacggcagcuucugcacccagcugaaccgggcccugaccggcaucgccguggagcaggacaagaacacccaggagguguucgcccaggugaagcagaucuacaagaccccucccaucaaggacuucggcggcuucaacuucagccagauccugcccgaccccagcaagcccagcaagcggagcuucaucgaggaccugcuguucaacaaggugacccuagccgacgccggcuucaucaagcaguacggcgacugccucggcgacauagccgcccgggaccugaucugcgcccagaaguucaacggccugaccgugcugccuccccugcugaccgacgagaugaucgcccaguacaccagcgcccuguuagccggaaccaucaccagcggcuggacuuucggcgcuggagccgcucugcagauccccuucgccaugcagauggccuaccgguucaacggcaucggcgugacccagaacgugcuguacgagaaccagaagcugaucgccaaccaguucaacagcgccaucggcaagauccaggacagccugagcagcaccgcuagcgcccugggcaagcugcaggacguggugaaccagaacgcccaggcccugaacacccuggugaagcagcugagcagcaacuucggcgccaucagcagcgugcugaacgacauccugagccggcuggacaaggucgaggccgaggugcagaucgaccggcugaucacuggccggcugcagagccugcagaccuacgugacccagcagcugauccgggccgccgagauucgggccagcgccaaccuggccgccaccaagaugagcgagugcgugcugggccagagcaagcggguggacuucugcggcaagggcuaccaccugaugagcuuuccccagagcgcaccccacggagugguguuccugcacgugaccuacgugcccgcccaggagaagaacuucaccaccgccccagccaucugccacgacggcaaggcccacuuuccccgggagggcguguucgugagcaacggcacccacugguucgugacccagcggaacuucuacgagccccagaucaucaccaccgacaacaccuucgugagcggcaacugcgacguggugaucggcaucgugaacaacaccguguacgauccccugcagcccgagcuggacagcuucaaggaggagcuggacaaguacuucaagaaucacaccagccccgacguggaccugggcgacaucagcggcaucaacgccagcguggugaacauccagaaggagaucgaucggcugaacgagguggccaagaaccugaacgagagccugaucgaccugcaggagcugggcaaguacgagcaguacaucaaguggcccugguacaucuggcugggcuucaucgccggccugaucgccaucgugauggugaccaucaugcugugcugcaugaccagcugcugcagcugccugaagggcuguugcagcugcggcagcugcugcaaguucgacgaggacgacagcgagcccgugcugaagggcgugaagcugcacuacaccugaggacuagucccuguucccagagcccacuuuuuuuucuuuuuuugaaauaaaauagccugucuuucagaucucaaaggcucuuuucagagccaccaaaaaaaaaaaaaaaaaaaaaaaaaaaaaaaaaaaaaaaaaaaaaaaaaaaaaaaaaaaaaaaaaaaaaaaaaaaaaaaaaaaaaaaaaaaaaaaaaaaaa

SEQ ID NO: 23669 - RNA, 4191 nt, Artificial Sequence
  SARS-CoV-2/Wuhan/WIV05/2019__EPI_ISL_402128 spike protein mRNA gc (1-1273)(S477N_D614G)
aggagagggcgcuuggcuugcaaggacccugagcugcggcauugaagcacacccaacccaacucgacugaagucagccucacugaaccggaucugagaaucuucucucucugggcuugccagggcucuccgaaccuagcuagcauccucuucaauuccaacuagaaagcuuaccauguucguguuccuggugcugcugccccuggugagcagccagugcgugaaccugaccacccggacccagcugccaccagccuacaccaacagcuucacccggggcgucuacuaccccgacaagguguuccggagcagcguccugcacagcacccaggaccuguuccugcccuucuucagcaacgugaccugguuccacgccauccacgugagcggcaccaacggcaccaagcgguucgacaaccccgugcugcccuucaacgacggcguguacuucgccagcaccgagaagagcaacaucauccggggcuggaucuucggcaccacccuggacagcaagacccagagccugcugaucgugaauaacgccaccaacguggugaucaaggugugcgaguuccaguucugcaacgaccccuuccugggcguguacuaccacaagaacaacaagagcuggauggagagcgaguuccggguguacagcagcgccaacaacugcaccuucgaguacgugagccagcccuuccugauggaccuggagggcaagcagggcaacuucaagaaccugcgggaguucguguucaagaacaucgacggcuacuucaagaucuacagcaagcacaccccaaucaaccuggugcgggaucugccccagggcuucucagcccuggagccccugguggaccugcccaucggcaucaacaucacccgguuccagacccugcuggcccugcaccggagcuaccugaccccaggcgacagcagcagcggguggacagcaggcgcggcugcuuacuacgugggcuaccugcagccccggaccuuccugcugaaguacaacgagaacggcaccaucaccgacgccguggacugcgcccuggacccucugagcgagaccaagugcacccugaagagcuucaccguggagaagggcaucuaccagaccagcaacuuccgggugcagcccaccgagagcaucgugcgguuccccaacaucaccaaccugugccccuucggcgagguguucaacgccacccgguucgccagcguguacgccuggaaccggaagcggaucagcaacugcguggccgacuacagcgugcuguacaacagcgccagcuucagcaccuucaagugcuacggcgugagccccaccaagcugaacgaccugugcuucaccaacguguacgccgacagcuucgugauccguggcgacgaggugcggcagaucgcacccggccagacaggcaagaucgccgacuacaacuacaagcugcccgacgacuucaccggcugcgugaucgccuggaacagcaacaaccucgacagcaaggugggcggcaacuacaacuaccuguaccggcuguuccggaagagcaaccugaagcccuucgagcgggacaucagcaccgagaucuaccaagccggcaacaccccuugcaacggcguggagggcuucaacugcuacuucccucugcagagcuacggcuuccagcccaccaacggcgugggcuaccagcccuaccgggugguggugcugagcuucgagcugcugcacgccccagccaccguguguggccccaagaagagcaccaaccuggugaagaacaagugcgugaacuucaacuucaacggccuuaccggcaccggcgugcugaccgagagcaacaagaaauuccugcccuuucagcaguucggccgggacaucgccgacaccaccgacgcugugcgggauccccagacccuggagauccuggacaucaccccuugcagcuucggcggcgugagcgugaucaccccaggcaccaacaccagcaaccagguggccgugcuguaccagggcgugaacugcaccgaggugcccguggccauccacgccgaccagcugacacccaccuggcgggucuacagcaccggcagcaacguguuccagacccgggccgguugccugaucggcgccgagcacgugaacaacagcuacgagugcgacauccccaucggcgccggcaucugugccagcuaccagacccagaccaauucaccccggagggcaaggagcguggccagccagagcaucaucgccuacaccaugagccugggcgccgagaacagcguggccuacagcaacaacagcaucgccauccccaccaacuucaccaucagcgugaccaccgagauucugcccgugagcaugaccaagaccagcguggacugcaccauguacaucugcggcgacagcaccgagugcagcaaccugcugcugcaguacggcagcuucugcacccagcugaaccgggcccugaccggcaucgccguggagcaggacaagaacacccaggagguguucgcccaggugaagcagaucuacaagaccccucccaucaaggacuucggcggcuucaacuucagccagauccugcccgaccccagcaagcccagcaagcggagcuucaucgaggaccugcuguucaacaaggugacccuagccgacgccggcuucaucaagcaguacggcgacugccucggcgacauagccgcccgggaccugaucugcgcccagaaguucaacggccugaccgugcugccuccccugcugaccgacgagaugaucgcccaguacaccagcgcccuguuagccggaaccaucaccagcggcuggacuuucggcgcuggagccgcucugcagauccccuucgccaugcagauggccuaccgguucaacggcaucggcgugacccagaacgugcuguacgagaaccagaagcugaucgccaaccaguucaacagcgccaucggcaagauccaggacagccugagcagcaccgcuagcgcccugggcaagcugcaggacguggugaaccagaacgcccaggcccugaacacccuggugaagcagcugagcagcaacuucggcgccaucagcagcgugcugaacgacauccugagccggcuggacaaggucgaggccgaggugcagaucgaccggcugaucacuggccggcugcagagccugcagaccuacgugacccagcagcugauccgggccgccgagauucgggccagcgccaaccuggccgccaccaagaugagcgagugcgugcugggccagagcaagcggguggacuucugcggcaagggcuaccaccugaugagcuuuccccagagcgcaccccacggagugguguuccugcacgugaccuacgugcccgcccaggagaagaacuucaccaccgccccagccaucugccacgacggcaaggcccacuuuccccgggagggcguguucgugagcaacggcacccacugguucgugacccagcggaacuucuacgagccccagaucaucaccaccgacaacaccuucgugagcggcaacugcgacguggugaucggcaucgugaacaacaccguguacgauccccugcagcccgagcuggacagcuucaaggaggagcuggacaaguacuucaagaaucacaccagccccgacguggaccugggcgacaucagcggcaucaacgccagcguggugaacauccagaaggagaucgaucggcugaacgagguggccaagaaccugaacgagagccugaucgaccugcaggagcugggcaaguacgagcaguacaucaaguggcccugguacaucuggcugggcuucaucgccggccugaucgccaucgugauggugaccaucaugcugugcugcaugaccagcugcugcagcugccugaagggcuguugcagcugcggcagcugcugcaaguucgacgaggacgacagcgagcccgugcugaagggcgugaagcugcacuacaccugaggacuagucccuguucccagagcccacuuuuuuuucuuuuuuugaaauaaaauagccugucuuucagaucucaaaggcucuuuucagagccaccaaaaaaaaaaaaaaaaaaaaaaaaaaaaaaaaaaaaaaaaaaaaaaaaaaaaaaaaaaaaaaaaaaaaaaaaaaaaaaaaaaaaaaaaaaaaaaaaaaaaa

SEQ ID NO: 23670 - RNA, 4191 nt, Artificial Sequence
  SARS-CoV-2/Wuhan/WIV05/2019__EPI_ISL_402128 spike protein mRNA gc (1-1273)(N501Y_D614G)
aggagagggcgcuuggcuugcaaggacccugagcugcggcauugaagcacacccaacccaacucgacugaagucagccucacugaaccggaucugagaaucuucucucucugggcuugccagggcucuccgaaccuagcuagcauccucuucaauuccaacuagaaagcuuaccauguucguguuccuggugcugcugccccuggugagcagccagugcgugaaccugaccacccggacccagcugccaccagccuacaccaacagcuucacccggggcgucuacuaccccgacaagguguuccggagcagcguccugcacagcacccaggaccuguuccugcccuucuucagcaacgugaccugguuccacgccauccacgugagcggcaccaacggcaccaagcgguucgacaaccccgugcugcccuucaacgacggcguguacuucgccagcaccgagaagagcaacaucauccggggcuggaucuucggcaccacccuggacagcaagacccagagccugcugaucgugaauaacgccaccaacguggugaucaaggugugcgaguuccaguucugcaacgaccccuuccugggcguguacuaccacaagaacaacaagagcuggauggagagcgaguuccggguguacagcagcgccaacaacugcaccuucgaguacgugagccagcccuuccugauggaccuggagggcaagcagggcaacuucaagaaccugcgggaguucguguucaagaacaucgacggcuacuucaagaucuacagcaagcacaccccaaucaaccuggugcgggaucugccccagggcuucucagcccuggagccccugguggaccugcccaucggcaucaacaucacccgguuccagacccugcuggcccugcaccggagcuaccugaccccaggcgacagcagcagcggguggacagcaggcgcggcugcuuacuacgugggcuaccugcagccccggaccuuccugcugaaguacaacgagaacggcaccaucaccgacgccguggacugcgcccuggacccucugagcgagaccaagugcacccugaagagcuucaccguggagaagggcaucuaccagaccagcaacuuccgggugcagcccaccgagagcaucgugcgguuccccaacaucaccaaccugugccccuucggcgagguguucaacgccacccgguucgccagcguguacgccuggaaccggaagcggaucagcaacugcguggccgacuacagcgugcuguacaacagcgccagcuucagcaccuucaagugcuacggcgugagccccaccaagcugaacgaccugugcuucaccaacguguacgccgacagcuucgugauccguggcgacgaggugcggcagaucgcacccggccagacaggcaagaucgccgacuacaacuacaagcugcccgacgacuucaccggcugcgugaucgccuggaacagcaacaaccucgacagcaaggugggcggcaacuacaacuaccuguaccggcuguuccggaagagcaaccugaagcccuucgagcgggacaucagcaccgagaucuaccaagccggcuccaccccuugcaacggcguggagggcuucaacugcuacuucccucugcagagcuacggcuuccagcccaccuacggcgugggcuaccagcccuaccgggugguggugcugagcuucgagcugcugcacgccccagccaccguguguggccccaagaagagcaccaaccuggugaagaacaagugcgugaacuucaacuucaacggccuuaccggcaccggcgugcugaccgagagcaacaagaaauuccugcccuuucagcaguucggccgggacaucgccgacaccaccgacgcugugcgggauccccagacccuggagauccuggacaucaccccuugcagcuucggcggcgugagcgugaucaccccaggcaccaacaccagcaaccagguggccgugcuguaccagggcgugaacugcaccgaggugcccguggccauccacgccgaccagcugacacccaccuggcgggucuacagcaccggcagcaacguguuccagacccgggccgguugccugaucggcgccgagcacgugaacaacagcuacgagugcgacauccccaucggcgccggcaucugugccagcuaccagacccagaccaauucaccccggagggcaaggagcguggccagccagagcaucaucgccuacaccaugagccugggcgccgagaacagcguggccuacagcaacaacagcaucgccauccccaccaacuucaccaucagcgugaccaccgagauucugcccgugagcaugaccaagaccagcguggacugcaccauguacaucugcggcgacagcaccgagugcagcaaccugcugcugcaguacggcagcuucugcacccagcugaaccgggcccugaccggcaucgccguggagcaggacaagaacacccaggagguguucgcccaggugaagcagaucuacaagaccccucccaucaaggacuucggcggcuucaacuucagccagauccugcccgaccccagcaagcccagcaagcggagcuucaucgaggaccugcuguucaacaaggugacccuagccgacgccggcuucaucaagcaguacggcgacugccucggcgacauagccgcccgggaccugaucugcgcccagaaguucaacggccugaccgugcugccuccccugcugaccgacgagaugaucgcccaguacaccagcgcccuguuagccggaaccaucaccagcggcuggacuuucggcgcuggagccgcucugcagauccccuucgccaugcagauggccuaccgguucaacggcaucggcgugacccagaacgugcuguacgagaaccagaagcugaucgccaaccaguucaacagcgccaucggcaagauccaggacagccugagcagcaccgcuagcgcccugggcaagcugcaggacguggugaaccagaacgcccaggcccugaacacccuggugaagcagcugagcagcaacuucggcgccaucagcagcgugcugaacgacauccugagccggcuggacaaggucgaggccgaggugcagaucgaccggcugaucacuggccggcugcagagccugcagaccuacgugacccagcagcugauccgggccgccgagauucgggccagcgccaaccuggccgccaccaagaugagcgagugcgugcugggccagagcaagcggguggacuucugcggcaagggcuaccaccugaugagcuuuccccagagcgcaccccacggagugguguuccugcacgugaccuacgugcccgcccaggagaagaacuucaccaccgccccagccaucugccacgacggcaaggcccacuuuccccgggagggcguguucgugagcaacggcacccacugguucgugacccagcggaacuucuacgagccccagaucaucaccaccgacaacaccuucgugagcggcaacugcgacguggugaucggcaucgugaacaacaccguguacgauccccugcagcccgagcuggacagcuucaaggaggagcuggacaaguacuucaagaaucacaccagccccgacguggaccugggcgacaucagcggcaucaacgccagcguggugaacauccagaaggagaucgaucggcugaacgagguggccaagaaccugaacgagagccugaucgaccugcaggagcugggcaaguacgagcaguacaucaaguggcccugguacaucuggcugggcuucaucgccggccugaucgccaucgugauggugaccaucaugcugugcugcaugaccagcugcugcagcugccugaagggcuguugcagcugcggcagcugcugcaaguucgacgaggacgacagcgagcccgugcugaagggcgugaagcugcacuacaccugaggacuagucccuguucccagagcccacuuuuuuuucuuuuuuugaaauaaaauagccugucuuucagaucucaaaggcucuuuucagagccaccaaaaaaaaaaaaaaaaaaaaaaaaaaaaaaaaaaaaaaaaaaaaaaaaaaaaaaaaaaaaaaaaaaaaaaaaaaaaaaaaaaaaaaaaaaaaaaaaaaaaa

SEQ ID NO: 23671 - RNA, 4185 nt, Artificial Sequence
  SARS-CoV-2/Wuhan/WIV05/2019__EPI_ISL_402128 spike protein mRNA gc (1-1273)(H69del_V70del_D614G)
aggagagggcgcuuggcuugcaaggacccugagcugcggcauugaagcacacccaacccaacucgacugaagucagccucacugaaccggaucugagaaucuucucucucugggcuugccagggcucuccgaaccuagcuagcauccucuucaauuccaacuagaaagcuuaccauguucguguuccuggugcugcugccccuggugagcagccagugcgugaaccugaccacccggacccagcugccaccagccuacaccaacagcuucacccggggcgucuacuaccccgacaagguguuccggagcagcguccugcacagcacccaggaccuguuccugcccuucuucagcaacgugaccugguuccacgccaucagcggcaccaacggcaccaagcgguucgacaaccccgugcugcccuucaacgacggcguguacuucgccagcaccgagaagagcaacaucauccggggcuggaucuucggcaccacccuggacagcaagacccagagccugcugaucgugaauaacgccaccaacguggugaucaaggugugcgaguuccaguucugcaacgaccccuuccugggcguguacuaccacaagaacaacaagagcuggauggagagcgaguuccggguguacagcagcgccaacaacugcaccuucgaguacgugagccagcccuuccugauggaccuggagggcaagcagggcaacuucaagaaccugcgggaguucguguucaagaacaucgacggcuacuucaagaucuacagcaagcacaccccaaucaaccuggugcgggaucugccccagggcuucucagcccuggagccccugguggaccugcccaucggcaucaacaucacccgguuccagacccugcuggcccugcaccggagcuaccugaccccaggcgacagcagcagcggguggacagcaggcgcggcugcuuacuacgugggcuaccugcagccccggaccuuccugcugaaguacaacgagaacggcaccaucaccgacgccguggacugcgcccuggacccucugagcgagaccaagugcacccugaagagcuucaccguggagaagggcaucuaccagaccagcaacuuccgggugcagcccaccgagagcaucgugcgguuccccaacaucaccaaccugugccccuucggcgagguguucaacgccacccgguucgccagcguguacgccuggaaccggaagcggaucagcaacugcguggccgacuacagcgugcuguacaacagcgccagcuucagcaccuucaagugcuacggcgugagccccaccaagcugaacgaccugugcuucaccaacguguacgccgacagcuucgugauccguggcgacgaggugcggcagaucgcacccggccagacaggcaagaucgccgacuacaacuacaagcugcccgacgacuucaccggcugcgugaucgccuggaacagcaacaaccucgacagcaaggugggcggcaacuacaacuaccuguaccggcuguuccggaagagcaaccugaagcccuucgagcgggacaucagcaccgagaucuaccaagccggcuccaccccuugcaacggcguggagggcuucaacugcuacuucccucugcagagcuacggcuuccagcccaccaacggcgugggcuaccagcccuaccgggugguggugcugagcuucgagcugcugcacgccccagccaccguguguggccccaagaagagcaccaaccuggugaagaacaagugcgugaacuucaacuucaacggccuuaccggcaccggcgugcugaccgagagcaacaagaaauuccugcccuuucagcaguucggccgggacaucgccgacaccaccgacgcugugcgggauccccagacccuggagauccuggacaucaccccuugcagcuucggcggcgugagcgugaucaccccaggcaccaacaccagcaaccagguggccgugcuguaccagggcgugaacugcaccgaggugcccguggccauccacgccgaccagcugacacccaccuggcgggucuacagcaccggcagcaacguguuccagacccgggccgguugccugaucggcgccgagcacgugaacaacagcuacgagugcgacauccccaucggcgccggcaucugugccagcuaccagacccagaccaauucaccccggagggcaaggagcguggccagccagagcaucaucgccuacaccaugagccugggcgccgagaacagcguggccuacagcaacaacagcaucgccauccccaccaacuucaccaucagcgugaccaccgagauucugcccgugagcaugaccaagaccagcguggacugcaccauguacaucugcggcgacagcaccgagugcagcaaccugcugcugcaguacggcagcuucugcacccagcugaaccgggcccugaccggcaucgccguggagcaggacaagaacacccaggagguguucgcccaggugaagcagaucuacaagaccccucccaucaaggacuucggcggcuucaacuucagccagauccugcccgaccccagcaagcccagcaagcggagcuucaucgaggaccugcuguucaacaaggugacccuagccgacgccggcuucaucaagcaguacggcgacugccucggcgacauagccgcccgggaccugaucugcgcccagaaguucaacggccugaccgugcugccuccccugcugaccgacgagaugaucgcccaguacaccagcgcccuguuagccggaaccaucaccagcggcuggacuuucggcgcuggagccgcucugcagauccccuucgccaugcagauggccuaccgguucaacggcaucggcgugacccagaacgugcuguacgagaaccagaagcugaucgccaaccaguucaacagcgccaucggcaagauccaggacagccugagcagcaccgcuagcgcccugggcaagcugcaggacguggugaaccagaacgcccaggcccugaacacccuggugaagcagcugagcagcaacuucggcgccaucagcagcgugcugaacgacauccugagccggcuggacaaggucgaggccgaggugcagaucgaccggcugaucacuggccggcugcagagccugcagaccuacgugacccagcagcugauccgggccgccgagauucgggccagcgccaaccuggccgccaccaagaugagcgagugcgugcugggccagagcaagcggguggacuucugcggcaagggcuaccaccugaugagcuuuccccagagcgcaccccacggagugguguuccugcacgugaccuacgugcccgcccaggagaagaacuucaccaccgccccagccaucugccacgacggcaaggcccacuuuccccgggagggcguguucgugagcaacggcacccacugguucgugacccagcggaacuucuacgagccccagaucaucaccaccgacaacaccuucgugagcggcaacugcgacguggugaucggcaucgugaacaacaccguguacgauccccugcagcccgagcuggacagcuucaaggaggagcuggacaaguacuucaagaaucacaccagccccgacguggaccugggcgacaucagcggcaucaacgccagcguggugaacauccagaaggagaucgaucggcugaacgagguggccaagaaccugaacgagagccugaucgaccugcaggagcugggcaaguacgagcaguacaucaaguggcccugguacaucuggcugggcuucaucgccggccugaucgccaucgugauggugaccaucaugcugugcugcaugaccagcugcugcagcugccugaagggcuguugcagcugcggcagcugcugcaaguucgacgaggacgacagcgagcccgugcugaagggcgugaagcugcacuacaccugaggacuagucccuguucccagagcccacuuuuuuuucuuuuuuugaaauaaaauagccugucuuucagaucucaaaggcucuuuucagagccaccaaaaaaaaaaaaaaaaaaaaaaaaaaaaaaaaaaaaaaaaaaaaaaaaaaaaaaaaaaaaaaaaaaaaaaaaaaaaaaaaaaaaaaaaaaaaaaaaaaaaa

SEQ ID NO: 23672 - RNA, 4191 nt, Artificial Sequence
  SARS-CoV-2/Wuhan/WIV05/2019__EPI_ISL_402128 spike protein mRNA gc (1-1273)(Y453F_D614G)
aggagagggcgcuuggcuugcaaggacccugagcugcggcauugaagcacacccaacccaacucgacugaagucagccucacugaaccggaucugagaaucuucucucucugggcuugccagggcucuccgaaccuagcuagcauccucuucaauuccaacuagaaagcuuaccauguucguguuccuggugcugcugccccuggugagcagccagugcgugaaccugaccacccggacccagcugccaccagccuacaccaacagcuucacccggggcgucuacuaccccgacaagguguuccggagcagcguccugcacagcacccaggaccuguuccugcccuucuucagcaacgugaccugguuccacgccauccacgugagcggcaccaacggcaccaagcgguucgacaaccccgugcugcccuucaacgacggcguguacuucgccagcaccgagaagagcaacaucauccggggcuggaucuucggcaccacccuggacagcaagacccagagccugcugaucgugaauaacgccaccaacguggugaucaaggugugcgaguuccaguucugcaacgaccccuuccugggcguguacuaccacaagaacaacaagagcuggauggagagcgaguuccggguguacagcagcgccaacaacugcaccuucgaguacgugagccagcccuuccugauggaccuggagggcaagcagggcaacuucaagaaccugcgggaguucguguucaagaacaucgacggcuacuucaagaucuacagcaagcacaccccaaucaaccuggugcgggaucugccccagggcuucucagcccuggagccccugguggaccugcccaucggcaucaacaucacccgguuccagacccugcuggcccugcaccggagcuaccugaccccaggcgacagcagcagcggguggacagcaggcgcggcugcuuacuacgugggcuaccugcagccccggaccuuccugcugaaguacaacgagaacggcaccaucaccgacgccguggacugcgcccuggacccucugagcgagaccaagugcacccugaagagcuucaccguggagaagggcaucuaccagaccagcaacuuccgggugcagcccaccgagagcaucgugcgguuccccaacaucaccaaccugugccccuucggcgagguguucaacgccacccgguucgccagcguguacgccuggaaccggaagcggaucagcaacugcguggccgacuacagcgugcuguacaacagcgccagcuucagcaccuucaagugcuacggcgugagccccaccaagcugaacgaccugugcuucaccaacguguacgccgacagcuucgugauccguggcgacgaggugcggcagaucgcacccggccagacaggcaagaucgccgacuacaacuacaagcugcccgacgacuucaccggcugcgugaucgccuggaacagcaacaaccucgacagcaaggugggcggcaacuacaacuaccuguuccggcuguuccggaagagcaaccugaagcccuucgagcgggacaucagcaccgagaucuaccaagccggcuccaccccuugcaacggcguggagggcuucaacugcuacuucccucugcagagcuacggcuuccagcccaccaacggcgugggcuaccagcccuaccgggugguggugcugagcuucgagcugcugcacgccccagccaccguguguggccccaagaagagcaccaaccuggugaagaacaagugcgugaacuucaacuucaacggccuuaccggcaccggcgugcugaccgagagcaacaagaaauuccugcccuuucagcaguucggccgggacaucgccgacaccaccgacgcugugcgggauccccagacccuggagauccuggacaucaccccuugcagcuucggcggcgugagcgugaucaccccaggcaccaacaccagcaaccagguggccgugcuguaccagggcgugaacugcaccgaggugcccguggccauccacgccgaccagcugacacccaccuggcgggucuacagcaccggcagcaacguguuccagacccgggccgguugccugaucggcgccgagcacgugaacaacagcuacgagugcgacauccccaucggcgccggcaucugugccagcuaccagacccagaccaauucaccccggagggcaaggagcguggccagccagagcaucaucgccuacaccaugagccugggcgccgagaacagcguggccuacagcaacaacagcaucgccauccccaccaacuucaccaucagcgugaccaccgagauucugcccgugagcaugaccaagaccagcguggacugcaccauguacaucugcggcgacagcaccgagugcagcaaccugcugcugcaguacggcagcuucugcacccagcugaaccgggcccugaccggcaucgccguggagcaggacaagaacacccaggagguguucgcccaggugaagcagaucuacaagaccccucccaucaaggacuucggcggcuucaacuucagccagauccugcccgaccccagcaagcccagcaagcggagcuucaucgaggaccugcuguucaacaaggugacccuagccgacgccggcuucaucaagcaguacggcgacugccucggcgacauagccgcccgggaccugaucugcgcccagaaguucaacggccugaccgugcugccuccccugcugaccgacgagaugaucgcccaguacaccagcgcccuguuagccggaaccaucaccagcggcuggacuuucggcgcuggagccgcucugcagauccccuucgccaugcagauggccuaccgguucaacggcaucggcgugacccagaacgugcuguacgagaaccagaagcugaucgccaaccaguucaacagcgccaucggcaagauccaggacagccugagcagcaccgcuagcgcccugggcaagcugcaggacguggugaaccagaacgcccaggcccugaacacccuggugaagcagcugagcagcaacuucggcgccaucagcagcgugcugaacgacauccugagccggcuggacaaggucgaggccgaggugcagaucgaccggcugaucacuggccggcugcagagccugcagaccuacgugacccagcagcugauccgggccgccgagauucgggccagcgccaaccuggccgccaccaagaugagcgagugcgugcugggccagagcaagcggguggacuucugcggcaagggcuaccaccugaugagcuuuccccagagcgcaccccacggagugguguuccugcacgugaccuacgugcccgcccaggagaagaacuucaccaccgccccagccaucugccacgacggcaaggcccacuuuccccgggagggcguguucgugagcaacggcacccacugguucgugacccagcggaacuucuacgagccccagaucaucaccaccgacaacaccuucgugagcggcaacugcgacguggugaucggcaucgugaacaacaccguguacgauccccugcagcccgagcuggacagcuucaaggaggagcuggacaaguacuucaagaaucacaccagccccgacguggaccugggcgacaucagcggcaucaacgccagcguggugaacauccagaaggagaucgaucggcugaacgagguggccaagaaccugaacgagagccugaucgaccugcaggagcugggcaaguacgagcaguacaucaaguggcccugguacaucuggcugggcuucaucgccggccugaucgccaucgugauggugaccaucaugcugugcugcaugaccagcugcugcagcugccugaagggcuguugcagcugcggcagcugcugcaaguucgacgaggacgacagcgagcccgugcugaagggcgugaagcugcacuacaccugaggacuagucccuguucccagagcccacuuuuuuuucuuuuuuugaaauaaaauagccugucuuucagaucucaaaggcucuuuucagagccaccaaaaaaaaaaaaaaaaaaaaaaaaaaaaaaaaaaaaaaaaaaaaaaaaaaaaaaaaaaaaaaaaaaaaaaaaaaaaaaaaaaaaaaaaaaaaaaaaaaaaa

SEQ ID NO: 23673 - RNA, 4191 nt, Artificial Sequence
  SARS-CoV-2/Wuhan/WIV05/2019__EPI_ISL_402128 spike protein mRNA gc (1-1273)(D614G_I692V)
aggagagggcgcuuggcuugcaaggacccugagcugcggcauugaagcacacccaacccaacucgacugaagucagccucacugaaccggaucugagaaucuucucucucugggcuugccagggcucuccgaaccuagcuagcauccucuucaauuccaacuagaaagcuuaccauguucguguuccuggugcugcugccccuggugagcagccagugcgugaaccugaccacccggacccagcugccaccagccuacaccaacagcuucacccggggcgucuacuaccccgacaagguguuccggagcagcguccugcacagcacccaggaccuguuccugcccuucuucagcaacgugaccugguuccacgccauccacgugagcggcaccaacggcaccaagcgguucgacaaccccgugcugcccuucaacgacggcguguacuucgccagcaccgagaagagcaacaucauccggggcuggaucuucggcaccacccuggacagcaagacccagagccugcugaucgugaauaacgccaccaacguggugaucaaggugugcgaguuccaguucugcaacgaccccuuccugggcguguacuaccacaagaacaacaagagcuggauggagagcgaguuccggguguacagcagcgccaacaacugcaccuucgaguacgugagccagcccuuccugauggaccuggagggcaagcagggcaacuucaagaaccugcgggaguucguguucaagaacaucgacggcuacuucaagaucuacagcaagcacaccccaaucaaccuggugcgggaucugccccagggcuucucagcccuggagccccugguggaccugcccaucggcaucaacaucacccgguuccagacccugcuggcccugcaccggagcuaccugaccccaggcgacagcagcagcggguggacagcaggcgcggcugcuuacuacgugggcuaccugcagccccggaccuuccugcugaaguacaacgagaacggcaccaucaccgacgccguggacugcgcccuggacccucugagcgagaccaagugcacccugaagagcuucaccguggagaagggcaucuaccagaccagcaacuuccgggugcagcccaccgagagcaucgugcgguuccccaacaucaccaaccugugccccuucggcgagguguucaacgccacccgguucgccagcguguacgccuggaaccggaagcggaucagcaacugcguggccgacuacagcgugcuguacaacagcgccagcuucagcaccuucaagugcuacggcgugagccccaccaagcugaacgaccugugcuucaccaacguguacgccgacagcuucgugauccguggcgacgaggugcggcagaucgcacccggccagacaggcaagaucgccgacuacaacuacaagcugcccgacgacuucaccggcugcgugaucgccuggaacagcaacaaccucgacagcaaggugggcggcaacuacaacuaccuguaccggcuguuccggaagagcaaccugaagcccuucgagcgggacaucagcaccgagaucuaccaagccggcuccaccccuugcaacggcguggagggcuucaacugcuacuucccucugcagagcuacggcuuccagcccaccaacggcgugggcuaccagcccuaccgggugguggugcugagcuucgagcugcugcacgccccagccaccguguguggccccaagaagagcaccaaccuggugaagaacaagugcgugaacuucaacuucaacggccuuaccggcaccggcgugcugaccgagagcaacaagaaauuccugcccuuucagcaguucggccgggacaucgccgacaccaccgacgcugugcgggauccccagacccuggagauccuggacaucaccccuugcagcuucggcggcgugagcgugaucaccccaggcaccaacaccagcaaccagguggccgugcuguaccagggcgugaacugcaccgaggugcccguggccauccacgccgaccagcugacacccaccuggcgggucuacagcaccggcagcaacguguuccagacccgggccgguugccugaucggcgccgagcacgugaacaacagcuacgagugcgacauccccaucggcgccggcaucugugccagcuaccagacccagaccaauucaccccggagggcaaggagcguggccagccagagcgugaucgccuacaccaugagccugggcgccgagaacagcguggccuacagcaacaacagcaucgccauccccaccaacuucaccaucagcgugaccaccgagauucugcccgugagcaugaccaagaccagcguggacugcaccauguacaucugcggcgacagcaccgagugcagcaaccugcugcugcaguacggcagcuucugcacccagcugaaccgggcccugaccggcaucgccguggagcaggacaagaacacccaggagguguucgcccaggugaagcagaucuacaagaccccucccaucaaggacuucggcggcuucaacuucagccagauccugcccgaccccagcaagcccagcaagcggagcuucaucgaggaccugcuguucaacaaggugacccuagccgacgccggcuucaucaagcaguacggcgacugccucggcgacauagccgcccgggaccugaucugcgcccagaaguucaacggccugaccgugcugccuccccugcugaccgacgagaugaucgcccaguacaccagcgcccuguuagccggaaccaucaccagcggcuggacuuucggcgcuggagccgcucugcagauccccuucgccaugcagauggccuaccgguucaacggcaucggcgugacccagaacgugcuguacgagaaccagaagcugaucgccaaccaguucaacagcgccaucggcaagauccaggacagccugagcagcaccgcuagcgcccugggcaagcugcaggacguggugaaccagaacgcccaggcccugaacacccuggugaagcagcugagcagcaacuucggcgccaucagcagcgugcugaacgacauccugagccggcuggacaaggucgaggccgaggugcagaucgaccggcugaucacuggccggcugcagagccugcagaccuacgugacccagcagcugauccgggccgccgagauucgggccagcgccaaccuggccgccaccaagaugagcgagugcgugcugggccagagcaagcggguggacuucugcggcaagggcuaccaccugaugagcuuuccccagagcgcaccccacggagugguguuccugcacgugaccuacgugcccgcccaggagaagaacuucaccaccgccccagccaucugccacgacggcaaggcccacuuuccccgggagggcguguucgugagcaacggcacccacugguucgugacccagcggaacuucuacgagccccagaucaucaccaccgacaacaccuucgugagcggcaacugcgacguggugaucggcaucgugaacaacaccguguacgauccccugcagcccgagcuggacagcuucaaggaggagcuggacaaguacuucaagaaucacaccagccccgacguggaccugggcgacaucagcggcaucaacgccagcguggugaacauccagaaggagaucgaucggcugaacgagguggccaagaaccugaacgagagccugaucgaccugcaggagcugggcaaguacgagcaguacaucaaguggcccugguacaucuggcugggcuucaucgccggccugaucgccaucgugauggugaccaucaugcugugcugcaugaccagcugcugcagcugccugaagggcuguugcagcugcggcagcugcugcaaguucgacgaggacgacagcgagcccgugcugaagggcgugaagcugcacuacaccugaggacuagucccuguucccagagcccacuuuuuuuucuuuuuuugaaauaaaauagccugucuuucagaucucaaaggcucuuuucagagccaccaaaaaaaaaaaaaaaaaaaaaaaaaaaaaaaaaaaaaaaaaaaaaaaaaaaaaaaaaaaaaaaaaaaaaaaaaaaaaaaaaaaaaaaaaaaaaaaaaaaaa

SEQ ID NO: 23674 - RNA, 4191 nt, Artificial Sequence
  SARS-CoV-2/Wuhan/WIV05/2019__EPI_ISL_402128 spike protein mRNA gc (1-1273)(D614G_M1229I)
aggagagggcgcuuggcuugcaaggacccugagcugcggcauugaagcacacccaacccaacucgacugaagucagccucacugaaccggaucugagaaucuucucucucugggcuugccagggcucuccgaaccuagcuagcauccucuucaauuccaacuagaaagcuuaccauguucguguuccuggugcugcugccccuggugagcagccagugcgugaaccugaccacccggacccagcugccaccagccuacaccaacagcuucacccggggcgucuacuaccccgacaagguguuccggagcagcguccugcacagcacccaggaccuguuccugcccuucuucagcaacgugaccugguuccacgccauccacgugagcggcaccaacggcaccaagcgguucgacaaccccgugcugcccuucaacgacggcguguacuucgccagcaccgagaagagcaacaucauccggggcuggaucuucggcaccacccuggacagcaagacccagagccugcugaucgugaauaacgccaccaacguggugaucaaggugugcgaguuccaguucugcaacgaccccuuccugggcguguacuaccacaagaacaacaagagcuggauggagagcgaguuccggguguacagcagcgccaacaacugcaccuucgaguacgugagccagcccuuccugauggaccuggagggcaagcagggcaacuucaagaaccugcgggaguucguguucaagaacaucgacggcuacuucaagaucuacagcaagcacaccccaaucaaccuggugcgggaucugccccagggcuucucagcccuggagccccugguggaccugcccaucggcaucaacaucacccgguuccagacccugcuggcccugcaccggagcuaccugaccccaggcgacagcagcagcggguggacagcaggcgcggcugcuuacuacgugggcuaccugcagccccggaccuuccugcugaaguacaacgagaacggcaccaucaccgacgccguggacugcgcccuggacccucugagcgagaccaagugcacccugaagagcuucaccguggagaagggcaucuaccagaccagcaacuuccgggugcagcccaccgagagcaucgugcgguuccccaacaucaccaaccugugccccuucggcgagguguucaacgccacccgguucgccagcguguacgccuggaaccggaagcggaucagcaacugcguggccgacuacagcgugcuguacaacagcgccagcuucagcaccuucaagugcuacggcgugagccccaccaagcugaacgaccugugcuucaccaacguguacgccgacagcuucgugauccguggcgacgaggugcggcagaucgcacccggccagacaggcaagaucgccgacuacaacuacaagcugcccgacgacuucaccggcugcgugaucgccuggaacagcaacaaccucgacagcaaggugggcggcaacuacaacuaccuguaccggcuguuccggaagagcaaccugaagcccuucgagcgggacaucagcaccgagaucuaccaagccggcuccaccccuugcaacggcguggagggcuucaacugcuacuucccucugcagagcuacggcuuccagcccaccaacggcgugggcuaccagcccuaccgggugguggugcugagcuucgagcugcugcacgccccagccaccguguguggccccaagaagagcaccaaccuggugaagaacaagugcgugaacuucaacuucaacggccuuaccggcaccggcgugcugaccgagagcaacaagaaauuccugcccuuucagcaguucggccgggacaucgccgacaccaccgacgcugugcgggauccccagacccuggagauccuggacaucaccccuugcagcuucggcggcgugagcgugaucaccccaggcaccaacaccagcaaccagguggccgugcuguaccagggcgugaacugcaccgaggugcccguggccauccacgccgaccagcugacacccaccuggcgggucuacagcaccggcagcaacguguuccagacccgggccgguugccugaucggcgccgagcacgugaacaacagcuacgagugcgacauccccaucggcgccggcaucugugccagcuaccagacccagaccaauucaccccggagggcaaggagcguggccagccagagcaucaucgccuacaccaugagccugggcgccgagaacagcguggccuacagcaacaacagcaucgccauccccaccaacuucaccaucagcgugaccaccgagauucugcccgugagcaugaccaagaccagcguggacugcaccauguacaucugcggcgacagcaccgagugcagcaaccugcugcugcaguacggcagcuucugcacccagcugaaccgggcccugaccggcaucgccguggagcaggacaagaacacccaggagguguucgcccaggugaagcagaucuacaagaccccucccaucaaggacuucggcggcuucaacuucagccagauccugcccgaccccagcaagcccagcaagcggagcuucaucgaggaccugcuguucaacaaggugacccuagccgacgccggcuucaucaagcaguacggcgacugccucggcgacauagccgcccgggaccugaucugcgcccagaaguucaacggccugaccgugcugccuccccugcugaccgacgagaugaucgcccaguacaccagcgcccuguuagccggaaccaucaccagcggcuggacuuucggcgcuggagccgcucugcagauccccuucgccaugcagauggccuaccgguucaacggcaucggcgugacccagaacgugcuguacgagaaccagaagcugaucgccaaccaguucaacagcgccaucggcaagauccaggacagccugagcagcaccgcuagcgcccugggcaagcugcaggacguggugaaccagaacgcccaggcccugaacacccuggugaagcagcugagcagcaacuucggcgccaucagcagcgugcugaacgacauccugagccggcuggacaaggucgaggccgaggugcagaucgaccggcugaucacuggccggcugcagagccugcagaccuacgugacccagcagcugauccgggccgccgagauucgggccagcgccaaccuggccgccaccaagaugagcgagugcgugcugggccagagcaagcggguggacuucugcggcaagggcuaccaccugaugagcuuuccccagagcgcaccccacggagugguguuccugcacgugaccuacgugcccgcccaggagaagaacuucaccaccgccccagccaucugccacgacggcaaggcccacuuuccccgggagggcguguucgugagcaacggcacccacugguucgugacccagcggaacuucuacgagccccagaucaucaccaccgacaacaccuucgugagcggcaacugcgacguggugaucggcaucgugaacaacaccguguacgauccccugcagcccgagcuggacagcuucaaggaggagcuggacaaguacuucaagaaucacaccagccccgacguggaccugggcgacaucagcggcaucaacgccagcguggugaacauccagaaggagaucgaucggcugaacgagguggccaagaaccugaacgagagccugaucgaccugcaggagcugggcaaguacgagcaguacaucaaguggcccugguacaucuggcugggcuucaucgccggccugaucgccaucgugaucgugaccaucaugcugugcugcaugaccagcugcugcagcugccugaagggcuguugcagcugcggcagcugcugcaaguucgacgaggacgacagcgagcccgugcugaagggcgugaagcugcacuacaccugaggacuagucccuguucccagagcccacuuuuuuuucuuuuuuugaaauaaaauagccugucuuucagaucucaaaggcucuuuucagagccaccaaaaaaaaaaaaaaaaaaaaaaaaaaaaaaaaaaaaaaaaaaaaaaaaaaaaaaaaaaaaaaaaaaaaaaaaaaaaaaaaaaaaaaaaaaaaaaaaaaaaa

SEQ ID NO: 23675 - RNA, 4185 nt, Artificial Sequence
  SARS-CoV-2/Wuhan/WIV05/2019__EPI_ISL_402128 spike protein mRNA gc (1-1273)(H69del_V70del_A222V_Y453F_S477N_D614G_I692V)
aggagagggcgcuuggcuugcaaggacccugagcugcggcauugaagcacacccaacccaacucgacugaagucagccucacugaaccggaucugagaaucuucucucucugggcuugccagggcucuccgaaccuagcuagcauccucuucaauuccaacuagaaagcuuaccauguucguguuccuggugcugcugccccuggugagcagccagugcgugaaccugaccacccggacccagcugccaccagccuacaccaacagcuucacccggggcgucuacuaccccgacaagguguuccggagcagcguccugcacagcacccaggaccuguuccugcccuucuucagcaacgugaccugguuccacgccaucagcggcaccaacggcaccaagcgguucgacaaccccgugcugcccuucaacgacggcguguacuucgccagcaccgagaagagcaacaucauccggggcuggaucuucggcaccacccuggacagcaagacccagagccugcugaucgugaauaacgccaccaacguggugaucaaggugugcgaguuccaguucugcaacgaccccuuccugggcguguacuaccacaagaacaacaagagcuggauggagagcgaguuccggguguacagcagcgccaacaacugcaccuucgaguacgugagccagcccuuccugauggaccuggagggcaagcagggcaacuucaagaaccugcgggaguucguguucaagaacaucgacggcuacuucaagaucuacagcaagcacaccccaaucaaccuggugcgggaucugccccagggcuucucagugcuggagccccugguggaccugcccaucggcaucaacaucacccgguuccagacccugcuggcccugcaccggagcuaccugaccccaggcgacagcagcagcggguggacagcaggcgcggcugcuuacuacgugggcuaccugcagccccggaccuuccugcugaaguacaacgagaacggcaccaucaccgacgccguggacugcgcccuggacccucugagcgagaccaagugcacccugaagagcuucaccguggagaagggcaucuaccagaccagcaacuuccgggugcagcccaccgagagcaucgugcgguuccccaacaucaccaaccugugccccuucggcgagguguucaacgccacccgguucgccagcguguacgccuggaaccggaagcggaucagcaacugcguggccgacuacagcgugcuguacaacagcgccagcuucagcaccuucaagugcuacggcgugagccccaccaagcugaacgaccugugcuucaccaacguguacgccgacagcuucgugauccguggcgacgaggugcggcagaucgcacccggccagacaggcaagaucgccgacuacaacuacaagcugcccgacgacuucaccggcugcgugaucgccuggaacagcaacaaccucgacagcaaggugggcggcaacuacaacuaccuguuccggcuguuccggaagagcaaccugaagcccuucgagcgggacaucagcaccgagaucuaccaagccggcaacaccccuugcaacggcguggagggcuucaacugcuacuucccucugcagagcuacggcuuccagcccaccaacggcgugggcuaccagcccuaccgggugguggugcugagcuucgagcugcugcacgccccagccaccguguguggccccaagaagagcaccaaccuggugaagaacaagugcgugaacuucaacuucaacggccuuaccggcaccggcgugcugaccgagagcaacaagaaauuccugcccuuucagcaguucggccgggacaucgccgacaccaccgacgcugugcgggauccccagacccuggagauccuggacaucaccccuugcagcuucggcggcgugagcgugaucaccccaggcaccaacaccagcaaccagguggccgugcuguaccagggcgugaacugcaccgaggugcccguggccauccacgccgaccagcugacacccaccuggcgggucuacagcaccggcagcaacguguuccagacccgggccgguugccugaucggcgccgagcacgugaacaacagcuacgagugcgacauccccaucggcgccggcaucugugccagcuaccagacccagaccaauucaccccggagggcaaggagcguggccagccagagcgugaucgccuacaccaugagccugggcgccgagaacagcguggccuacagcaacaacagcaucgccauccccaccaacuucaccaucagcgugaccaccgagauucugcccgugagcaugaccaagaccagcguggacugcaccauguacaucugcggcgacagcaccgagugcagcaaccugcugcugcaguacggcagcuucugcacccagcugaaccgggcccugaccggcaucgccguggagcaggacaagaacacccaggagguguucgcccaggugaagcagaucuacaagaccccucccaucaaggacuucggcggcuucaacuucagccagauccugcccgaccccagcaagcccagcaagcggagcuucaucgaggaccugcuguucaacaaggugacccuagccgacgccggcuucaucaagcaguacggcgacugccucggcgacauagccgcccgggaccugaucugcgcccagaaguucaacggccugaccgugcugccuccccugcugaccgacgagaugaucgcccaguacaccagcgcccuguuagccggaaccaucaccagcggcuggacuuucggcgcuggagccgcucugcagauccccuucgccaugcagauggccuaccgguucaacggcaucggcgugacccagaacgugcuguacgagaaccagaagcugaucgccaaccaguucaacagcgccaucggcaagauccaggacagccugagcagcaccgcuagcgcccugggcaagcugcaggacguggugaaccagaacgcccaggcccugaacacccuggugaagcagcugagcagcaacuucggcgccaucagcagcgugcugaacgacauccugagccggcuggacaaggucgaggccgaggugcagaucgaccggcugaucacuggccggcugcagagccugcagaccuacgugacccagcagcugauccgggccgccgagauucgggccagcgccaaccuggccgccaccaagaugagcgagugcgugcugggccagagcaagcggguggacuucugcggcaagggcuaccaccugaugagcuuuccccagagcgcaccccacggagugguguuccugcacgugaccuacgugcccgcccaggagaagaacuucaccaccgccccagccaucugccacgacggcaaggcccacuuuccccgggagggcguguucgugagcaacggcacccacugguucgugacccagcggaacuucuacgagccccagaucaucaccaccgacaacaccuucgugagcggcaacugcgacguggugaucggcaucgugaacaacaccguguacgauccccugcagcccgagcuggacagcuucaaggaggagcuggacaaguacuucaagaaucacaccagccccgacguggaccugggcgacaucagcggcaucaacgccagcguggugaacauccagaaggagaucgaucggcugaacgagguggccaagaaccugaacgagagccugaucgaccugcaggagcugggcaaguacgagcaguacaucaaguggcccugguacaucuggcugggcuucaucgccggccugaucgccaucgugauggugaccaucaugcugugcugcaugaccagcugcugcagcugccugaagggcuguugcagcugcggcagcugcugcaaguucgacgaggacgacagcgagcccgugcugaagggcgugaagcugcacuacaccugaggacuagucccuguucccagagcccacuuuuuuuucuuuuuuugaaauaaaauagccugucuuucagaucucaaaggcucuuuucagagccaccaaaaaaaaaaaaaaaaaaaaaaaaaaaaaaaaaaaaaaaaaaaaaaaaaaaaaaaaaaaaaaaaaaaaaaaaaaaaaaaaaaaaaaaaaaaaaaaaaaaaa

SEQ ID NO: 23676 - RNA, 4185 nt, Artificial Sequence
  SARS-CoV-2/Wuhan/WIV05/2019__EPI_ISL_402128 spike protein mRNA gc (1-1273)(H69del_V70del_Y453F_D614G_I692V_M1229I)
aggagagggcgcuuggcuugcaaggacccugagcugcggcauugaagcacacccaacccaacucgacugaagucagccucacugaaccggaucugagaaucuucucucucugggcuugccagggcucuccgaaccuagcuagcauccucuucaauuccaacuagaaagcuuaccauguucguguuccuggugcugcugccccuggugagcagccagugcgugaaccugaccacccggacccagcugccaccagccuacaccaacagcuucacccggggcgucuacuaccccgacaagguguuccggagcagcguccugcacagcacccaggaccuguuccugcccuucuucagcaacgugaccugguuccacgccaucagcggcaccaacggcaccaagcgguucgacaaccccgugcugcccuucaacgacggcguguacuucgccagcaccgagaagagcaacaucauccggggcuggaucuucggcaccacccuggacagcaagacccagagccugcugaucgugaauaacgccaccaacguggugaucaaggugugcgaguuccaguucugcaacgaccccuuccugggcguguacuaccacaagaacaacaagagcuggauggagagcgaguuccggguguacagcagcgccaacaacugcaccuucgaguacgugagccagcccuuccugauggaccuggagggcaagcagggcaacuucaagaaccugcgggaguucguguucaagaacaucgacggcuacuucaagaucuacagcaagcacaccccaaucaaccuggugcgggaucugccccagggcuucucagcccuggagccccugguggaccugcccaucggcaucaacaucacccgguuccagacccugcuggcccugcaccggagcuaccugaccccaggcgacagcagcagcggguggacagcaggcgcggcugcuuacuacgugggcuaccugcagccccggaccuuccugcugaaguacaacgagaacggcaccaucaccgacgccguggacugcgcccuggacccucugagcgagaccaagugcacccugaagagcuucaccguggagaagggcaucuaccagaccagcaacuuccgggugcagcccaccgagagcaucgugcgguuccccaacaucaccaaccugugccccuucggcgagguguucaacgccacccgguucgccagcguguacgccuggaaccggaagcggaucagcaacugcguggccgacuacagcgugcuguacaacagcgccagcuucagcaccuucaagugcuacggcgugagccccaccaagcugaacgaccugugcuucaccaacguguacgccgacagcuucgugauccguggcgacgaggugcggcagaucgcacccggccagacaggcaagaucgccgacuacaacuacaagcugcccgacgacuucaccggcugcgugaucgccuggaacagcaacaaccucgacagcaaggugggcggcaacuacaacuaccuguuccggcuguuccggaagagcaaccugaagcccuucgagcgggacaucagcaccgagaucuaccaagccggcuccaccccuugcaacggcguggagggcuucaacugcuacuucccucugcagagcuacggcuuccagcccaccaacggcgugggcuaccagcccuaccgggugguggugcugagcuucgagcugcugcacgccccagccaccguguguggccccaagaagagcaccaaccuggugaagaacaagugcgugaacuucaacuucaacggccuuaccggcaccggcgugcugaccgagagcaacaagaaauuccugcccuuucagcaguucggccgggacaucgccgacaccaccgacgcugugcgggauccccagacccuggagauccuggacaucaccccuugcagcuucggcggcgugagcgugaucaccccaggcaccaacaccagcaaccagguggccgugcuguaccagggcgugaacugcaccgaggugcccguggccauccacgccgaccagcugacacccaccuggcgggucuacagcaccggcagcaacguguuccagacccgggccgguugccugaucggcgccgagcacgugaacaacagcuacgagugcgacauccccaucggcgccggcaucugugccagcuaccagacccagaccaauucaccccggagggcaaggagcguggccagccagagcgugaucgccuacaccaugagccugggcgccgagaacagcguggccuacagcaacaacagcaucgccauccccaccaacuucaccaucagcgugaccaccgagauucugcccgugagcaugaccaagaccagcguggacugcaccauguacaucugcggcgacagcaccgagugcagcaaccugcugcugcaguacggcagcuucugcacccagcugaaccgggcccugaccggcaucgccguggagcaggacaagaacacccaggagguguucgcccaggugaagcagaucuacaagaccccucccaucaaggacuucggcggcuucaacuucagccagauccugcccgaccccagcaagcccagcaagcggagcuucaucgaggaccugcuguucaacaaggugacccuagccgacgccggcuucaucaagcaguacggcgacugccucggcgacauagccgcccgggaccugaucugcgcccagaaguucaacggccugaccgugcugccuccccugcugaccgacgagaugaucgcccaguacaccagcgcccuguuagccggaaccaucaccagcggcuggacuuucggcgcuggagccgcucugcagauccccuucgccaugcagauggccuaccgguucaacggcaucggcgugacccagaacgugcuguacgagaaccagaagcugaucgccaaccaguucaacagcgccaucggcaagauccaggacagccugagcagcaccgcuagcgcccugggcaagcugcaggacguggugaaccagaacgcccaggcccugaacacccuggugaagcagcugagcagcaacuucggcgccaucagcagcgugcugaacgacauccugagccggcuggacaaggucgaggccgaggugcagaucgaccggcugaucacuggccggcugcagagccugcagaccuacgugacccagcagcugauccgggccgccgagauucgggccagcgccaaccuggccgccaccaagaugagcgagugcgugcugggccagagcaagcggguggacuucugcggcaagggcuaccaccugaugagcuuuccccagagcgcaccccacggagugguguuccugcacgugaccuacgugcccgcccaggagaagaacuucaccaccgccccagccaucugccacgacggcaaggcccacuuuccccgggagggcguguucgugagcaacggcacccacugguucgugacccagcggaacuucuacgagccccagaucaucaccaccgacaacaccuucgugagcggcaacugcgacguggugaucggcaucgugaacaacaccguguacgauccccugcagcccgagcuggacagcuucaaggaggagcuggacaaguacuucaagaaucacaccagccccgacguggaccugggcgacaucagcggcaucaacgccagcguggugaacauccagaaggagaucgaucggcugaacgagguggccaagaaccugaacgagagccugaucgaccugcaggagcugggcaaguacgagcaguacaucaaguggcccugguacaucuggcugggcuucaucgccggccugaucgccaucgugaucgugaccaucaugcugugcugcaugaccagcugcugcagcugccugaagggcuguugcagcugcggcagcugcugcaaguucgacgaggacgacagcgagcccgugcugaagggcgugaagcugcacuacaccugaggacuagucccuguucccagagcccacuuuuuuuucuuuuuuugaaauaaaauagccugucuuucagaucucaaaggcucuuuucagagccaccaaaaaaaaaaaaaaaaaaaaaaaaaaaaaaaaaaaaaaaaaaaaaaaaaaaaaaaaaaaaaaaaaaaaaaaaaaaaaaaaaaaaaaaaaaaaaaaaaaaaa

SEQ ID NO: 23677 - RNA, 4182 nt, Artificial Sequence
  SARS-CoV-2/Wuhan/WIV05/2019__EPI_ISL_402128 spike protein mRNA gc (1-1273)(H69del_V70del_Y144del_N501Y_A570D_D614G_P681H_T716I_S982 A_D1118H)
aggagagggcgcuuggcuugcaaggacccugagcugcggcauugaagcacacccaacccaacucgacugaagucagccucacugaaccggaucugagaaucuucucucucugggcuugccagggcucuccgaaccuagcuagcauccucuucaauuccaacuagaaagcuuaccauguucguguuccuggugcugcugccccuggugagcagccagugcgugaaccugaccacccggacccagcugccaccagccuacaccaacagcuucacccggggcgucuacuaccccgacaagguguuccggagcagcguccugcacagcacccaggaccuguuccugcccuucuucagcaacgugaccugguuccacgccaucagcggcaccaacggcaccaagcgguucgacaaccccgugcugcccuucaacgacggcguguacuucgccagcaccgagaagagcaacaucauccggggcuggaucuucggcaccacccuggacagcaagacccagagccugcugaucgugaauaacgccaccaacguggugaucaaggugugcgaguuccaguucugcaacgaccccuuccugggcguguaccacaagaacaacaagagcuggauggagagcgaguuccggguguacagcagcgccaacaacugcaccuucgaguacgugagccagcccuuccugauggaccuggagggcaagcagggcaacuucaagaaccugcgggaguucguguucaagaacaucgacggcuacuucaagaucuacagcaagcacaccccaaucaaccuggugcgggaucugccccagggcuucucagcccuggagccccugguggaccugcccaucggcaucaacaucacccgguuccagacccugcuggcccugcaccggagcuaccugaccccaggcgacagcagcagcggguggacagcaggcgcggcugcuuacuacgugggcuaccugcagccccggaccuuccugcugaaguacaacgagaacggcaccaucaccgacgccguggacugcgcccuggacccucugagcgagaccaagugcacccugaagagcuucaccguggagaagggcaucuaccagaccagcaacuuccgggugcagcccaccgagagcaucgugcgguuccccaacaucaccaaccugugccccuucggcgagguguucaacgccacccgguucgccagcguguacgccuggaaccggaagcggaucagcaacugcguggccgacuacagcgugcuguacaacagcgccagcuucagcaccuucaagugcuacggcgugagccccaccaagcugaacgaccugugcuucaccaacguguacgccgacagcuucgugauccguggcgacgaggugcggcagaucgcacccggccagacaggcaagaucgccgacuacaacuacaagcugcccgacgacuucaccggcugcgugaucgccuggaacagcaacaaccucgacagcaaggugggcggcaacuacaacuaccuguaccggcuguuccggaagagcaaccugaagcccuucgagcgggacaucagcaccgagaucuaccaagccggcuccaccccuugcaacggcguggagggcuucaacugcuacuucccucugcagagcuacggcuuccagcccaccuacggcgugggcuaccagcccuaccgggugguggugcugagcuucgagcugcugcacgccccagccaccguguguggccccaagaagagcaccaaccuggugaagaacaagugcgugaacuucaacuucaacggccuuaccggcaccggcgugcugaccgagagcaacaagaaauuccugcccuuucagcaguucggccgggacaucgacgacaccaccgacgcugugcgggauccccagacccuggagauccuggacaucaccccuugcagcuucggcggcgugagcgugaucaccccaggcaccaacaccagcaaccagguggccgugcuguaccagggcgugaacugcaccgaggugcccguggccauccacgccgaccagcugacacccaccuggcgggucuacagcaccggcagcaacguguuccagacccgggccgguugccugaucggcgccgagcacgugaacaacagcuacgagugcgacauccccaucggcgccggcaucugugccagcuaccagacccagaccaauucacaccggagggcaaggagcguggccagccagagcaucaucgccuacaccaugagccugggcgccgagaacagcguggccuacagcaacaacagcaucgccauccccaucaacuucaccaucagcgugaccaccgagauucugcccgugagcaugaccaagaccagcguggacugcaccauguacaucugcggcgacagcaccgagugcagcaaccugcugcugcaguacggcagcuucugcacccagcugaaccgggcccugaccggcaucgccguggagcaggacaagaacacccaggagguguucgcccaggugaagcagaucuacaagaccccucccaucaaggacuucggcggcuucaacuucagccagauccugcccgaccccagcaagcccagcaagcggagcuucaucgaggaccugcuguucaacaaggugacccuagccgacgccggcuucaucaagcaguacggcgacugccucggcgacauagccgcccgggaccugaucugcgcccagaaguucaacggccugaccgugcugccuccccugcugaccgacgagaugaucgcccaguacaccagcgcccuguuagccggaaccaucaccagcggcuggacuuucggcgcuggagccgcucugcagauccccuucgccaugcagauggccuaccgguucaacggcaucggcgugacccagaacgugcuguacgagaaccagaagcugaucgccaaccaguucaacagcgccaucggcaagauccaggacagccugagcagcaccgcuagcgcccugggcaagcugcaggacguggugaaccagaacgcccaggcccugaacacccuggugaagcagcugagcagcaacuucggcgccaucagcagcgugcugaacgacauccuggcccggcuggacaaggucgaggccgaggugcagaucgaccggcugaucacuggccggcugcagagccugcagaccuacgugacccagcagcugauccgggccgccgagauucgggccagcgccaaccuggccgccaccaagaugagcgagugcgugcugggccagagcaagcggguggacuucugcggcaagggcuaccaccugaugagcuuuccccagagcgcaccccacggagugguguuccugcacgugaccuacgugcccgcccaggagaagaacuucaccaccgccccagccaucugccacgacggcaaggcccacuuuccccgggagggcguguucgugagcaacggcacccacugguucgugacccagcggaacuucuacgagccccagaucaucaccacccacaacaccuucgugagcggcaacugcgacguggugaucggcaucgugaacaacaccguguacgauccccugcagcccgagcuggacagcuucaaggaggagcuggacaaguacuucaagaaucacaccagccccgacguggaccugggcgacaucagcggcaucaacgccagcguggugaacauccagaaggagaucgaucggcugaacgagguggccaagaaccugaacgagagccugaucgaccugcaggagcugggcaaguacgagcaguacaucaaguggcccugguacaucuggcugggcuucaucgccggccugaucgccaucgugauggugaccaucaugcugugcugcaugaccagcugcugcagcugccugaagggcuguugcagcugcggcagcugcugcaaguucgacgaggacgacagcgagcccgugcugaagggcgugaagcugcacuacaccugaggacuagucccuguucccagagcccacuuuuuuuucuuuuuuugaaauaaaauagccugucuuucagaucucaaaggcucuuuucagagccaccaaaaaaaaaaaaaaaaaaaaaaaaaaaaaaaaaaaaaaaaaaaaaaaaaaaaaaaaaaaaaaaaaaaaaaaaaaaaaaaaaaaaaaaaaaaaaaaaaaaaa

SEQ ID NO: 23678 - RNA, 4191 nt, Artificial Sequence
  SARS-CoV-2/Wuhan/WIV05/2019__EPI_ISL_402128 spike protein mRNA gc (1-1273)(K417N_E484K_N501Y_D614G)
aggagagggcgcuuggcuugcaaggacccugagcugcggcauugaagcacacccaacccaacucgacugaagucagccucacugaaccggaucugagaaucuucucucucugggcuugccagggcucuccgaaccuagcuagcauccucuucaauuccaacuagaaagcuuaccauguucguguuccuggugcugcugccccuggugagcagccagugcgugaaccugaccacccggacccagcugccaccagccuacaccaacagcuucacccggggcgucuacuaccccgacaagguguuccggagcagcguccugcacagcacccaggaccuguuccugcccuucuucagcaacgugaccugguuccacgccauccacgugagcggcaccaacggcaccaagcgguucgacaaccccgugcugcccuucaacgacggcguguacuucgccagcaccgagaagagcaacaucauccggggcuggaucuucggcaccacccuggacagcaagacccagagccugcugaucgugaauaacgccaccaacguggugaucaaggugugcgaguuccaguucugcaacgaccccuuccugggcguguacuaccacaagaacaacaagagcuggauggagagcgaguuccggguguacagcagcgccaacaacugcaccuucgaguacgugagccagcccuuccugauggaccuggagggcaagcagggcaacuucaagaaccugcgggaguucguguucaagaacaucgacggcuacuucaagaucuacagcaagcacaccccaaucaaccuggugcgggaucugccccagggcuucucagcccuggagccccugguggaccugcccaucggcaucaacaucacccgguuccagacccugcuggcccugcaccggagcuaccugaccccaggcgacagcagcagcggguggacagcaggcgcggcugcuuacuacgugggcuaccugcagccccggaccuuccugcugaaguacaacgagaacggcaccaucaccgacgccguggacugcgcccuggacccucugagcgagaccaagugcacccugaagagcuucaccguggagaagggcaucuaccagaccagcaacuuccgggugcagcccaccgagagcaucgugcgguuccccaacaucaccaaccugugccccuucggcgagguguucaacgccacccgguucgccagcguguacgccuggaaccggaagcggaucagcaacugcguggccgacuacagcgugcuguacaacagcgccagcuucagcaccuucaagugcuacggcgugagccccaccaagcugaacgaccugugcuucaccaacguguacgccgacagcuucgugauccguggcgacgaggugcggcagaucgcacccggccagacaggcaacaucgccgacuacaacuacaagcugcccgacgacuucaccggcugcgugaucgccuggaacagcaacaaccucgacagcaaggugggcggcaacuacaacuaccuguaccggcuguuccggaagagcaaccugaagcccuucgagcgggacaucagcaccgagaucuaccaagccggcuccaccccuugcaacggcgugaagggcuucaacugcuacuucccucugcagagcuacggcuuccagcccaccuacggcgugggcuaccagcccuaccgggugguggugcugagcuucgagcugcugcacgccccagccaccguguguggccccaagaagagcaccaaccuggugaagaacaagugcgugaacuucaacuucaacggccuuaccggcaccggcgugcugaccgagagcaacaagaaauuccugcccuuucagcaguucggccgggacaucgccgacaccaccgacgcugugcgggauccccagacccuggagauccuggacaucaccccuugcagcuucggcggcgugagcgugaucaccccaggcaccaacaccagcaaccagguggccgugcuguaccagggcgugaacugcaccgaggugcccguggccauccacgccgaccagcugacacccaccuggcgggucuacagcaccggcagcaacguguuccagacccgggccgguugccugaucggcgccgagcacgugaacaacagcuacgagugcgacauccccaucggcgccggcaucugugccagcuaccagacccagaccaauucaccccggagggcaaggagcguggccagccagagcaucaucgccuacaccaugagccugggcgccgagaacagcguggccuacagcaacaacagcaucgccauccccaccaacuucaccaucagcgugaccaccgagauucugcccgugagcaugaccaagaccagcguggacugcaccauguacaucugcggcgacagcaccgagugcagcaaccugcugcugcaguacggcagcuucugcacccagcugaaccgggcccugaccggcaucgccguggagcaggacaagaacacccaggagguguucgcccaggugaagcagaucuacaagaccccucccaucaaggacuucggcggcuucaacuucagccagauccugcccgaccccagcaagcccagcaagcggagcuucaucgaggaccugcuguucaacaaggugacccuagccgacgccggcuucaucaagcaguacggcgacugccucggcgacauagccgcccgggaccugaucugcgcccagaaguucaacggccugaccgugcugccuccccugcugaccgacgagaugaucgcccaguacaccagcgcccuguuagccggaaccaucaccagcggcuggacuuucggcgcuggagccgcucugcagauccccuucgccaugcagauggccuaccgguucaacggcaucggcgugacccagaacgugcuguacgagaaccagaagcugaucgccaaccaguucaacagcgccaucggcaagauccaggacagccugagcagcaccgcuagcgcccugggcaagcugcaggacguggugaaccagaacgcccaggcccugaacacccuggugaagcagcugagcagcaacuucggcgccaucagcagcgugcugaacgacauccugagccggcuggacaaggucgaggccgaggugcagaucgaccggcugaucacuggccggcugcagagccugcagaccuacgugacccagcagcugauccgggccgccgagauucgggccagcgccaaccuggccgccaccaagaugagcgagugcgugcugggccagagcaagcggguggacuucugcggcaagggcuaccaccugaugagcuuuccccagagcgcaccccacggagugguguuccugcacgugaccuacgugcccgcccaggagaagaacuucaccaccgccccagccaucugccacgacggcaaggcccacuuuccccgggagggcguguucgugagcaacggcacccacugguucgugacccagcggaacuucuacgagccccagaucaucaccaccgacaacaccuucgugagcggcaacugcgacguggugaucggcaucgugaacaacaccguguacgauccccugcagcccgagcuggacagcuucaaggaggagcuggacaaguacuucaagaaucacaccagccccgacguggaccugggcgacaucagcggcaucaacgccagcguggugaacauccagaaggagaucgaucggcugaacgagguggccaagaaccugaacgagagccugaucgaccugcaggagcugggcaaguacgagcaguacaucaaguggcccugguacaucuggcugggcuucaucgccggccugaucgccaucgugauggugaccaucaugcugugcugcaugaccagcugcugcagcugccugaagggcuguugcagcugcggcagcugcugcaaguucgacgaggacgacagcgagcccgugcugaagggcgugaagcugcacuacaccugaggacuagucccuguucccagagcccacuuuuuuuucuuuuuuugaaauaaaauagccugucuuucagaucucaaaggcucuuuucagagccaccaaaaaaaaaaaaaaaaaaaaaaaaaaaaaaaaaaaaaaaaaaaaaaaaaaaaaaaaaaaaaaaaaaaaaaaaaaaaaaaaaaaaaaaaaaaaaaaaaaaaa

SEQ ID NO: 23679 - RNA, 4182 nt, Artificial Sequence
  SARS-CoV-2/Wuhan/WIV05/2019__EPI_ISL_402128 spike protein mRNA gc (1-1273)(L18F_D80A_D215G_L242del_A243del_L244del_R246I_K417N_E484 K_N501Y_D614G_A701V)
aggagagggcgcuuggcuugcaaggacccugagcugcggcauugaagcacacccaacccaacucgacugaagucagccucacugaaccggaucugagaaucuucucucucugggcuugccagggcucuccgaaccuagcuagcauccucuucaauuccaacuagaaagcuuaccauguucguguuccuggugcugcugccccuggugagcagccagugcgugaacuucaccacccggacccagcugccaccagccuacaccaacagcuucacccggggcgucuacuaccccgacaagguguuccggagcagcguccugcacagcacccaggaccuguuccugcccuucuucagcaacgugaccugguuccacgccauccacgugagcggcaccaacggcaccaagcgguucgccaaccccgugcugcccuucaacgacggcguguacuucgccagcaccgagaagagcaacaucauccggggcuggaucuucggcaccacccuggacagcaagacccagagccugcugaucgugaauaacgccaccaacguggugaucaaggugugcgaguuccaguucugcaacgaccccuuccugggcguguacuaccacaagaacaacaagagcuggauggagagcgaguuccggguguacagcagcgccaacaacugcaccuucgaguacgugagccagcccuuccugauggaccuggagggcaagcagggcaacuucaagaaccugcgggaguucguguucaagaacaucgacggcuacuucaagaucuacagcaagcacaccccaaucaaccuggugcggggccugccccagggcuucucagcccuggagccccugguggaccugcccaucggcaucaacaucacccgguuccagacccugcacaucagcuaccugaccccaggcgacagcagcagcggguggacagcaggcgcggcugcuuacuacgugggcuaccugcagccccggaccuuccugcugaaguacaacgagaacggcaccaucaccgacgccguggacugcgcccuggacccucugagcgagaccaagugcacccugaagagcuucaccguggagaagggcaucuaccagaccagcaacuuccgggugcagcccaccgagagcaucgugcgguuccccaacaucaccaaccugugccccuucggcgagguguucaacgccacccgguucgccagcguguacgccuggaaccggaagcggaucagcaacugcguggccgacuacagcgugcuguacaacagcgccagcuucagcaccuucaagugcuacggcgugagccccaccaagcugaacgaccugugcuucaccaacguguacgccgacagcuucgugauccguggcgacgaggugcggcagaucgcacccggccagacaggcaacaucgccgacuacaacuacaagcugcccgacgacuucaccggcugcgugaucgccuggaacagcaacaaccucgacagcaaggugggcggcaacuacaacuaccuguaccggcuguuccggaagagcaaccugaagcccuucgagcgggacaucagcaccgagaucuaccaagccggcuccaccccuugcaacggcgugaagggcuucaacugcuacuucccucugcagagcuacggcuuccagcccaccuacggcgugggcuaccagcccuaccgggugguggugcugagcuucgagcugcugcacgccccagccaccguguguggccccaagaagagcaccaaccuggugaagaacaagugcgugaacuucaacuucaacggccuuaccggcaccggcgugcugaccgagagcaacaagaaauuccugcccuuucagcaguucggccgggacaucgccgacaccaccgacgcugugcgggauccccagacccuggagauccuggacaucaccccuugcagcuucggcggcgugagcgugaucaccccaggcaccaacaccagcaaccagguggccgugcuguaccagggcgugaacugcaccgaggugcccguggccauccacgccgaccagcugacacccaccuggcgggucuacagcaccggcagcaacguguuccagacccgggccgguugccugaucggcgccgagcacgugaacaacagcuacgagugcgacauccccaucggcgccggcaucugugccagcuaccagacccagaccaauucaccccggagggcaaggagcguggccagccagagcaucaucgccuacaccaugagccugggcguggagaacagcguggccuacagcaacaacagcaucgccauccccaccaacuucaccaucagcgugaccaccgagauucugcccgugagcaugaccaagaccagcguggacugcaccauguacaucugcggcgacagcaccgagugcagcaaccugcugcugcaguacggcagcuucugcacccagcugaaccgggcccugaccggcaucgccguggagcaggacaagaacacccaggagguguucgcccaggugaagcagaucuacaagaccccucccaucaaggacuucggcggcuucaacuucagccagauccugcccgaccccagcaagcccagcaagcggagcuucaucgaggaccugcuguucaacaaggugacccuagccgacgccggcuucaucaagcaguacggcgacugccucggcgacauagccgcccgggaccugaucugcgcccagaaguucaacggccugaccgugcugccuccccugcugaccgacgagaugaucgcccaguacaccagcgcccuguuagccggaaccaucaccagcggcuggacuuucggcgcuggagccgcucugcagauccccuucgccaugcagauggccuaccgguucaacggcaucggcgugacccagaacgugcuguacgagaaccagaagcugaucgccaaccaguucaacagcgccaucggcaagauccaggacagccugagcagcaccgcuagcgcccugggcaagcugcaggacguggugaaccagaacgcccaggcccugaacacccuggugaagcagcugagcagcaacuucggcgccaucagcagcgugcugaacgacauccugagccggcuggacaaggucgaggccgaggugcagaucgaccggcugaucacuggccggcugcagagccugcagaccuacgugacccagcagcugauccgggccgccgagauucgggccagcgccaaccuggccgccaccaagaugagcgagugcgugcugggccagagcaagcggguggacuucugcggcaagggcuaccaccugaugagcuuuccccagagcgcaccccacggagugguguuccugcacgugaccuacgugcccgcccaggagaagaacuucaccaccgccccagccaucugccacgacggcaaggcccacuuuccccgggagggcguguucgugagcaacggcacccacugguucgugacccagcggaacuucuacgagccccagaucaucaccaccgacaacaccuucgugagcggcaacugcgacguggugaucggcaucgugaacaacaccguguacgauccccugcagcccgagcuggacagcuucaaggaggagcuggacaaguacuucaagaaucacaccagccccgacguggaccugggcgacaucagcggcaucaacgccagcguggugaacauccagaaggagaucgaucggcugaacgagguggccaagaaccugaacgagagccugaucgaccugcaggagcugggcaaguacgagcaguacaucaaguggcccugguacaucuggcugggcuucaucgccggccugaucgccaucgugauggugaccaucaugcugugcugcaugaccagcugcugcagcugccugaagggcuguugcagcugcggcagcugcugcaaguucgacgaggacgacagcgagcccgugcugaagggcgugaagcugcacuacaccugaggacuagucccuguucccagagcccacuuuuuuuucuuuuuuugaaauaaaauagccugucuuucagaucucaaaggcucuuuucagagccaccaaaaaaaaaaaaaaaaaaaaaaaaaaaaaaaaaaaaaaaaaaaaaaaaaaaaaaaaaaaaaaaaaaaaaaaaaaaaaaaaaaaaaaaaaaaaaaaaaaaaa

SEQ ID NO: 23680 - RNA, 4191 nt, Artificial Sequence
  SARS-CoV-2/Wuhan/WIV05/2019__EPI_ISL_402128 spike protein mRNA gc (1-1273)(E484K_D614G)
aggagagggcgcuuggcuugcaaggacccugagcugcggcauugaagcacacccaacccaacucgacugaagucagccucacugaaccggaucugagaaucuucucucucugggcuugccagggcucuccgaaccuagcuagcauccucuucaauuccaacuagaaagcuuaccauguucguguuccuggugcugcugccccuggugagcagccagugcgugaaccugaccacccggacccagcugccaccagccuacaccaacagcuucacccggggcgucuacuaccccgacaagguguuccggagcagcguccugcacagcacccaggaccuguuccugcccuucuucagcaacgugaccugguuccacgccauccacgugagcggcaccaacggcaccaagcgguucgacaaccccgugcugcccuucaacgacggcguguacuucgccagcaccgagaagagcaacaucauccggggcuggaucuucggcaccacccuggacagcaagacccagagccugcugaucgugaauaacgccaccaacguggugaucaaggugugcgaguuccaguucugcaacgaccccuuccugggcguguacuaccacaagaacaacaagagcuggauggagagcgaguuccggguguacagcagcgccaacaacugcaccuucgaguacgugagccagcccuuccugauggaccuggagggcaagcagggcaacuucaagaaccugcgggaguucguguucaagaacaucgacggcuacuucaagaucuacagcaagcacaccccaaucaaccuggugcgggaucugccccagggcuucucagcccuggagccccugguggaccugcccaucggcaucaacaucacccgguuccagacccugcuggcccugcaccggagcuaccugaccccaggcgacagcagcagcggguggacagcaggcgcggcugcuuacuacgugggcuaccugcagccccggaccuuccugcugaaguacaacgagaacggcaccaucaccgacgccguggacugcgcccuggacccucugagcgagaccaagugcacccugaagagcuucaccguggagaagggcaucuaccagaccagcaacuuccgggugcagcccaccgagagcaucgugcgguuccccaacaucaccaaccugugccccuucggcgagguguucaacgccacccgguucgccagcguguacgccuggaaccggaagcggaucagcaacugcguggccgacuacagcgugcuguacaacagcgccagcuucagcaccuucaagugcuacggcgugagccccaccaagcugaacgaccugugcuucaccaacguguacgccgacagcuucgugauccguggcgacgaggugcggcagaucgcacccggccagacaggcaagaucgccgacuacaacuacaagcugcccgacgacuucaccggcugcgugaucgccuggaacagcaacaaccucgacagcaaggugggcggcaacuacaacuaccuguaccggcuguuccggaagagcaaccugaagcccuucgagcgggacaucagcaccgagaucuaccaagccggcuccaccccuugcaacggcgugaagggcuucaacugcuacuucccucugcagagcuacggcuuccagcccaccaacggcgugggcuaccagcccuaccgggugguggugcugagcuucgagcugcugcacgccccagccaccguguguggccccaagaagagcaccaaccuggugaagaacaagugcgugaacuucaacuucaacggccuuaccggcaccggcgugcugaccgagagcaacaagaaauuccugcccuuucagcaguucggccgggacaucgccgacaccaccgacgcugugcgggauccccagacccuggagauccuggacaucaccccuugcagcuucggcggcgugagcgugaucaccccaggcaccaacaccagcaaccagguggccgugcuguaccagggcgugaacugcaccgaggugcccguggccauccacgccgaccagcugacacccaccuggcgggucuacagcaccggcagcaacguguuccagacccgggccgguugccugaucggcgccgagcacgugaacaacagcuacgagugcgacauccccaucggcgccggcaucugugccagcuaccagacccagaccaauucaccccggagggcaaggagcguggccagccagagcaucaucgccuacaccaugagccugggcgccgagaacagcguggccuacagcaacaacagcaucgccauccccaccaacuucaccaucagcgugaccaccgagauucugcccgugagcaugaccaagaccagcguggacugcaccauguacaucugcggcgacagcaccgagugcagcaaccugcugcugcaguacggcagcuucugcacccagcugaaccgggcccugaccggcaucgccguggagcaggacaagaacacccaggagguguucgcccaggugaagcagaucuacaagaccccucccaucaaggacuucggcggcuucaacuucagccagauccugcccgaccccagcaagcccagcaagcggagcuucaucgaggaccugcuguucaacaaggugacccuagccgacgccggcuucaucaagcaguacggcgacugccucggcgacauagccgcccgggaccugaucugcgcccagaaguucaacggccugaccgugcugccuccccugcugaccgacgagaugaucgcccaguacaccagcgcccuguuagccggaaccaucaccagcggcuggacuuucggcgcuggagccgcucugcagauccccuucgccaugcagauggccuaccgguucaacggcaucggcgugacccagaacgugcuguacgagaaccagaagcugaucgccaaccaguucaacagcgccaucggcaagauccaggacagccugagcagcaccgcuagcgcccugggcaagcugcaggacguggugaaccagaacgcccaggcccugaacacccuggugaagcagcugagcagcaacuucggcgccaucagcagcgugcugaacgacauccugagccggcuggacaaggucgaggccgaggugcagaucgaccggcugaucacuggccggcugcagagccugcagaccuacgugacccagcagcugauccgggccgccgagauucgggccagcgccaaccuggccgccaccaagaugagcgagugcgugcugggccagagcaagcggguggacuucugcggcaagggcuaccaccugaugagcuuuccccagagcgcaccccacggagugguguuccugcacgugaccuacgugcccgcccaggagaagaacuucaccaccgccccagccaucugccacgacggcaaggcccacuuuccccgggagggcguguucgugagcaacggcacccacugguucgugacccagcggaacuucuacgagccccagaucaucaccaccgacaacaccuucgugagcggcaacugcgacguggugaucggcaucgugaacaacaccguguacgauccccugcagcccgagcuggacagcuucaaggaggagcuggacaaguacuucaagaaucacaccagccccgacguggaccugggcgacaucagcggcaucaacgccagcguggugaacauccagaaggagaucgaucggcugaacgagguggccaagaaccugaacgagagccugaucgaccugcaggagcugggcaaguacgagcaguacaucaaguggcccugguacaucuggcugggcuucaucgccggccugaucgccaucgugauggugaccaucaugcugugcugcaugaccagcugcugcagcugccugaagggcuguugcagcugcggcagcugcugcaaguucgacgaggacgacagcgagcccgugcugaagggcgugaagcugcacuacaccugaggacuagucccuguucccagagcccacuuuuuuuucuuuuuuugaaauaaaauagccugucuuucagaucucaaaggcucuuuucagagccaccaaaaaaaaaaaaaaaaaaaaaaaaaaaaaaaaaaaaaaaaaaaaaaaaaaaaaaaaaaaaaaaaaaaaaaaaaaaaaaaaaaaaaaaaaaaaaaaaaaaaa

SEQ ID NO: 23681 - RNA, 4191 nt, Artificial Sequence
  SARS-CoV-2/Wuhan/WIV05/2019__EPI_ISL_402128 spike protein mRNA gc (1-1273)(L18F_T20N_P26S_D138Y_R190S_K417T_E484K_N501Y_D614G_H655Y _T1027I)
aggagagggcgcuuggcuugcaaggacccugagcugcggcauugaagcacacccaacccaacucgacugaagucagccucacugaaccggaucugagaaucuucucucucugggcuugccagggcucuccgaaccuagcuagcauccucuucaauuccaacuagaaagcuuaccauguucguguuccuggugcugcugccccuggugagcagccagugcgugaacuucaccaaccggacccagcugccaagcgccuacaccaacagcuucacccggggcgucuacuaccccgacaagguguuccggagcagcguccugcacagcacccaggaccuguuccugcccuucuucagcaacgugaccugguuccacgccauccacgugagcggcaccaacggcaccaagcgguucgacaaccccgugcugcccuucaacgacggcguguacuucgccagcaccgagaagagcaacaucauccggggcuggaucuucggcaccacccuggacagcaagacccagagccugcugaucgugaauaacgccaccaacguggugaucaaggugugcgaguuccaguucugcaacuaccccuuccugggcguguacuaccacaagaacaacaagagcuggauggagagcgaguuccggguguacagcagcgccaacaacugcaccuucgaguacgugagccagcccuuccugauggaccuggagggcaagcagggcaacuucaagaaccugagcgaguucguguucaagaacaucgacggcuacuucaagaucuacagcaagcacaccccaaucaaccuggugcgggaucugccccagggcuucucagcccuggagccccugguggaccugcccaucggcaucaacaucacccgguuccagacccugcuggcccugcaccggagcuaccugaccccaggcgacagcagcagcggguggacagcaggcgcggcugcuuacuacgugggcuaccugcagccccggaccuuccugcugaaguacaacgagaacggcaccaucaccgacgccguggacugcgcccuggacccucugagcgagaccaagugcacccugaagagcuucaccguggagaagggcaucuaccagaccagcaacuuccgggugcagcccaccgagagcaucgugcgguuccccaacaucaccaaccugugccccuucggcgagguguucaacgccacccgguucgccagcguguacgccuggaaccggaagcggaucagcaacugcguggccgacuacagcgugcuguacaacagcgccagcuucagcaccuucaagugcuacggcgugagccccaccaagcugaacgaccugugcuucaccaacguguacgccgacagcuucgugauccguggcgacgaggugcggcagaucgcacccggccagacaggcaccaucgccgacuacaacuacaagcugcccgacgacuucaccggcugcgugaucgccuggaacagcaacaaccucgacagcaaggugggcggcaacuacaacuaccuguaccggcuguuccggaagagcaaccugaagcccuucgagcgggacaucagcaccgagaucuaccaagccggcuccaccccuugcaacggcgugaagggcuucaacugcuacuucccucugcagagcuacggcuuccagcccaccuacggcgugggcuaccagcccuaccgggugguggugcugagcuucgagcugcugcacgccccagccaccguguguggccccaagaagagcaccaaccuggugaagaacaagugcgugaacuucaacuucaacggccuuaccggcaccggcgugcugaccgagagcaacaagaaauuccugcccuuucagcaguucggccgggacaucgccgacaccaccgacgcugugcgggauccccagacccuggagauccuggacaucaccccuugcagcuucggcggcgugagcgugaucaccccaggcaccaacaccagcaaccagguggccgugcuguaccagggcgugaacugcaccgaggugcccguggccauccacgccgaccagcugacacccaccuggcgggucuacagcaccggcagcaacguguuccagacccgggccgguugccugaucggcgccgaguacgugaacaacagcuacgagugcgacauccccaucggcgccggcaucugugccagcuaccagacccagaccaauucaccccggagggcaaggagcguggccagccagagcaucaucgccuacaccaugagccugggcgccgagaacagcguggccuacagcaacaacagcaucgccauccccaccaacuucaccaucagcgugaccaccgagauucugcccgugagcaugaccaagaccagcguggacugcaccauguacaucugcggcgacagcaccgagugcagcaaccugcugcugcaguacggcagcuucugcacccagcugaaccgggcccugaccggcaucgccguggagcaggacaagaacacccaggagguguucgcccaggugaagcagaucuacaagaccccucccaucaaggacuucggcggcuucaacuucagccagauccugcccgaccccagcaagcccagcaagcggagcuucaucgaggaccugcuguucaacaaggugacccuagccgacgccggcuucaucaagcaguacggcgacugccucggcgacauagccgcccgggaccugaucugcgcccagaaguucaacggccugaccgugcugccuccccugcugaccgacgagaugaucgcccaguacaccagcgcccuguuagccggaaccaucaccagcggcuggacuuucggcgcuggagccgcucugcagauccccuucgccaugcagauggccuaccgguucaacggcaucggcgugacccagaacgugcuguacgagaaccagaagcugaucgccaaccaguucaacagcgccaucggcaagauccaggacagccugagcagcaccgcuagcgcccugggcaagcugcaggacguggugaaccagaacgcccaggcccugaacacccuggugaagcagcugagcagcaacuucggcgccaucagcagcgugcugaacgacauccugagccggcuggacaaggucgaggccgaggugcagaucgaccggcugaucacuggccggcugcagagccugcagaccuacgugacccagcagcugauccgggccgccgagauucgggccagcgccaaccuggccgccaucaagaugagcgagugcgugcugggccagagcaagcggguggacuucugcggcaagggcuaccaccugaugagcuuuccccagagcgcaccccacggagugguguuccugcacgugaccuacgugcccgcccaggagaagaacuucaccaccgccccagccaucugccacgacggcaaggcccacuuuccccgggagggcguguucgugagcaacggcacccacugguucgugacccagcggaacuucuacgagccccagaucaucaccaccgacaacaccuucgugagcggcaacugcgacguggugaucggcaucgugaacaacaccguguacgauccccugcagcccgagcuggacagcuucaaggaggagcuggacaaguacuucaagaaucacaccagccccgacguggaccugggcgacaucagcggcaucaacgccagcguggugaacauccagaaggagaucgaucggcugaacgagguggccaagaaccugaacgagagccugaucgaccugcaggagcugggcaaguacgagcaguacaucaaguggcccugguacaucuggcugggcuucaucgccggccugaucgccaucgugauggugaccaucaugcugugcugcaugaccagcugcugcagcugccugaagggcuguugcagcugcggcagcugcugcaaguucgacgaggacgacagcgagcccgugcugaagggcgugaagcugcacuacaccugaggacuagucccuguucccagagcccacuuuuuuuucuuuuuuugaaauaaaauagccugucuuucagaucucaaaggcucuuuucagagccaccaaaaaaaaaaaaaaaaaaaaaaaaaaaaaaaaaaaaaaaaaaaaaaaaaaaaaaaaaaaaaaaaaaaaaaaaaaaaaaaaaaaaaaaaaaaaaaaaaaaaa

SEQ ID NO: 23682 - RNA, 4191 nt, Artificial Sequence
  SARS-CoV-2/Wuhan/WIV05/2019__EPI_ISL_402128 spike protein mRNA gc (1-1273)(S13I_W152C_L452R_D614G)
aggagagggcgcuuggcuugcaaggacccugagcugcggcauugaagcacacccaacccaacucgacugaagucagccucacugaaccggaucugagaaucuucucucucugggcuugccagggcucuccgaaccuagcuagcauccucuucaauuccaacuagaaagcuuaccauguucguguuccuggugcugcugccccuggugagcauccagugcgugaaccugaccacccggacccagcugccaccagccuacaccaacagcuucacccggggcgucuacuaccccgacaagguguuccggagcagcguccugcacagcacccaggaccuguuccugcccuucuucagcaacgugaccugguuccacgccauccacgugagcggcaccaacggcaccaagcgguucgacaaccccgugcugcccuucaacgacggcguguacuucgccagcaccgagaagagcaacaucauccggggcuggaucuucggcaccacccuggacagcaagacccagagccugcugaucgugaauaacgccaccaacguggugaucaaggugugcgaguuccaguucugcaacgaccccuuccugggcguguacuaccacaagaacaacaagagcugcauggagagcgaguuccggguguacagcagcgccaacaacugcaccuucgaguacgugagccagcccuuccugauggaccuggagggcaagcagggcaacuucaagaaccugcgggaguucguguucaagaacaucgacggcuacuucaagaucuacagcaagcacaccccaaucaaccuggugcgggaucugccccagggcuucucagcccuggagccccugguggaccugcccaucggcaucaacaucacccgguuccagacccugcuggcccugcaccggagcuaccugaccccaggcgacagcagcagcggguggacagcaggcgcggcugcuuacuacgugggcuaccugcagccccggaccuuccugcugaaguacaacgagaacggcaccaucaccgacgccguggacugcgcccuggacccucugagcgagaccaagugcacccugaagagcuucaccguggagaagggcaucuaccagaccagcaacuuccgggugcagcccaccgagagcaucgugcgguuccccaacaucaccaaccugugccccuucggcgagguguucaacgccacccgguucgccagcguguacgccuggaaccggaagcggaucagcaacugcguggccgacuacagcgugcuguacaacagcgccagcuucagcaccuucaagugcuacggcgugagccccaccaagcugaacgaccugugcuucaccaacguguacgccgacagcuucgugauccguggcgacgaggugcggcagaucgcacccggccagacaggcaagaucgccgacuacaacuacaagcugcccgacgacuucaccggcugcgugaucgccuggaacagcaacaaccucgacagcaaggugggcggcaacuacaacuaccgcuaccggcuguuccggaagagcaaccugaagcccuucgagcgggacaucagcaccgagaucuaccaagccggcuccaccccuugcaacggcguggagggcuucaacugcuacuucccucugcagagcuacggcuuccagcccaccaacggcgugggcuaccagcccuaccgggugguggugcugagcuucgagcugcugcacgccccagccaccguguguggccccaagaagagcaccaaccuggugaagaacaagugcgugaacuucaacuucaacggccuuaccggcaccggcgugcugaccgagagcaacaagaaauuccugcccuuucagcaguucggccgggacaucgccgacaccaccgacgcugugcgggauccccagacccuggagauccuggacaucaccccuugcagcuucggcggcgugagcgugaucaccccaggcaccaacaccagcaaccagguggccgugcuguaccagggcgugaacugcaccgaggugcccguggccauccacgccgaccagcugacacccaccuggcgggucuacagcaccggcagcaacguguuccagacccgggccgguugccugaucggcgccgagcacgugaacaacagcuacgagugcgacauccccaucggcgccggcaucugugccagcuaccagacccagaccaauucaccccggagggcaaggagcguggccagccagagcaucaucgccuacaccaugagccugggcgccgagaacagcguggccuacagcaacaacagcaucgccauccccaccaacuucaccaucagcgugaccaccgagauucugcccgugagcaugaccaagaccagcguggacugcaccauguacaucugcggcgacagcaccgagugcagcaaccugcugcugcaguacggcagcuucugcacccagcugaaccgggcccugaccggcaucgccguggagcaggacaagaacacccaggagguguucgcccaggugaagcagaucuacaagaccccucccaucaaggacuucggcggcuucaacuucagccagauccugcccgaccccagcaagcccagcaagcggagcuucaucgaggaccugcuguucaacaaggugacccuagccgacgccggcuucaucaagcaguacggcgacugccucggcgacauagccgcccgggaccugaucugcgcccagaaguucaacggccugaccgugcugccuccccugcugaccgacgagaugaucgcccaguacaccagcgcccuguuagccggaaccaucaccagcggcuggacuuucggcgcuggagccgcucugcagauccccuucgccaugcagauggccuaccgguucaacggcaucggcgugacccagaacgugcuguacgagaaccagaagcugaucgccaaccaguucaacagcgccaucggcaagauccaggacagccugagcagcaccgcuagcgcccugggcaagcugcaggacguggugaaccagaacgcccaggcccugaacacccuggugaagcagcugagcagcaacuucggcgccaucagcagcgugcugaacgacauccugagccggcuggacaaggucgaggccgaggugcagaucgaccggcugaucacuggccggcugcagagccugcagaccuacgugacccagcagcugauccgggccgccgagauucgggccagcgccaaccuggccgccaccaagaugagcgagugcgugcugggccagagcaagcggguggacuucugcggcaagggcuaccaccugaugagcuuuccccagagcgcaccccacggagugguguuccugcacgugaccuacgugcccgcccaggagaagaacuucaccaccgccccagccaucugccacgacggcaaggcccacuuuccccgggagggcguguucgugagcaacggcacccacugguucgugacccagcggaacuucuacgagccccagaucaucaccaccgacaacaccuucgugagcggcaacugcgacguggugaucggcaucgugaacaacaccguguacgauccccugcagcccgagcuggacagcuucaaggaggagcuggacaaguacuucaagaaucacaccagccccgacguggaccugggcgacaucagcggcaucaacgccagcguggugaacauccagaaggagaucgaucggcugaacgagguggccaagaaccugaacgagagccugaucgaccugcaggagcugggcaaguacgagcaguacaucaaguggcccugguacaucuggcugggcuucaucgccggccugaucgccaucgugauggugaccaucaugcugugcugcaugaccagcugcugcagcugccugaagggcuguugcagcugcggcagcugcugcaaguucgacgaggacgacagcgagcccgugcugaagggcgugaagcugcacuacaccugaggacuagucccuguucccagagcccacuuuuuuuucuuuuuuugaaauaaaauagccugucuuucagaucucaaaggcucuuuucagagccaccaaaaaaaaaaaaaaaaaaaaaaaaaaaaaaaaaaaaaaaaaaaaaaaaaaaaaaaaaaaaaaaaaaaaaaaaaaaaaaaaaaaaaaaaaaaaaaaaaaaaa

SEQ ID NO: 23683 - RNA, 4191 nt, Artificial Sequence
  SARS-CoV-2/Wuhan/WIV05/2019__EPI_ISL_402128 spike protein mRNA gc (1-1273)
aggagagggcgcuuggcuugcaaggacccugagcugcggcauugaagcacacccaacccaacucgacugaagucagccucacugaaccggaucugagaaucuucucucucugggcuugccagggcucuccgaaccuagcuagcauccucuucaauuccaacuagaaagcuuaccauguucguguuccuggugcugcugccccuggugagcagccagugcgugaaccugaccacccggacccagcugcccccugccuacaccaacagcuucacccggggcguguacuaccccgacaagguguuccggagcagcgugcugcacagcacccaggaccuguuccugcccuucuucagcaacgugaccugguuccacgccauccacgugagcggcaccaacggcaccaagcgguucgacaacccagugcugcccuucaacgacggcguguacuucgccagcaccgagaagucaaacaucauccggggcuggaucuucggcaccacccuggacagcaagacacagagccugcugaucgugaacaacgccaccaacguggugaucaaggugugcgaguuucaguucugcaacgaccccuuccugggcguguacuaccacaagaacaacaagagcuggauggagagcgaguuccgggucuacagcagcgcuaacaauugcaccuucgaguacgugagccagcccuuccugauggaccucgagggcaagcagggcaacuucaagaaccugcgggaguucguguucaagaacaucgauggcuacuucaagaucuacagcaagcacacccccaucaaccuggugcgggaccugccccagggauucagcgcccuggagccucugguggaccugcccaucggcaucaacaucaccagguuccagacccugcuggcccugcaccggagcuaccugacccccggcgacagcagcagcggcuggaccgccggcgccgccgcauacuacgugggcuaccugcagccacggaccuuccugcugaaguacaacgagaacggcaccaucaccgacgccguggacugcgcccuggacccccugagcgagaccaagugcacccuaaagagcuucaccguggagaagggcaucuaccagaccagcaacuuccgggugcagcccacugagagcaucgugcgguuccccaacauuaccaaccugugucccuucggcgagguguucaacgccacccgguucgccagcguguacgccuggaaccggaagcggaucagcaacugcguggccgacuacagcgugcuguacaacagcgccagcuucagcaccuucaagugcuacggcgugagcccuaccaagcugaacgaccugugcuucaccaacguguacgcugacagcuucgugauccggggcgacgaggugcggcagaucgcccccggccagaccggcaagaucgccgacuacaacuacaagcugcccgacgacuucaccggcugcgugaucgccuggaacagcaacaaccuggacagcaaggugggcggcaacuacaacuaccuguaccggcuguuccguaagagcaaccugaagccauucgagcgggacaucagcaccgagaucuaccaggccggcagcacccccugcaacgguguggagggcuuuaacugcuacuucccccugcagagcuacggcuuccagcccaccaacggcgugggcuaccagcccuaccgggugguggugcugagcuucgagcugcugcacgcccccgccaccgugugcggcccuaaaaagagcaccaaccuggugaagaacaagugcgugaacuucaauuucaacggccugaccggcaccggcgugcugaccgagagcaacaagaaguuccugcccuuccagcaguucggccgggauaucgccgacaccaccgacgcagugcgggacccccagacccuggagauccuggacaucaccccaugcagcuucggcggcgugagcgucaucacccccggcacaaacaccagcaaccagguggccgugcuguaccaggacgugaacugcaccgaggugcccguggccauccacgccgaccagcugacccccaccuggcggguguacagcaccggaagcaacguguuccagacccgggccggcugccugaucggcgccgagcacgugaacaacuccuacgagugcgacauccccaucggcgcuggcaucugcgccagcuaccagacccagaccaacagcccccggcgggcccggagcguggccagccagagcaucaucgccuacaccaugagcuuaggcgccgagaacagcguggccuacagcaacaacagcaucgcgaucccuaccaacuucaccaucagcgugaccaccgagauacugcccgugagcaugaccaagaccagcguggacuguaccauguacaucugcggcgacagcaccgagugcagcaaccugcugcugcaguacggcagcuucugcacccagcugaaccgggcccugaccggcaucgccguggagcaggacaagaacacccaagagguguucgcccaggugaagcagaucuacaagacucccccaaucaaggacuucggcggcuucaacuucagccagauccugcccgaccccagcaagcccagcaagcggagcuucaucgaggaccugcuguucaacaaggugacccuggccgacgccggcuucaucaagcaguacggcgauugccugggcgacaucgccgcucgggaccugaucugcgcccagaaguucaacgggcugaccgugcugcccccucugcugaccgacgagaugaucgcccaguacaccagcgcccugcuugccggcaccaucaccagcggcuggaccuucggcgccggcgcagcccugcagauccccuucgccaugcagauggccuaccgguucaacggcaucggcgugacccagaacgugcuguacgagaaccagaagcugaucgccaaccaguucaacagcgccaucggcaagauccaggacagccugagcagcaccgccagcgcccugggcaagcugcaggacguggugaaccagaacgcucaggcccugaacacccuggugaagcagcugagcagcaacuucggcgccaucagcucagugcugaaugacauccugagcaggcuggacaagguggaggccgaggugcagaucgaccggcugaucaccggccggcugcagagccugcagaccuacgugacccagcagcugauccgggccgccgagauccgggccagcgccaaccuggcagccaccaagaugagcgagugcgugcugggccagagcaagcggguggacuuuugcggcaagggcuaccaccugaugagcuucccccagagcgccccacacggcgugguguuccuccacgucacauacgugcccgcccaggagaagaacuucaccaccgcccccgccauuugccacgacggcaaggcucacuucccccgggagggcguguucgugagcaacggaacccacugguucgugacccagcggaacuucuacgagccccagaucaucaccaccgacaacaccuucgugagcggcaacugcgacguggugaucggcaucgugaacaacaccguguacgacccccugcagccugagcuggacagcuucaaggaggagcuggacaaguacuucaagaaccacaccagccccgauguggaccugggcgacaucagcggcaucaacgccagcguggugaacauccagaaggagaucgaccggcugaacgagguggccaagaaccugaacgagagccugaucgaccugcaggagcugggcaaguacgagcaguacaucaaguggcccugguacaucuggcugggcuucaucgccggccugaucgccaucgugauggugaccaucaugcugugcugcaugaccagcugcuguagcugccugaagggcugcugcagcugcggcagcugcugcaaguucgacgaggacgacagcgagccagugcugaagggcgugaagcugcacuacaccugaggacuagucccuguucccagagcccacuuuuuuuucuuuuuuugaaauaaaauagccugucuuucagaucucaaaggcucuuuucagagccaccaaaaaaaaaaaaaaaaaaaaaaaaaaaaaaaaaaaaaaaaaaaaaaaaaaaaaaaaaaaaaaaaaaaaaaaaaaaaaaaaaaaaaaaaaaaaaaaaaaaaa

SEQ ID NO: 23684 - RNA, 4191 nt, Artificial Sequence
  SARS-CoV-2/Wuhan/WIV05/2019__EPI_ISL_402128 spike protein mRNA gc (1-1273)(D614G)
aggagagggcgcuuggcuugcaaggacccugagcugcggcauugaagcacacccaacccaacucgacugaagucagccucacugaaccggaucugagaaucuucucucucugggcuugccagggcucuccgaaccuagcuagcauccucuucaauuccaacuagaaagcuuaccauguucguguuccuggugcugcugccccuggugagcagccagugcgugaaccugaccacccggacccagcugcccccugccuacaccaacagcuucacccggggcguguacuaccccgacaagguguuccggagcagcgugcugcacagcacccaggaccuguuccugcccuucuucagcaacgugaccugguuccacgccauccacgugagcggcaccaacggcaccaagcgguucgacaacccagugcugcccuucaacgacggcguguacuucgccagcaccgagaagucaaacaucauccggggcuggaucuucggcaccacccuggacagcaagacacagagccugcugaucgugaacaacgccaccaacguggugaucaaggugugcgaguuucaguucugcaacgaccccuuccugggcguguacuaccacaagaacaacaagagcuggauggagagcgaguuccgggucuacagcagcgcuaacaauugcaccuucgaguacgugagccagcccuuccugauggaccucgagggcaagcagggcaacuucaagaaccugcgggaguucguguucaagaacaucgauggcuacuucaagaucuacagcaagcacacccccaucaaccuggugcgggaccugccccagggauucagcgcccuggagccucugguggaccugcccaucggcaucaacaucaccagguuccagacccugcuggcccugcaccggagcuaccugacccccggcgacagcagcagcggcuggaccgccggcgccgccgcauacuacgugggcuaccugcagccacggaccuuccugcugaaguacaacgagaacggcaccaucaccgacgccguggacugcgcccuggacccccugagcgagaccaagugcacccuaaagagcuucaccguggagaagggcaucuaccagaccagcaacuuccgggugcagcccacugagagcaucgugcgguuccccaacauuaccaaccugugucccuucggcgagguguucaacgccacccgguucgccagcguguacgccuggaaccggaagcggaucagcaacugcguggccgacuacagcgugcuguacaacagcgccagcuucagcaccuucaagugcuacggcgugagcccuaccaagcugaacgaccugugcuucaccaacguguacgcugacagcuucgugauccggggcgacgaggugcggcagaucgcccccggccagaccggcaagaucgccgacuacaacuacaagcugcccgacgacuucaccggcugcgugaucgccuggaacagcaacaaccuggacagcaaggugggcggcaacuacaacuaccuguaccggcuguuccguaagagcaaccugaagccauucgagcgggacaucagcaccgagaucuaccaggccggcagcacccccugcaacgguguggagggcuuuaacugcuacuucccccugcagagcuacggcuuccagcccaccaacggcgugggcuaccagcccuaccgggugguggugcugagcuucgagcugcugcacgcccccgccaccgugugcggcccuaaaaagagcaccaaccuggugaagaacaagugcgugaacuucaauuucaacggccugaccggcaccggcgugcugaccgagagcaacaagaaguuccugcccuuccagcaguucggccgggauaucgccgacaccaccgacgcagugcgggacccccagacccuggagauccuggacaucaccccaugcagcuucggcggcgugagcgucaucacccccggcacaaacaccagcaaccagguggccgugcuguaccagggagugaacugcaccgaggugcccguggccauccacgccgaccagcugacccccaccuggcggguguacagcaccggcagcaacguguuccagacccgggccggcugccugaucggcgccgagcacgugaacaacuccuacgagugcgacauccccaucggcgcuggcaucugcgccagcuaccagacccagaccaacagcccccggcgggcccggagcguggccagccagagcaucaucgccuacaccaugagcuuaggcgccgagaacagcguggccuacagcaacaacagcaucgcgaucccuaccaacuucaccaucagcgugaccaccgagauacugcccgugagcaugaccaagaccagcguggacuguaccauguacaucugcggcgacagcaccgagugcagcaaccugcugcugcaguacggcagcuucugcacccagcugaaccgggcccugaccggcaucgccguggagcaggacaagaacacccaagagguguucgcccaggugaagcagaucuacaagacucccccaaucaaggacuucggcggcuucaacuucagccagauccugcccgaccccagcaagcccagcaagcggagcuucaucgaggaccugcuguucaacaaggugacccuggccgacgccggcuucaucaagcaguacggcgacugccugggggauaucgccgcucgggaccugaucugcgcccagaaguucaacggccugaccgugcugcccccucugcugaccgacgagaugaucgcccaguacaccagcgcccugcuugccggcaccaucaccagcggcuggaccuucggcgccggcgcagcccugcagauccccuucgccaugcagauggccuaccgguucaacggcaucggcgugacccagaacgugcuguacgagaaccagaagcugaucgccaaccaguucaacagcgccaucggcaagauccaggacagccugagcagcaccgccagcgcccugggcaagcugcaggacguggugaaccagaacgcucaggcccugaacacccuggugaagcagcugagcagcaacuucggcgccaucagcucagugcugaaugacauccugagcaggcuggacaagguggaggccgaggugcagaucgaccggcugaucaccggccggcugcagagccugcagaccuacgugacccagcagcugauccgggccgccgagauccgggccagcgccaaccuggcagccaccaagaugagcgagugcgugcugggccagagcaagcggguggacuuuugcggcaagggcuaccaccugaugagcuucccccagagcgccccacacggcgugguguuccuccacgucacauacgugcccgcccaggagaagaacuucaccaccgcccccgccauuugccacgacggcaaggcucacuucccccgggagggaguguucgugagcaacggcacccacugguucgugacccagcggaacuucuacgagccccagaucaucaccaccgacaacaccuucgugagcggcaacugcgacguggugaucggcaucgugaacaacaccguguacgacccccugcagccugagcuggacagcuucaaggaggagcuggacaaguacuucaagaaccacaccagccccgacguggaucugggcgacaucagcggcaucaacgccagcguggugaacauccagaaggagaucgaccggcugaacgagguggccaagaaccugaacgagagccugaucgaccugcaggagcugggcaaguacgagcaguacaucaaguggcccugguacaucuggcugggcuucaucgccggccugaucgccaucgugauggugaccaucaugcugugcugcaugaccagcugcuguagcugccugaagggcugcugcagcugcggcagcugcugcaaguucgacgaggacgacagcgagccagugcugaagggcgugaagcugcacuacaccugaggacuagucccuguucccagagcccacuuuuuuuucuuuuuuugaaauaaaauagccugucuuucagaucucaaaggcucuuuucagagccaccaaaaaaaaaaaaaaaaaaaaaaaaaaaaaaaaaaaaaaaaaaaaaaaaaaaaaaaaaaaaaaaaaaaaaaaaaaaaaaaaaaaaaaaaaaaaaaaaaaaaa

SEQ ID NO: 23685 - RNA, 4191 nt, Artificial Sequence
  SARS-CoV-2/Wuhan/WIV05/2019__EPI_ISL_402128 spike protein mRNA gc (1-1273)(A222V_D614G)
aggagagggcgcuuggcuugcaaggacccugagcugcggcauugaagcacacccaacccaacucgacugaagucagccucacugaaccggaucugagaaucuucucucucugggcuugccagggcucuccgaaccuagcuagcauccucuucaauuccaacuagaaagcuuaccauguucguguuccuggugcugcugccccuggugagcagccagugcgugaaccugaccacccggacccagcugcccccugccuacaccaacagcuucacccggggcguguacuaccccgacaagguguuccggagcagcgugcugcacagcacccaggaccuguuccugcccuucuucagcaacgugaccugguuccacgccauccacgugagcggcaccaacggcaccaagcgguucgacaacccagugcugcccuucaacgacggcguguacuucgccagcaccgagaagucaaacaucauccggggcuggaucuucggcaccacccuggacagcaagacacagagccugcugaucgugaacaacgccaccaacguggugaucaaggugugcgaguuucaguucugcaacgaccccuuccugggcguguacuaccacaagaacaacaagagcuggauggagagcgaguuccgggucuacagcagcgcuaacaauugcaccuucgaguacgugagccagcccuuccugauggaccucgagggcaagcagggcaacuucaagaaccugcgggaguucguguucaagaacaucgauggcuacuucaagaucuacagcaagcacacccccaucaaccuggugcgggaccugccccagggauucagcgugcuggagccucugguggaccugcccaucggcaucaacaucaccagguuccagacccugcuggcccugcaccggagcuaccugacccccggcgacagcagcagcggcuggaccgccggcgccgccgccuacuacgugggcuaccugcagccacggaccuuccugcugaaguacaacgagaacggcaccaucaccgacgcaguggacugcgcccuggacccccugagcgagaccaagugcacccuaaagagcuucaccguggagaagggcaucuaccagaccagcaacuuccgggugcagcccacugagagcaucgugcgguuccccaacauuaccaaccugugucccuucggcgagguguucaacgccacccgguucgccagcguguacgccuggaaccggaagcggaucagcaacugcguggccgacuacagcgugcuguacaacagcgccagcuucagcaccuucaagugcuacggcgugagcccuaccaagcugaacgaccugugcuucaccaacguguacgccgacagcuucgugauccggggcgacgaggugcggcagaucgcucccggccagaccggcaagaucgccgacuacaacuacaagcugcccgacgacuucaccggcugcgugaucgccuggaacagcaacaaccuggacagcaaggugggcggcaacuacaacuaccuguaccggcuguuccguaagagcaaccugaagccauucgagcgggacaucagcaccgagaucuaccaggccggcagcacccccugcaacgguguggagggcuuuaacugcuacuucccccugcagagcuacggcuuccagcccaccaacggcgugggcuaccagcccuaccgggugguggugcugagcuucgagcugcugcacgcccccgccaccgugugcggcccuaaaaagagcaccaaccuggugaagaacaagugcgugaacuucaauuucaacggccugaccggcaccggcgugcugaccgagagcaacaagaaguuccugcccuuccagcaguucggccgggauaucgccgacaccaccgacgccgugcgggacccccagacccuggagauccuggacaucaccccaugcagcuucggcggcgucagcgugaucacccccggcacaaacaccagcaaccagguggcagugcuguaccagggagugaacugcaccgaggugcccguggccauccacgccgaccagcugacccccaccuggcggguguacagcaccggcagcaacguguuccagacccgggccggcugccugaucggcgccgagcacgugaacaacuccuacgagugcgacauccccaucggcgccggcaucugcgcuagcuaccagacccagaccaacagcccccggcgggcccggagcguggccagccagagcaucaucgccuacaccaugagcuuaggcgccgagaacagcguggccuacagcaacaacagcaucgccaucccuaccaacuucaccaucagcgugaccaccgagauacugcccgugagcaugaccaagaccagcguggacuguaccauguacaucugcggcgacagcaccgagugcagcaaccugcugcugcaguacggcagcuucugcacccagcugaaccgggcgcugaccggcaucgccguggagcaggacaagaacacccaagagguguucgcccaggugaagcagaucuacaagacucccccaaucaaggacuucggcggcuucaacuucagccagauccugcccgaccccagcaagcccagcaagcggagcuucaucgaggaccugcuguucaacaaggugacccuggccgacgccggcuucaucaagcaguacggcgacugccugggggauaucgccgcccgggaccugaucugcgcucagaaguucaacggccugaccgugcugcccccucugcugaccgacgagaugaucgcccaguacaccagcgcccugcuugccggcaccaucaccagcggcuggaccuucggcgccggcgccgcacugcagauccccuucgccaugcagauggccuaccgguucaacggcaucggcgugacccagaacgugcuguacgagaaccagaagcugaucgccaaccaguucaacagcgccaucggcaagauccaggacagccugagcagcaccgccagcgcccugggcaagcugcaggacguggugaaccagaacgcccaggcucugaacacccuggugaagcagcugagcagcaacuucggcgccaucagcucagugcugaaugacauccugagcaggcuggacaagguggaggccgaggugcagaucgaccggcugaucaccggccggcugcagagccugcagaccuacgugacccagcagcugauccgggccgccgagauccgggccagcgccaaccuggccgcaaccaagaugagcgagugcgugcugggccagagcaagcggguggacuuuugcggcaagggcuaccaccugaugagcuucccccagagcgccccacacggcguggucuuccuccacgugacauacgugcccgcccaggagaagaacuucaccaccgcccccgccauuugccacgacggcaaggcccacuucccccgggagggaguguucgugagcaacggcacccacugguucgugacccagcggaacuucuacgagccccagaucaucaccaccgacaacaccuucgugagcggcaacugcgacguggugaucggcaucgugaacaacaccguguacgacccccugcagccugagcuggacagcuucaaggaggagcuggacaaguacuucaagaaccacaccagccccgacguggaucugggcgacaucagcggcaucaacgcuagcguggugaacauccagaaggagaucgaccggcugaacgagguggccaagaaccugaacgagagccugaucgaccugcaggagcugggcaaguacgagcaguacaucaaguggcccugguacaucuggcugggcuucaucgccggccugaucgccaucgugauggugaccaucaugcugugcugcaugaccagcugcuguagcugccugaagggcugcugcagcugcggcagcugcugcaaguucgacgaggacgacagcgagccagugcugaagggcgugaagcugcacuacaccugaggacuagucccuguucccagagcccacuuuuuuuucuuuuuuugaaauaaaauagccugucuuucagaucucaaaggcucuuuucagagccaccaaaaaaaaaaaaaaaaaaaaaaaaaaaaaaaaaaaaaaaaaaaaaaaaaaaaaaaaaaaaaaaaaaaaaaaaaaaaaaaaaaaaaaaaaaaaaaaaaaaaa

SEQ ID NO: 23686 - RNA, 4191 nt, Artificial Sequence
  SARS-CoV-2/Wuhan/WIV05/2019__EPI_ISL_402128 spike protein mRNA gc (1-1273)(N439K_D614G)
aggagagggcgcuuggcuugcaaggacccugagcugcggcauugaagcacacccaacccaacucgacugaagucagccucacugaaccggaucugagaaucuucucucucugggcuugccagggcucuccgaaccuagcuagcauccucuucaauuccaacuagaaagcuuaccauguucguguuccuggugcugcugccccuggugagcagccagugcgugaaccugaccacccggacccagcugcccccugccuacaccaacagcuucacccggggcguguacuaccccgacaagguguuccggagcagcgugcugcacagcacccaggaccuguuccugcccuucuucagcaacgugaccugguuccacgccauccacgugagcggcaccaacggcaccaagcgguucgacaacccagugcugcccuucaacgacggcguguacuucgccagcaccgagaagucaaacaucauccggggcuggaucuucggcaccacccuggacagcaagacacagagccugcugaucgugaacaacgccaccaacguggugaucaaggugugcgaguuucaguucugcaacgaccccuuccugggcguguacuaccacaagaacaacaagagcuggauggagagcgaguuccgggucuacagcagcgcuaacaauugcaccuucgaguacgugagccagcccuuccugauggaccucgagggcaagcagggcaacuucaagaaccugcgggaguucguguucaagaacaucgauggcuacuucaagaucuacagcaagcacacccccaucaaccuggugcgggaccugccccagggauucagcgcccuggagccucugguggaccugcccaucggcaucaacaucaccagguuccagacccugcuggcccugcaccggagcuaccugacccccggcgacagcagcagcggcuggaccgccggcgccgccgcauacuacgugggcuaccugcagccacggaccuuccugcugaaguacaacgagaacggcaccaucaccgacgccguggacugcgcccuggacccccugagcgagaccaagugcacccuaaagagcuucaccguggagaagggcaucuaccagaccagcaacuuccgggugcagcccacugagagcaucgugcgguuccccaacauuaccaaccugugucccuucggcgagguguucaacgccacccgguucgccagcguguacgccuggaaccggaagcggaucagcaacugcguggccgacuacagcgugcuguacaacagcgccagcuucagcaccuucaagugcuacggcgugagcccuaccaagcugaacgaccugugcuucaccaacguguacgcugacagcuucgugauccggggcgacgaggugcggcagaucgcccccggccagaccggcaagaucgccgacuacaacuacaagcugcccgacgacuucaccggcugcgugaucgccuggaacagcaagaaccuggacagcaaggugggcggcaacuacaacuaccuguaccggcuguuccguaagagcaaccugaagccauucgagcgggacaucagcaccgagaucuaccaggccggcagcacccccugcaacgguguggagggcuuuaacugcuacuucccccugcagagcuacggcuuccagcccaccaacggcgugggcuaccagcccuaccgggugguggugcugagcuucgagcugcugcacgcccccgccaccgugugcggcccuaaaaagagcaccaaccuggugaagaacaagugcgugaacuucaacuucaauggccugaccggcaccggcgugcugaccgagagcaacaagaaguuccugcccuuccagcaguucggccgggauaucgccgacaccaccgacgcagugcgggacccccagacccuggagauccuggacaucaccccaugcagcuucggcggcgugagcgucaucacccccggcacaaacaccagcaaccagguggccgugcuguaccagggagugaacugcaccgaggugcccguggccauccacgccgaccagcugacccccaccuggcggguguacagcaccggcagcaacguguuccagacccgggccggcugccugaucggcgccgagcacgugaacaacuccuacgagugcgacauccccaucggcgcuggcaucugcgccagcuaccagacccagaccaacagcccccggcgggcccggagcguggccagccagagcaucaucgccuacaccaugagcuuaggcgccgagaacagcguggccuacagcaacaacagcaucgcgaucccuaccaacuucaccaucagcgugaccaccgagauacugcccgugagcaugaccaagaccagcguggacuguaccauguacaucugcggcgacagcaccgagugcagcaaccugcugcugcaguacggcagcuucugcacccagcugaaccgggcccugaccggcaucgccguggagcaggacaagaacacccaagagguguucgcccaggugaagcagaucuacaagacucccccaaucaaggacuucggcggcuucaacuucagccagauccugcccgaccccagcaagcccagcaagcggagcuucaucgaggaccugcuguucaacaaggugacccuggccgacgccggcuucaucaagcaguacggcgacugccugggggauaucgccgcucgggaccugaucugcgcccagaaguucaacggccugaccgugcugcccccucugcugaccgacgagaugaucgcccaguacaccagcgcccugcuugccggcaccaucaccagcggcuggaccuucggcgccggcgcagcccugcagauccccuucgccaugcagauggccuaccgguucaacggcaucggcgugacccagaacgugcuguacgagaaccagaagcugaucgccaaccaguucaacagcgccaucggcaagauccaggacagccugagcagcaccgccagcgcccugggcaagcugcaggacguggugaaccagaacgcucaggcccugaacacccuggugaagcagcugagcagcaacuucggcgccaucagcucagugcugaacgacauccugagcaggcuggacaagguggaggccgaggugcagaucgaccggcugaucaccggccggcugcagagccugcagaccuacgugacccagcagcugauccgggccgccgagauccgggccagcgccaaucuggcagccaccaagaugagcgagugcgugcugggccagagcaagcggguggacuuuugcggcaagggcuaccaccugaugagcuucccccagagcgccccacacggcgugguguuccuccacgucacauacgugcccgcccaggagaagaacuucaccaccgcccccgccauuugccacgacggcaaggcucacuucccccgggagggaguguucgugagcaacggcacccacugguucgugacccagcggaacuucuacgagccccagaucaucaccaccgacaacaccuucgugagcggcaacugcgacguggugaucggcaucgugaacaacaccguguacgacccccugcagccugagcuggacagcuucaaggaggagcuggacaaguacuucaagaaccacaccagccccgacguggaucugggcgacaucagcggcaucaacgccagcguggugaacauccagaaggagaucgaccggcugaacgagguggccaagaaccugaacgagagccugaucgaccugcaggagcugggcaaguacgagcaguacaucaaguggcccugguacaucuggcugggcuucaucgccggccugaucgccaucgugauggugaccaucaugcugugcugcaugaccagcugcuguagcugccugaagggcugcugcagcugcggcagcugcugcaaguucgacgaggacgacagcgagccagugcugaagggcgugaagcugcacuacaccugaggacuagucccuguucccagagcccacuuuuuuuucuuuuuuugaaauaaaauagccugucuuucagaucucaaaggcucuuuucagagccaccaaaaaaaaaaaaaaaaaaaaaaaaaaaaaaaaaaaaaaaaaaaaaaaaaaaaaaaaaaaaaaaaaaaaaaaaaaaaaaaaaaaaaaaaaaaaaaaaaaaaa

SEQ ID NO: 23687 - RNA, 4191 nt, Artificial Sequence
  SARS-CoV-2/Wuhan/WIV05/2019__EPI_ISL_402128 spike protein mRNA gc (1-1273)(S477N_D614G)
aggagagggcgcuuggcuugcaaggacccugagcugcggcauugaagcacacccaacccaacucgacugaagucagccucacugaaccggaucugagaaucuucucucucugggcuugccagggcucuccgaaccuagcuagcauccucuucaauuccaacuagaaagcuuaccauguucguguuccuggugcugcugccccuggugagcagccagugcgugaaccugaccacccggacccagcugcccccugccuacaccaacagcuucacccggggcguguacuaccccgacaagguguuccggagcagcgugcugcacagcacccaggaccuguuccugcccuucuucagcaacgugaccugguuccacgccauccacgugagcggcaccaacggcaccaagcgguucgacaacccagugcugcccuucaacgacggcguguacuucgccagcaccgagaagucaaacaucauccggggcuggaucuucggcaccacccuggacagcaagacacagagccugcugaucgugaacaacgccaccaacguggugaucaaggugugcgaguuucaguucugcaacgaccccuuccugggcguguacuaccacaagaacaacaagagcuggauggagagcgaguuccgggucuacagcagcgcuaacaauugcaccuucgaguacgugagccagcccuuccugauggaccucgagggcaagcagggcaacuucaagaaccugcgggaguucguguucaagaacaucgauggcuacuucaagaucuacagcaagcacacccccaucaaccuggugcgggaccugccccagggauucagcgcccuggagccucugguggaccugcccaucggcaucaacaucaccagguuccagacccugcuggcccugcaccggagcuaccugacccccggcgacagcagcagcggcuggaccgccggcgccgccgcauacuacgugggcuaccugcagccacggaccuuccugcugaaguacaacgagaacggcaccaucaccgacgccguggacugcgcccuggacccccugagcgagaccaagugcacccuaaagagcuucaccguggagaagggcaucuaccagaccagcaacuuccgggugcagcccacugagagcaucgugcgguuccccaacauuaccaaccugugucccuucggcgagguguucaacgccacccgguucgccagcguguacgccuggaaccggaagcggaucagcaacugcguggccgacuacagcgugcuguacaacagcgccagcuucagcaccuucaagugcuacggcgugagcccuaccaagcugaacgaccugugcuucaccaacguguacgcugacagcuucgugauccggggcgacgaggugcggcagaucgcccccggccagaccggcaagaucgccgacuacaacuacaagcugcccgacgacuucaccggcugcgugaucgccuggaacagcaacaaccuggacagcaaggugggcggcaacuacaacuaccuguaccggcuguuccguaagagcaaccugaagccauucgagcgggacaucagcaccgagaucuaccaggccggcaacacccccugcaacgguguggagggcuuuaacugcuacuucccccugcagagcuacggcuuccagcccaccaacggcgugggcuaccagcccuaccgggugguggugcugagcuucgagcugcugcacgcccccgccaccgugugcggcccuaaaaagagcaccaaccuggugaagaacaagugcgugaauuucaacuucaacggccugaccggcaccggcgugcugaccgagagcaacaagaaguuccugcccuuccagcaguucggccgggauaucgccgacaccaccgacgcagugcgggacccccagacccuggagauccuggacaucaccccaugcagcuucggcggcgugagcgucaucacccccggcacaaacaccagcaaccagguggccgugcuguaccagggagugaacugcaccgaggugcccguggccauccacgccgaccagcugacccccaccuggcggguguacagcaccggcagcaacguguuccagacccgggccggcugccugaucggcgccgagcacgugaacaacagcuacgagugcgacauccccaucggcgcuggcaucugcgccuccuaccagacccagaccaacagcccccggcgggcccggagcguggccagccagagcaucaucgccuacaccaugagcuuaggcgccgagaacagcguggccuacagcaacaacagcaucgcgaucccuaccaacuucaccaucagcgugaccaccgagauacugcccgugagcaugaccaagaccagcguggacuguaccauguacaucugcggcgacagcaccgagugcagcaaccugcugcugcaguacggcagcuucugcacccagcugaaccgggcccugaccggcaucgccguggagcaggacaagaacacccaagagguguucgcccaggugaagcagaucuacaagacucccccaaucaaggacuucggcggcuucaacuucagccagauccugcccgaccccagcaagcccagcaagcggagcuucaucgaggaccugcuguucaacaaggugacccuggccgacgccggcuucaucaagcaguacggcgacugccugggggauaucgccgcucgggaccugaucugcgcccagaaguucaacggccugaccgugcugcccccucugcugaccgacgagaugaucgcccaguacaccagcgcccugcuugccggcaccaucaccagcggcuggaccuucggcgccggcgcagcccugcagauccccuucgccaugcagauggccuaccgguucaacggcaucggcgugacccagaacgugcuguacgagaaccagaagcugaucgccaaccaguucaacagcgccaucggcaagauccaggacagccugagcagcaccgccagcgcccugggcaagcugcaggacguggugaaccagaacgcucaggcccugaacacccuggugaagcagcugagcagcaauuucggcgccaucagcagcgugcugaacgacauccugucaaggcuggacaagguggaggccgaggugcagaucgaccggcugaucaccggccggcugcagagccugcagaccuacgugacccagcagcugauccgggccgccgagauccgggccagcgccaaccuggcagccaccaagaugagcgagugcgugcugggccagagcaagcggguggacuuuugcggcaagggcuaccaccugaugagcuucccccagagcgccccacacggcgugguguuccuccacgucacauacgugcccgcccaggagaagaacuucaccaccgcccccgccauuugccacgacggcaaggcucacuucccccgggagggaguguucgugagcaacggcacccacugguucgugacccagcggaacuucuacgagccccagaucaucaccaccgacaacaccuucgugagcggcaacugcgacguggugaucggcaucgugaacaacaccguguacgacccccugcagccugagcuggacagcuucaaggaggagcuggacaaguacuucaagaaccacaccagccccgacguggaucugggcgacaucagcggcaucaacgccagcguggugaacauccagaaggagaucgaccggcugaacgagguggccaagaaccugaacgagagccugaucgaccugcaggagcugggcaaguacgagcaguacaucaaguggcccugguacaucuggcugggcuucaucgccggccugaucgccaucgugauggugaccaucaugcugugcugcaugaccagcugcuguagcugccugaagggcugcugcagcugcggcagcugcugcaaguucgacgaggacgacagcgagccagugcugaagggcgugaagcugcacuacaccugaggacuagucccuguucccagagcccacuuuuuuuucuuuuuuugaaauaaaauagccugucuuucagaucucaaaggcucuuuucagagccaccaaaaaaaaaaaaaaaaaaaaaaaaaaaaaaaaaaaaaaaaaaaaaaaaaaaaaaaaaaaaaaaaaaaaaaaaaaaaaaaaaaaaaaaaaaaaaaaaaaaaa

SEQ ID NO: 23688 - RNA, 4191 nt, Artificial Sequence
  SARS-CoV-2/Wuhan/WIV05/2019__EPI_ISL_402128 spike protein mRNA gc (1-1273)(N501Y_D614G)
aggagagggcgcuuggcuugcaaggacccugagcugcggcauugaagcacacccaacccaacucgacugaagucagccucacugaaccggaucugagaaucuucucucucugggcuugccagggcucuccgaaccuagcuagcauccucuucaauuccaacuagaaagcuuaccauguucguguuccuggugcugcugccccuggugagcagccagugcgugaaccugaccacccggacccagcugcccccugccuacaccaacagcuucacccggggcguguacuaccccgacaagguguuccggagcagcgugcugcacagcacccaggaccuguuccugcccuucuucagcaacgugaccugguuccacgccauccacgugagcggcaccaacggcaccaagcgguucgacaacccagugcugcccuucaacgacggcguguacuucgccagcaccgagaagucaaacaucauccggggcuggaucuucggcaccacccuggacagcaagacacagagccugcugaucgugaacaacgccaccaacguggugaucaaggugugcgaguuucaguucugcaacgaccccuuccugggcguguacuaccacaagaacaacaagagcuggauggagagcgaguuccgggucuacagcagcgcuaacaauugcaccuucgaguacgugagccagcccuuccugauggaccucgagggcaagcagggcaacuucaagaaccugcgggaguucguguucaagaacaucgauggcuacuucaagaucuacagcaagcacacccccaucaaccuggugcgggaccugccccagggauucagcgcccuggagccucugguggaccugcccaucggcaucaacaucaccagguuccagacccugcuggcccugcaccggagcuaccugacccccggcgacagcagcagcggcuggaccgccggcgccgccgcauacuacgugggcuaccugcagccacggaccuuccugcugaaguacaacgagaacggcaccaucaccgacgccguggacugcgcccuggacccccugagcgagaccaagugcacccuaaagagcuucaccguggagaagggcaucuaccagaccagcaacuuccgggugcagcccacugagagcaucgugcgguuccccaacauuaccaaccugugucccuucggcgagguguucaacgccacccgguucgccagcguguacgccuggaaccggaagcggaucagcaacugcguggccgacuacagcgugcuguacaacagcgccagcuucagcaccuucaagugcuacggcgugagcccuaccaagcugaacgaccugugcuucaccaacguguacgcugacagcuucgugauccggggcgacgaggugcggcagaucgcccccggccagaccggcaagaucgccgacuacaacuacaagcugcccgacgacuucaccggcugcgugaucgccuggaacagcaacaaccuggacagcaaggugggcggcaacuacaacuaccuguaccggcuguuccguaagagcaaccugaagccauucgagcgggacaucagcaccgagaucuaccaggccggcagcacccccugcaacgguguggagggcuuuaacugcuacuucccccugcagagcuacggcuuccagcccaccuacggcgugggcuaccagcccuaccgggugguggugcugagcuucgagcugcugcacgcccccgccaccgugugcggcccuaaaaagagcaccaaccuggugaagaacaagugcgugaacuucaacuucaauggccugaccggcaccggcgugcugaccgagagcaacaagaaguuccugcccuuccagcaguucggccgggauaucgccgacaccaccgacgcagugcgggacccccagacccuggagauccuggacaucaccccaugcagcuucggcggcgugagcgucaucacccccggcacaaacaccagcaaccagguggccgugcuguaccagggagugaacugcaccgaggugcccguggccauccacgccgaccagcugacccccaccuggcggguguacagcaccggcagcaacguguuccagacccgggccggcugccugaucggcgccgagcacgugaacaacuccuacgagugcgacauccccaucggcgcuggcaucugcgccagcuaccagacccagaccaacagcccccggcgggcccggagcguggccagccagagcaucaucgccuacaccaugagcuuaggcgccgagaacagcguggccuacagcaacaacagcaucgcgaucccuaccaacuucaccaucagcgugaccaccgagauacugcccgugagcaugaccaagaccagcguggacuguaccauguacaucugcggcgacagcaccgagugcagcaaccugcugcugcaguacggcagcuucugcacccagcugaaccgggcccugaccggcaucgccguggagcaggacaagaacacccaagagguguucgcccaggugaagcagaucuacaagacucccccaaucaaggacuucggcggcuucaacuucagccagauccugcccgaccccagcaagcccagcaagcggagcuucaucgaggaccugcuguucaacaaggugacccuggccgacgccggcuucaucaagcaguacggcgacugccugggggauaucgccgcucgggaccugaucugcgcccagaaguucaacggccugaccgugcugcccccucugcugaccgacgagaugaucgcccaguacaccagcgcccugcuugccggcaccaucaccagcggcuggaccuucggcgccggcgcagcccugcagauccccuucgccaugcagauggccuaccgguucaacggcaucggcgugacccagaacgugcuguacgagaaccagaagcugaucgccaaccaguucaacagcgccaucggcaagauccaggacagccugagcagcaccgccagcgcccugggcaagcugcaggacguggugaaccagaacgcucaggcccugaacacccuggugaagcagcugagcagcaacuucggcgccaucagcucagugcugaacgacauccugagcaggcuggacaagguggaggccgaggugcagaucgaccggcugaucaccggccggcugcagagccugcagaccuacgugacccagcagcugauccgggccgccgagauccgggccagcgccaaucuggcagccaccaagaugagcgagugcgugcugggccagagcaagcggguggacuuuugcggcaagggcuaccaccugaugagcuucccccagagcgccccacacggcgugguguuccuccacgucacauacgugcccgcccaggagaagaacuucaccaccgcccccgccauuugccacgacggcaaggcucacuucccccgggagggaguguucgugagcaacggcacccacugguucgugacccagcggaacuucuacgagccccagaucaucaccaccgacaacaccuucgugagcggcaacugcgacguggugaucggcaucgugaacaacaccguguacgacccccugcagccugagcuggacagcuucaaggaggagcuggacaaguacuucaagaaccacaccagccccgacguggaucugggcgacaucagcggcaucaacgccagcguggugaacauccagaaggagaucgaccggcugaacgagguggccaagaaccugaacgagagccugaucgaccugcaggagcugggcaaguacgagcaguacaucaaguggcccugguacaucuggcugggcuucaucgccggccugaucgccaucgugauggugaccaucaugcugugcugcaugaccagcugcuguagcugccugaagggcugcugcagcugcggcagcugcugcaaguucgacgaggacgacagcgagccagugcugaagggcgugaagcugcacuacaccugaggacuagucccuguucccagagcccacuuuuuuuucuuuuuuugaaauaaaauagccugucuuucagaucucaaaggcucuuuucagagccaccaaaaaaaaaaaaaaaaaaaaaaaaaaaaaaaaaaaaaaaaaaaaaaaaaaaaaaaaaaaaaaaaaaaaaaaaaaaaaaaaaaaaaaaaaaaaaaaaaaaaa

SEQ ID NO: 23689 - RNA, 4185 nt, Artificial Sequence
  SARS-CoV-2/Wuhan/WIV05/2019__EPI_ISL_402128 spike protein mRNA gc (1-1273)(H69del_V70del_D614G)
aggagagggcgcuuggcuugcaaggacccugagcugcggcauugaagcacacccaacccaacucgacugaagucagccucacugaaccggaucugagaaucuucucucucugggcuugccagggcucuccgaaccuagcuagcauccucuucaauuccaacuagaaagcuuaccauguucguguuccuggugcugcugccccuggugagcagccagugcgugaaccugaccacccggacccagcugcccccugccuacaccaacagcuucacccggggcguguacuaccccgacaagguguuccggagcagcgugcugcacagcacccaggaccuguuccugcccuucuucagcaacgugaccugguuccacgccaucagcggcaccaacggcaccaagcgguucgacaacccagugcugcccuucaacgacggcguguacuucgccagcaccgagaagucaaacaucauccggggcuggaucuucggcaccacccuggacagcaagacacagagccugcugaucgugaacaacgccaccaacguggugaucaaggugugcgaguuucaguucugcaacgaccccuuccugggcguguacuaccacaagaacaacaagagcuggauggagagcgaguuccggguguacagcagcgcuaacaauugcaccuucgaguacgucagccagcccuuccugauggaccucgagggcaagcagggcaacuucaagaaccugcgggaguucguguucaagaacaucgauggcuacuucaagaucuacagcaagcacacccccaucaaccuggugcgggaccugccccagggauucagcgcccuggagccucugguggaccugcccaucggcaucaacaucaccagguuccagacccugcuggcccugcaccggagcuaccugacccccggcgacagcagcagcggcuggaccgccggcgccgccgcauacuacgugggcuaccugcagccacggaccuuccugcugaaguacaacgagaacggcaccaucaccgacgccguggacugcgcccuggacccccugagcgagaccaagugcacccuaaagagcuucaccguggagaagggcaucuaccagaccagcaacuuccgggugcagcccacugagagcaucgugcgguuccccaacauuaccaaccugugucccuucggcgagguguucaacgccacccgguucgccagcguguacgccuggaaccggaagcggaucagcaacugcguggccgacuacagcgugcuguacaacagcgccagcuucagcaccuucaagugcuacggcgugagcccuaccaagcugaacgaccugugcuucaccaacguguacgcugacagcuucgugauccggggcgacgaggugcggcagaucgcccccggccagaccggcaagaucgccgacuacaacuacaagcugcccgacgacuucaccggcugcgugaucgccuggaacagcaacaaccuggacagcaaggugggcggcaacuacaacuaccuguaccggcuguuccguaagagcaaccugaagccauucgagcgggacaucagcaccgagaucuaccaggccggcagcacccccugcaacgguguggagggcuuuaacugcuacuucccccugcagagcuacggcuuccagcccaccaacggcgugggcuaccagcccuaccgggugguggugcugagcuucgagcugcugcacgcccccgccaccgugugcggcccuaaaaagagcaccaaccuggugaagaacaagugcgugaacuucaauuucaacggccugaccggcaccggcgugcugaccgagagcaacaagaaguuccugcccuuccagcaguucggccgggauaucgccgacaccaccgacgcagugcgggacccccagacccuggagauccuggacaucaccccaugcagcuucggcggcgugagcgugaucacccccggcacaaacaccagcaaccaggucgccgugcuguaccagggagugaacugcaccgaggugcccguggccauccacgccgaccagcugacccccaccuggcggguguacagcaccggcagcaacguguuccagacccgggccggcugccugaucggcgccgagcacgugaacaacuccuacgagugcgacauccccaucggcgcuggcaucugcgccagcuaccagacccagaccaacagcccccggcgggcccggagcguggccagccagagcaucaucgccuacaccaugagcuuaggcgccgagaacagcguggccuacagcaacaacagcaucgcgaucccuaccaacuucaccaucagcgugaccaccgagauacugcccgugagcaugaccaagaccagcguggacuguaccauguacaucugcggcgacagcaccgagugcagcaaccugcugcugcaguacggcagcuucugcacccagcugaaccgggcccugaccggcaucgccguggagcaggacaagaacacccaagagguguucgcccaggugaagcagaucuacaagacucccccaaucaaggacuucggcggcuucaacuucagccagauccugcccgaccccagcaagcccagcaagcggagcuucaucgaggaccugcuguucaacaaggugacccuggccgacgccggcuucaucaagcaguacggcgacugccugggggauaucgccgcucgggaccugaucugcgcccagaaguucaacggccugaccgugcugcccccucugcugaccgacgagaugaucgcccaguacaccagcgcccugcuugccggcaccaucaccagcggcuggaccuucggcgccggcgcagcccugcagauccccuucgccaugcagauggccuaccgguucaacggcaucggcgugacccagaacgugcuguacgagaaccagaagcugaucgccaaccaguucaacagcgccaucggcaagauccaggacagccugagcagcaccgccagcgcccugggcaagcugcaggacguggugaaccagaacgcucaggcccugaacacccuggugaagcagcugagcagcaacuucggcgccaucagcucagugcugaaugacauccugagcaggcuggacaagguggaggccgaggugcagaucgaccggcugaucaccggccggcugcagagccugcagaccuacgugacccagcagcugauccgggccgccgagauccgggccagcgccaaccuggcagccaccaagaugagcgagugcgugcugggccagagcaagcggguggacuuuugcggcaagggcuaccaccugaugagcuucccccagagcgccccacacggcgugguguuccuccacgugacauacguccccgcccaggagaagaacuucaccaccgcccccgccauuugccacgacggcaaggcucacuucccccgggagggaguguucgugagcaacggcacccacugguucgugacccagcggaacuucuacgagccccagaucaucaccaccgacaacaccuucgugagcggcaacugcgacguggugaucggcaucgugaacaacaccguguacgacccccugcagccugagcuggacagcuucaaggaggagcuggacaaguacuucaagaaccacaccagccccgacguggaucugggcgacaucagcggcaucaacgccagcguggugaacauccagaaggagaucgaccggcugaacgagguggccaagaaccugaacgagagccugaucgaccugcaggagcugggcaaguacgagcaguacaucaaguggcccugguacaucuggcugggcuucaucgccggccugaucgccaucgugauggugaccaucaugcugugcugcaugaccagcugcuguagcugccugaagggcugcugcagcugcggcagcugcugcaaguucgacgaggacgacagcgagccagugcugaagggcgugaagcugcacuacaccugaggacuagucccuguucccagagcccacuuuuuuuucuuuuuuugaaauaaaauagccugucuuucagaucucaaaggcucuuuucagagccaccaaaaaaaaaaaaaaaaaaaaaaaaaaaaaaaaaaaaaaaaaaaaaaaaaaaaaaaaaaaaaaaaaaaaaaaaaaaaaaaaaaaaaaaaaaaaaaaaaaaaa

SEQ ID NO: 23690 - RNA, 4191 nt, Artificial Sequence
  SARS-CoV-2/Wuhan/WIV05/2019__EPI_ISL_402128 spike protein mRNA gc (1-1273)(Y453F_D614G)
aggagagggcgcuuggcuugcaaggacccugagcugcggcauugaagcacacccaacccaacucgacugaagucagccucacugaaccggaucugagaaucuucucucucugggcuugccagggcucuccgaaccuagcuagcauccucuucaauuccaacuagaaagcuuaccauguucguguuccuggugcugcugccccuggugagcagccagugcgugaaccugaccacccggacccagcugcccccugccuacaccaacagcuucacccggggcguguacuaccccgacaagguguuccggagcagcgugcugcacagcacccaggaccuguuccugcccuucuucagcaacgugaccugguuccacgccauccacgugagcggcaccaacggcaccaagcgguucgacaacccagugcugcccuucaacgacggcguguacuucgccagcaccgagaagucaaacaucauccggggcuggaucuucggcaccacccuggacagcaagacacagagccugcugaucgugaacaacgccaccaacguggugaucaaggugugcgaguuucaguucugcaacgaccccuuccugggcguguacuaccacaagaacaacaagagcuggauggagagcgaguuccgggucuacagcagcgcuaacaauugcaccuucgaguacgugagccagcccuuccugauggaccucgagggcaagcagggcaacuucaagaaccugcgggaguucguguucaagaacaucgauggcuacuucaagaucuacagcaagcacacccccaucaaccuggugcgggaccugccccagggauucagcgcccuggagccucugguggaccugcccaucggcaucaacaucaccagguuccagacccugcuggcccugcaccggagcuaccugacccccggcgacagcagcagcggcuggaccgccggcgccgccgcauacuacgugggcuaccugcagccacggaccuuccugcugaaguacaacgagaacggcaccaucaccgacgccguggacugcgcccuggacccccugagcgagaccaagugcacccuaaagagcuucaccguggagaagggcaucuaccagaccagcaacuuccgggugcagcccacugagagcaucgugcgguuccccaacauuaccaaccugugucccuucggcgagguguucaacgccacccgguucgccagcguguacgccuggaaccggaagcggaucagcaacugcguggccgacuacagcgugcuguacaacagcgccagcuucagcaccuucaagugcuacggcgugagcccuaccaagcugaacgaccugugcuucaccaacguguacgcugacagcuucgugauccggggcgacgaggugcggcagaucgcccccggccagaccggcaagaucgccgacuacaacuacaagcugcccgacgacuucaccggcugcgugaucgccuggaacagcaacaaccuggacagcaaggugggcggcaacuacaacuaccuguuccggcuguuccguaagagcaaccugaagccauuugagcgggacaucagcaccgagaucuaccaggccggcagcacccccugcaacgguguggagggcuucaacugcuacuucccccugcagagcuacggcuuccagcccaccaacggcgugggcuaccagcccuaccgggugguggugcugagcuucgagcugcugcacgcccccgccaccgugugcggcccuaaaaagagcaccaaccuggugaagaacaagugcgugaacuucaauuucaacggccugaccggcaccggcgugcugaccgagagcaacaagaaguuccugcccuuccagcaguucggccgggauaucgccgacaccaccgacgcagugcgggacccccagacccuggagauccuggacaucaccccaugcagcuucggcggcgugagcgucaucacccccggcacaaacaccagcaaccagguggccgugcuguaccagggagugaacugcaccgaggugcccguggccauccacgccgaccagcugacccccaccuggcggguguacagcaccggcagcaacguguuccagacccgggccggcugccugaucggcgccgagcacgugaacaacuccuacgagugcgacauccccaucggcgcuggcaucugcgccagcuaccagacccagaccaacagcccccggcgggcccggagcguggccagccagagcaucaucgccuacaccaugagcuuaggcgccgagaacagcguggccuacagcaacaacagcaucgcgaucccuaccaacuucaccaucagcgugaccaccgagauacugcccgugagcaugaccaagaccagcguggacuguaccauguacaucugcggcgacagcaccgagugcagcaaccugcugcugcaguacggcagcuucugcacccagcugaaccgggcccugaccggcaucgccguggagcaggacaagaacacccaagagguguucgcccaggugaagcagaucuacaagacucccccaaucaaggacuucggcggcuucaacuucagccagauccugcccgaccccagcaagcccagcaagcggagcuucaucgaggaccugcuguucaacaaggugacccuggccgacgccggcuucaucaagcaguacggcgacugccugggggauaucgccgcucgggaccugaucugcgcccagaaguucaacggccugaccgugcugcccccucugcugaccgacgagaugaucgcccaguacaccagcgcccugcuugccggcaccaucaccagcggcuggaccuucggcgccggcgcagcccugcagauccccuucgccaugcagauggccuaccgguucaacggcaucggcgugacccagaacgugcuguacgagaaccagaagcugaucgccaaccaguucaacagcgccaucggcaagauccaggacagccugagcagcaccgccagcgcccugggcaagcugcaggacguggugaaccagaacgcucaggcccugaacacccuggugaagcagcugagcagcaacuuuggcgccaucagcucagugcugaaugacauccugagcaggcuggacaagguggaggccgaggugcagaucgaccggcugaucaccggccggcugcagagccugcagaccuacgugacccagcagcugauccgggccgccgagauccgggccagcgccaaccuggcagccaccaagaugagcgagugcgugcugggccagagcaagcggguggacuucugcggcaagggcuaccaccugaugagcuucccccagagcgccccacacggcgugguguuccuccacgucacauacgugcccgcccaggagaagaacuucaccaccgcccccgccauuugccacgacggcaaggcucacuucccccgggagggaguguucgugagcaacggcacccacugguucgugacccagcggaacuucuacgagccccagaucaucaccaccgacaacaccuucgugagcggcaacugcgacguggugaucggcaucgugaacaacaccguguacgacccccugcagccugagcuggacagcuucaaggaggagcuggacaaguacuucaagaaccacaccagccccgacguggaucugggcgacaucagcggcaucaacgccagcguggugaacauccagaaggagaucgaccggcugaacgagguggccaagaaccugaacgagagccugaucgaccugcaggagcugggcaaguacgagcaguacaucaaguggcccugguacaucuggcugggcuucaucgccggccugaucgccaucgugauggugaccaucaugcugugcugcaugaccagcugcuguagcugccugaagggcugcugcagcugcggcagcugcugcaaguucgacgaggacgacagcgagccagugcugaagggcgugaagcugcacuacaccugaggacuagucccuguucccagagcccacuuuuuuuucuuuuuuugaaauaaaauagccugucuuucagaucucaaaggcucuuuucagagccaccaaaaaaaaaaaaaaaaaaaaaaaaaaaaaaaaaaaaaaaaaaaaaaaaaaaaaaaaaaaaaaaaaaaaaaaaaaaaaaaaaaaaaaaaaaaaaaaaaaaaa

SEQ ID NO: 23691 - RNA, 4191 nt, Artificial Sequence
  SARS-CoV-2/Wuhan/WIV05/2019__EPI_ISL_402128 spike protein mRNA gc (1-1273)(D614G_I692V)
aggagagggcgcuuggcuugcaaggacccugagcugcggcauugaagcacacccaacccaacucgacugaagucagccucacugaaccggaucugagaaucuucucucucugggcuugccagggcucuccgaaccuagcuagcauccucuucaauuccaacuagaaagcuuaccauguucguguuccuggugcugcugccccuggugagcagccagugcgugaaccugaccacccggacccagcugcccccugccuacaccaacagcuucacccggggcguguacuaccccgacaagguguuccggagcagcgugcugcacagcacccaggaccuguuccugcccuucuucagcaacgugaccugguuccacgccauccacgugagcggcaccaacggcaccaagcgguucgacaacccagugcugcccuucaacgacggcguguacuucgccagcaccgagaagucaaacaucauccggggcuggaucuucggcaccacccuggacagcaagacacagagccugcugaucgugaacaacgccaccaacguggugaucaaggugugcgaguuucaguucugcaacgaccccuuccugggcguguacuaccacaagaacaacaagagcuggauggagagcgaguuccgggucuacagcagcgcuaacaauugcaccuucgaguacgugagccagcccuuccugauggaccucgagggcaagcagggcaacuucaagaaccugcgggaguucguguucaagaacaucgauggcuacuucaagaucuacagcaagcacacccccaucaaccuggugcgggaccugccccagggauucagcgcccuggagccucugguggaccugcccaucggcaucaacaucaccagguuccagacccugcuggcccugcaccggagcuaccugacccccggcgacagcagcagcggcuggaccgccggcgccgccgcauacuacgugggcuaccugcagccacggaccuuccugcugaaguacaacgagaacggcaccaucaccgacgccguggacugcgcccuggacccccugagcgagaccaagugcacccuaaagagcuucaccguggagaagggcaucuaccagaccagcaacuuccgggugcagcccacugagagcaucgugcgguuccccaacauuaccaaccugugucccuucggcgagguguucaacgccacccgguucgccagcguguacgccuggaaccggaagcggaucagcaacugcguggccgacuacagcgugcuguacaacagcgccagcuucagcaccuucaagugcuacggcgugagcccuaccaagcugaacgaccugugcuucaccaacguguacgcugacagcuucgugauccggggcgacgaggugcggcagaucgcccccggccagaccggcaagaucgccgacuacaacuacaagcugcccgacgacuucaccggcugcgugaucgccuggaacagcaacaaccuggacagcaaggugggcggcaacuacaacuaccuguaccggcuguuccguaagagcaaccugaagccauucgagcgggacaucagcaccgagaucuaccaggccggcagcacccccugcaacgguguggagggcuuuaacugcuacuucccccugcagagcuacggcuuccagcccaccaacggcgugggcuaccagcccuaccgggugguggugcugagcuucgagcugcugcacgcccccgccaccgugugcggcccuaaaaagagcaccaaccuggugaagaacaagugcgugaacuucaauuucaacggccugaccggcaccggcgugcugaccgagagcaacaagaaguuccugcccuuccagcaguucggccgggauaucgccgacaccaccgacgcagugcgggacccccagacccuggagauccuggacaucaccccaugcagcuucggcggcgugagcgucaucacccccggcacaaacaccagcaaccagguggccgugcuguaccagggagugaacugcaccgaggugcccguggccauccacgccgaccagcugacccccaccuggcggguguacagcaccggcagcaacguguuccagacccgggccggcugccugaucggcgccgagcacgugaacaacuccuacgagugcgacauccccaucggcgcuggcaucugcgccagcuaccagacccagaccaacagcccccggcgggcccggagcguggccagccagagcgugaucgccuacaccaugagcuuaggcgccgagaacagcguggccuacagcaacaacagcaucgcgaucccuaccaacuucaccaucagcgugaccaccgagauccugcccgugagcaugaccaagaccagcguggacuguaccauguacauaugcggcgacagcaccgagugcagcaaccugcugcugcaguacggcagcuucugcacccagcugaaccgggcccugaccggcaucgccguggagcaggacaagaacacccaagagguguucgcccaggugaagcagaucuacaagacucccccaaucaaggacuucggcggcuucaacuucagccagauccugcccgaccccagcaagcccagcaagcggagcuucaucgaggaccugcuguucaacaaggugacccuggccgacgccggcuucaucaagcaguacggcgacugccugggggauaucgccgcucgggaccugaucugcgcccagaaguucaacggccugaccgugcugcccccucugcugaccgacgagaugaucgcccaguacaccagcgcccugcuugccggcaccaucaccagcggcuggaccuucggcgccggcgcagcccugcagauccccuucgccaugcagauggccuaccgguucaacggcaucggcgugacccagaacgugcuguacgagaaccagaagcugaucgccaaccaguucaacagcgccaucggcaagauccaggacagccugagcagcaccgccagcgcccugggcaagcugcaggacguggugaaccagaacgcucaggcccugaacacccuggugaagcagcugagcagcaacuucggcgccaucagcucagugcugaaugacauccugagcaggcuggacaagguggaggccgaggugcagaucgaccggcugaucaccggccggcugcagagccugcagaccuacgugacccagcagcugauccgggccgccgagauccgggccagcgccaaccuggcagccaccaagaugagcgagugcgugcugggccagagcaagcggguggacuuuugcggcaagggcuaccaccugaugagcuucccccagagcgccccacacggcguggucuuccuccacgugacauacgugcccgcccaggagaagaacuucaccaccgcccccgccaucugccacgacggcaaggcucacuucccccgggagggaguguucgugagcaacggcacccacugguucgugacccagcggaacuucuacgagccccagauuaucaccaccgacaacaccuucgugagcggcaacugcgacguggugaucggcaucgugaacaacaccguguacgacccccugcagccugagcuggacagcuucaaggaggagcuggacaaguacuucaagaaccacaccagccccgacguggaucugggcgacaucagcggcaucaacgccagcguggugaacauccagaaggagaucgaccggcugaacgagguggccaagaaccugaacgagagccugaucgaccugcaggagcugggcaaguacgagcaguacaucaaguggcccugguacaucuggcugggcuucaucgccggccugaucgccaucgugauggugaccaucaugcugugcugcaugaccagcugcuguagcugccugaagggcugcugcagcugcggcagcugcugcaaguucgacgaggacgacagcgagccagugcugaagggcgugaagcugcacuacaccugaggacuagucccuguucccagagcccacuuuuuuuucuuuuuuugaaauaaaauagccugucuuucagaucucaaaggcucuuuucagagccaccaaaaaaaaaaaaaaaaaaaaaaaaaaaaaaaaaaaaaaaaaaaaaaaaaaaaaaaaaaaaaaaaaaaaaaaaaaaaaaaaaaaaaaaaaaaaaaaaaaaaa

SEQ ID NO: 23692 - RNA, 4191 nt, Artificial Sequence
  SARS-CoV-2/Wuhan/WIV05/2019__EPI_ISL_402128 spike protein mRNA gc (1-1273)(D614G_M1229I)
aggagagggcgcuuggcuugcaaggacccugagcugcggcauugaagcacacccaacccaacucgacugaagucagccucacugaaccggaucugagaaucuucucucucugggcuugccagggcucuccgaaccuagcuagcauccucuucaauuccaacuagaaagcuuaccauguucguguuccuggugcugcugccccuggugagcagccagugcgugaaccugaccacccggacccagcugcccccugccuacaccaacagcuucacccggggcguguacuaccccgacaagguguuccggagcagcgugcugcacagcacccaggaccuguuccugcccuucuucagcaacgugaccugguuccacgccauccacgugagcggcaccaacggcaccaagcgguucgacaacccagugcugcccuucaacgacggcguguacuucgccagcaccgagaagucaaacaucauccggggcuggaucuucggcaccacccuggacagcaagacacagagccugcugaucgugaacaacgccaccaacguggugaucaaggugugcgaguuucaguucugcaacgaccccuuccugggcguguacuaccacaagaacaacaagagcuggauggagagcgaguuccgggucuacagcagcgcuaacaauugcaccuucgaguacgugagccagcccuuccugauggaccucgagggcaagcagggcaacuucaagaaccugcgggaguucguguucaagaacaucgauggcuacuucaagaucuacagcaagcacacccccaucaaccuggugcgggaccugccccagggauucagcgcccuggagccucugguggaccugcccaucggcaucaacaucaccagguuccagacccugcuggcccugcaccggagcuaccugacccccggcgacagcagcagcggcuggaccgccggcgccgccgcauacuacgugggcuaccugcagccacggaccuuccugcugaaguacaacgagaacggcaccaucaccgacgccguggacugcgcccuggacccccugagcgagaccaagugcacccuaaagagcuucaccguggagaagggcaucuaccagaccagcaacuuccgggugcagcccacugagagcaucgugcgguuccccaacauuaccaaccugugucccuucggcgagguguucaacgccacccgguucgccagcguguacgccuggaaccggaagcggaucagcaacugcguggccgacuacagcgugcuguacaacagcgccagcuucagcaccuucaagugcuacggcgugagcccuaccaagcugaacgaccugugcuucaccaacguguacgcugacagcuucgugauccggggcgacgaggugcggcagaucgcccccggccagaccggcaagaucgccgacuacaacuacaagcugcccgacgacuucaccggcugcgugaucgccuggaacagcaacaaccuggacagcaaggugggcggcaacuacaacuaccuguaccggcuguuccguaagagcaaccugaagccauucgagcgggacaucagcaccgagaucuaccaggccggcagcacccccugcaacgguguggagggcuuuaacugcuacuucccccugcagagcuacggcuuccagcccaccaacggcgugggcuaccagcccuaccgggugguggugcugagcuucgagcugcugcacgcccccgccaccgugugcggcccuaaaaagagcaccaaccuggugaagaacaagugcgugaacuucaauuucaacggccugaccggcaccggcgugcugaccgagagcaacaagaaguuccugcccuuccagcaguucggccgggauaucgccgacaccaccgacgcagugcgggacccccagacccuggagauccuggacaucaccccaugcagcuucggcggcgugagcgucaucacccccggcacaaacaccagcaaccagguggccgugcuguaccagggagugaacugcaccgaggugcccguggccauccacgccgaccagcugacccccaccuggcggguguacagcaccggcagcaacguguuccagacccgggccggcugccugaucggcgccgagcacgugaacaacuccuacgagugcgacauccccaucggcgcuggcaucugcgccagcuaccagacccagaccaacagcccccggcgggcccggagcguggccagccagagcaucaucgccuacaccaugagcuuaggcgccgagaacagcguggccuacagcaacaacagcaucgcgaucccuaccaacuucaccaucagcgugaccaccgagauacugcccgugagcaugaccaagaccagcguggacuguaccauguacaucugcggcgacagcaccgagugcagcaaccugcugcugcaguacggcagcuucugcacccagcugaaccgggcccugaccggcaucgccguggagcaggacaagaacacccaagagguguucgcccaggugaagcagaucuacaagacucccccaaucaaggacuucggcggcuucaacuucagccagauccugcccgaccccagcaagcccagcaagcggagcuucaucgaggaccugcuguucaacaaggugacccuggccgacgccggcuucaucaagcaguacggcgacugccugggggauaucgccgcucgggaccugaucugcgcccagaaguucaacggccugaccgugcugcccccucugcugaccgacgagaugaucgcccaguacaccagcgcccugcuugccggcaccaucaccagcggcuggaccuucggcgccggcgcagcccugcagauccccuucgccaugcagauggccuaccgguucaacggcaucggcgugacccagaacgugcuguacgagaaccagaagcugaucgccaaccaguucaacagcgccaucggcaagauccaggacagccugagcagcaccgccagcgcccugggcaagcugcaggacguggugaaccagaacgcucaggcccugaacacccuggugaagcagcugagcagcaacuucggcgccaucagcucagugcugaaugacauccugagcaggcuggacaagguggaggccgaggugcagaucgaccggcugaucaccggccggcugcagagccugcagaccuacgugacccagcagcugauccgggccgccgagauccgggccagcgccaaccuggcagccaccaagaugagcgagugcgugcugggccagagcaagcggguggacuuuugcggcaagggcuaccaccugaugagcuucccccagagcgccccacacggcgugguguuccuccacgucacauacgugcccgcccaggagaagaacuucaccaccgcccccgccauuugccacgacggcaaggcucacuucccccgggagggaguguucgugagcaacggcacccacugguucgugacccagcggaacuucuacgagccccagaucaucaccaccgacaacaccuucgugagcggcaacugcgacguggugaucggcaucgugaacaacaccguguacgacccccugcagccugagcuggacagcuucaaggaggagcuggacaaguacuucaagaaccacaccagccccgacguggaucugggcgacaucagcggcaucaacgccagcguggugaacauccagaaggagaucgaccggcugaacgagguggccaagaaccugaacgagagccugaucgaccugcaggagcugggcaaguacgagcaguacaucaaguggcccugguacaucuggcugggcuucaucgccggccugaucgccaucgugaucgugaccaucaugcugugcugcaugaccagcugcuguagcugccugaagggcugcugcagcugcggcagcugcugcaaguucgacgaggacgacagcgagccagugcugaagggcgugaagcugcacuacaccugaggacuagucccuguucccagagcccacuuuuuuuucuuuuuuugaaauaaaauagccugucuuucagaucucaaaggcucuuuucagagccaccaaaaaaaaaaaaaaaaaaaaaaaaaaaaaaaaaaaaaaaaaaaaaaaaaaaaaaaaaaaaaaaaaaaaaaaaaaaaaaaaaaaaaaaaaaaaaaaaaaaaa

SEQ ID NO: 23693 - RNA, 4185 nt, Artificial Sequence
  SARS-CoV-2/Wuhan/WIV05/2019__EPI_ISL_402128 spike protein mRNA gc (1-1273)(H69del_V70del_A222V_Y453F_S477N_D614G_I692V)
aggagagggcgcuuggcuugcaaggacccugagcugcggcauugaagcacacccaacccaacucgacugaagucagccucacugaaccggaucugagaaucuucucucucugggcuugccagggcucuccgaaccuagcuagcauccucuucaauuccaacuagaaagcuuaccauguucguguuccuggugcugcugccccuggugagcagccagugcgugaaccugaccacccggacccagcugcccccugccuacaccaacagcuucacccggggcguguacuaccccgacaagguguuccggagcagcgugcugcacagcacccaggaccuguuccugcccuucuucagcaacgugaccugguuccacgccaucagcggcaccaacggcaccaagcgguucgacaacccagugcugcccuucaacgacggcguguacuucgccagcaccgagaagucaaacaucauccggggcuggaucuucggcaccacccuggacagcaagacacagagccugcugaucgugaacaacgccaccaacguggugaucaaggugugcgaguuucaguucugcaacgaccccuuccugggcguguacuaccacaagaacaacaagagcuggauggagagcgaguuccggguguacagcagcgcuaacaauugcaccuucgaguacgucagccagcccuuccugauggaccucgagggcaagcagggcaacuucaagaaccugcgggaguucguguucaagaacaucgauggcuacuucaagaucuacagcaagcacacccccaucaaccuggugcgggaccugccccagggauucagcgugcuggagccucugguggaccugcccaucggcaucaacaucaccagguuccagacccugcuggcccugcaccggagcuaccugacccccggcgacagcagcagcggcuggaccgccggcgccgccgccuacuacgugggcuaccugcagccacggaccuuccugcugaaguacaacgagaacggcaccaucaccgacgcaguggacugcgcccuggacccccugagcgagaccaagugcacccuaaagagcuucaccguggagaagggcaucuaccagaccagcaacuuccgggugcagcccacugagagcaucgugcgguuccccaacauuaccaaccugugucccuucggcgagguguucaacgccacccgguucgccagcguguacgccuggaaccggaagcggaucagcaacugcguggccgacuacagcgugcuguacaacagcgccagcuucagcaccuucaagugcuacggcgugagcccuaccaagcugaacgaccugugcuucaccaacguguacgccgacagcuucgugauccggggcgacgaggugcggcagaucgcucccggccagaccggcaagaucgccgacuacaacuacaagcugcccgacgacuucaccggcugcgugaucgccuggaacagcaacaaccuggacagcaaggugggcggcaacuacaacuaccuguuccggcuguuccguaagagcaaccugaagccauuugagcgggacaucagcaccgagaucuaccaggccggcaacacccccugcaacgguguggagggcuucaacugcuacuucccccugcagagcuacggcuuccagcccaccaacggcgugggcuaccagcccuaccgggugguggugcugagcuucgagcugcugcacgcccccgccaccgugugcggcccuaaaaagagcaccaaccuggugaagaacaagugcgugaauuucaacuucaacggccugaccggcaccggcgugcugaccgagagcaacaagaaguuccugcccuuccagcaguucggccgggauaucgccgacaccaccgacgccgugcgggacccccagacccuggagauccuggacaucaccccaugcagcuucggcggcgugagcgucaucacccccggcacaaacaccagcaaccagguggcagugcuguaccagggagugaacugcaccgaggugcccguggccauccacgccgaccagcugacccccaccuggcggguguacagcaccggcagcaacguguuccagacccgggccggcugccugaucggcgccgagcacgugaacaacagcuacgagugcgacauccccaucggcgccggcaucugcgcuuccuaccagacccagaccaacagcccccggcgggcccggagcguggccagccagagcgugaucgccuacaccaugagcuuaggcgccgagaacagcguggccuacagcaacaacagcaucgccaucccuaccaacuucaccaucagcgugaccaccgagauccugcccgugagcaugaccaagaccagcguggacuguaccauguacauaugcggcgacagcaccgagugcagcaaccugcugcugcaguacggcagcuucugcacccagcugaaccgggcgcugaccggcaucgccguggagcaggacaagaacacccaagagguguucgcccaggugaagcagaucuacaagacucccccaaucaaggacuucggcggcuucaacuucagccagauccugcccgaccccagcaagcccagcaagcggagcuucaucgaggaccugcuguucaacaaggugacccuggccgacgccggcuucaucaagcaguacggcgacugccugggggauaucgccgcccgggaccugaucugcgcucagaaguucaacggccugaccgugcugcccccucugcugaccgacgagaugaucgcccaguacaccagcgcccugcuugccggcaccaucaccagcggcuggaccuucggcgccggcgccgcacugcagauccccuucgccaugcagauggccuaccgguucaacggcaucggcgugacccagaacgugcuguacgagaaccagaagcugaucgccaaccaguucaacagcgccaucggcaagauccaggacagccugagcagcaccgccagcgcccugggcaagcugcaggacguggugaaccagaacgcccaggcucugaacacccuggugaagcagcugagcagcaauuuuggcgccaucagcagcgugcugaacgacauccugucaaggcuggacaagguggaggccgaggugcagaucgaccggcugaucaccggccggcugcagagccugcagaccuacgugacccagcagcugauccgggccgccgagauccgggccagcgccaaccuggccgcaaccaagaugagcgagugcgugcugggccagagcaagcggguggacuucugcggcaagggcuaccaccugaugagcuucccccagagcgccccacacggcguggucuuccuccacgugacauacgugcccgcccaggagaagaacuucaccaccgcccccgccaucugccacgacggcaaggcccacuucccccgggagggaguguucgugagcaacggcacccacugguucgugacccagcggaacuucuacgagccccagauuaucaccaccgacaacaccuucgugagcggcaacugcgacguggugaucggcaucgugaacaacaccguguacgacccccugcagccugagcuggacagcuucaaggaggagcuggacaaguacuucaagaaccacaccagccccgacguggaucugggcgacaucagcggcaucaacgcuagcguggugaacauccagaaggagaucgaccggcugaacgagguggccaagaaccugaacgagagccugaucgaccugcaggagcugggcaaguacgagcaguacaucaaguggcccugguacaucuggcugggcuucaucgccggccugaucgccaucgugauggugaccaucaugcugugcugcaugaccagcugcuguagcugccugaagggcugcugcagcugcggcagcugcugcaaguucgacgaggacgacagcgagccagugcugaagggcgugaagcugcacuacaccugaggacuagucccuguucccagagcccacuuuuuuuucuuuuuuugaaauaaaauagccugucuuucagaucucaaaggcucuuuucagagccaccaaaaaaaaaaaaaaaaaaaaaaaaaaaaaaaaaaaaaaaaaaaaaaaaaaaaaaaaaaaaaaaaaaaaaaaaaaaaaaaaaaaaaaaaaaaaaaaaaaaaa

SEQ ID NO: 23694 - RNA, 4185 nt, Artificial Sequence
  SARS-CoV-2/Wuhan/WIV05/2019__EPI_ISL_402128 spike protein mRNA gc (1-1273)(H69del_V70del_Y453F_D614G_I692V_M1229I)
aggagagggcgcuuggcuugcaaggacccugagcugcggcauugaagcacacccaacccaacucgacugaagucagccucacugaaccggaucugagaaucuucucucucugggcuugccagggcucuccgaaccuagcuagcauccucuucaauuccaacuagaaagcuuaccauguucguguuccuggugcugcugccccuggugagcagccagugcgugaaccugaccacccggacccagcugcccccugccuacaccaacagcuucacccggggcguguacuaccccgacaagguguuccggagcagcgugcugcacagcacccaggaccuguuccugcccuucuucagcaacgugaccugguuccacgccaucagcggcaccaacggcaccaagcgguucgacaacccagugcugcccuucaacgacggcguguacuucgccagcaccgagaagucaaacaucauccggggcuggaucuucggcaccacccuggacagcaagacacagagccugcugaucgugaacaacgccaccaacguggugaucaaggugugcgaguuucaguucugcaacgaccccuuccugggcguguacuaccacaagaacaacaagagcuggauggagagcgaguuccggguguacagcagcgcuaacaauugcaccuucgaguacgucagccagcccuuccugauggaccucgagggcaagcagggcaacuucaagaaccugcgggaguucguguucaagaacaucgauggcuacuucaagaucuacagcaagcacacccccaucaaccuggugcgggaccugccccagggauucagcgcccuggagccucugguggaccugcccaucggcaucaacaucaccagguuccagacccugcuggcccugcaccggagcuaccugacccccggcgacagcagcagcggcuggaccgccggcgccgccgcauacuacgugggcuaccugcagccacggaccuuccugcugaaguacaacgagaacggcaccaucaccgacgccguggacugcgcccuggacccccugagcgagaccaagugcacccuaaagagcuucaccguggagaagggcaucuaccagaccagcaacuuccgggugcagcccacugagagcaucgugcgguuccccaacauuaccaaccugugucccuucggcgagguguucaacgccacccgguucgccagcguguacgccuggaaccggaagcggaucagcaacugcguggccgacuacagcgugcuguacaacagcgccagcuucagcaccuucaagugcuacggcgugagcccuaccaagcugaacgaccugugcuucaccaacguguacgcugacagcuucgugauccggggcgacgaggugcggcagaucgcccccggccagaccggcaagaucgccgacuacaacuacaagcugcccgacgacuucaccggcugcgugaucgccuggaacagcaacaaccuggacagcaaggugggcggcaacuacaacuaccuguuccggcuguuccguaagagcaaccugaagccauuugagcgggacaucagcaccgagaucuaccaggccggcagcacccccugcaacgguguggagggcuucaacugcuacuucccccugcagagcuacggcuuccagcccaccaacggcgugggcuaccagcccuaccgggugguggugcugagcuucgagcugcugcacgcccccgccaccgugugcggcccuaaaaagagcaccaaccuggugaagaacaagugcgugaacuucaauuucaacggccugaccggcaccggcgugcugaccgagagcaacaagaaguuccugcccuuccagcaguucggccgggauaucgccgacaccaccgacgcagugcgggacccccagacccuggagauccuggacaucaccccaugcagcuucggcggcgugagcgugaucacccccggcacaaacaccagcaaccaggucgccgugcuguaccagggagugaacugcaccgaggugcccguggccauccacgccgaccagcugacccccaccuggcggguguacagcaccggcagcaacguguuccagacccgggccggcugccugaucggcgccgagcacgugaacaacuccuacgagugcgacauccccaucggcgcuggcaucugcgccagcuaccagacccagaccaacagcccccggcgggcccggagcguggccagccagagcgugaucgccuacaccaugagcuuaggcgccgagaacagcguggccuacagcaacaacagcaucgcgaucccuaccaacuucaccaucagcgugaccaccgagauccugcccgugagcaugaccaagaccagcguggacuguaccauguacauaugcggcgacagcaccgagugcagcaaccugcugcugcaguacggcagcuucugcacccagcugaaccgggcccugaccggcaucgccguggagcaggacaagaacacccaagagguguucgcccaggugaagcagaucuacaagacucccccaaucaaggacuucggcggcuucaacuucagccagauccugcccgaccccagcaagcccagcaagcggagcuucaucgaggaccugcuguucaacaaggugacccuggccgacgccggcuucaucaagcaguacggcgacugccugggggauaucgccgcucgggaccugaucugcgcccagaaguucaacggccugaccgugcugcccccucugcugaccgacgagaugaucgcccaguacaccagcgcccugcuugccggcaccaucaccagcggcuggaccuucggcgccggcgcagcccugcagauccccuucgccaugcagauggccuaccgguucaacggcaucggcgugacccagaacgugcuguacgagaaccagaagcugaucgccaaccaguucaacagcgccaucggcaagauccaggacagccugagcagcaccgccagcgcccugggcaagcugcaggacguggugaaccagaacgcucaggcccugaacacccuggugaagcagcugagcagcaacuuuggcgccaucagcucagugcugaaugacauccugagcaggcuggacaagguggaggccgaggugcagaucgaccggcugaucaccggccggcugcagagccugcagaccuacgugacccagcagcugauccgggccgccgagauccgggccagcgccaaccuggcagccaccaagaugagcgagugcgugcugggccagagcaagcggguggacuucugcggcaagggcuaccaccugaugagcuucccccagagcgccccacacggcgugguguuccuccacgucacauacgugcccgcccaggagaagaacuucaccaccgcccccgccaucugccacgacggcaaggcucacuucccccgggagggaguguucgugagcaacggcacccacugguucgugacccagcggaacuucuacgagccccagauuaucaccaccgacaacaccuucgugagcggcaacugcgacguggugaucggcaucgugaacaacaccguguacgacccccugcagccugagcuggacagcuucaaggaggagcuggacaaguacuucaagaaccacaccagccccgacguggaucugggcgacaucagcggcaucaacgccagcguggugaacauccagaaggagaucgaccggcugaacgagguggccaagaaccugaacgagagccugaucgaccugcaggagcugggcaaguacgagcaguacaucaaguggcccugguacaucuggcugggcuucaucgccggccugaucgccaucgugaucgugaccaucaugcugugcugcaugaccagcugcuguagcugccugaagggcugcugcagcugcggcagcugcugcaaguucgacgaggacgacagcgagccagugcugaagggcgugaagcugcacuacaccugaggacuagucccuguucccagagcccacuuuuuuuucuuuuuuugaaauaaaauagccugucuuucagaucucaaaggcucuuuucagagccaccaaaaaaaaaaaaaaaaaaaaaaaaaaaaaaaaaaaaaaaaaaaaaaaaaaaaaaaaaaaaaaaaaaaaaaaaaaaaaaaaaaaaaaaaaaaaaaaaaaaaa

SEQ ID NO: 23695 - RNA, 4182 nt, Artificial Sequence
  SARS-CoV-2/Wuhan/WIV05/2019__EPI_ISL_402128 spike protein mRNA gc (1-1273)(H69del_V70del_Y144del_N501Y_A570D_D614G_P681H_T716I_S982 A_D1118H)
aggagagggcgcuuggcuugcaaggacccugagcugcggcauugaagcacacccaacccaacucgacugaagucagccucacugaaccggaucugagaaucuucucucucugggcuugccagggcucuccgaaccuagcuagcauccucuucaauuccaacuagaaagcuuaccauguucguguuccuggugcugcugccccuggugagcagccagugcgugaaccugaccacccggacccagcugcccccugccuacaccaacagcuucacccggggcguguacuaccccgacaagguguuccggagcagcgugcugcacagcacccaggaccuguuccugcccuucuucagcaacgugaccugguuccacgccaucagcggcaccaacggcaccaagcgguucgacaacccagugcugcccuucaacgacggcguguacuucgccagcaccgagaagucaaacaucauccggggcuggaucuucggcaccacccuggacagcaagacacagagccugcugaucgugaacaacgccaccaacguggugaucaaggugugcgaguuucaguucugcaacgaccccuuccugggcguguaccacaagaacaacaagagcuggauggagagcgaguuccggguguacagcagcgcuaacaauugcaccuucgaguacgucagccagcccuuccugauggaccucgagggcaagcagggcaacuucaagaaccugcgggaguucguguucaagaacaucgauggcuacuucaagaucuacagcaagcacacccccaucaaccuggugcgggaccugccccagggauucagcgcccuggagccucugguggaccugcccaucggcaucaacaucaccagguuccagacccugcuggcccugcaccggagcuaccugacccccggcgacagcagcagcggcuggaccgccggcgccgccgcauacuacgugggcuaccugcagccacggaccuuccugcugaaguacaacgagaacggcaccaucaccgacgccguggacugcgcccuggacccccugagcgagaccaagugcacccuaaagagcuucaccguggagaagggcaucuaccagaccagcaacuuccgggugcagcccacugagagcaucgugcgguuccccaacauuaccaaccugugucccuucggcgagguguucaacgccacccgguucgccagcguguacgccuggaaccggaagcggaucagcaacugcguggccgacuacagcgugcuguacaacagcgccagcuucagcaccuucaagugcuacggcgugagcccuaccaagcugaacgaccugugcuucaccaacguguacgcugacagcuucgugauccggggcgacgaggugcggcagaucgcccccggccagaccggcaagaucgccgacuacaacuacaagcugcccgacgacuucaccggcugcgugaucgccuggaacagcaacaaccuggacagcaaggugggcggcaacuacaacuaccuguaccggcuguuccguaagagcaaccugaagccauucgagcgggacaucagcaccgagaucuaccaggccggcagcacccccugcaacgguguggagggcuuuaacugcuacuucccccugcagagcuacggcuuccagcccaccuacggcgugggcuaccagcccuaccgggugguggugcugagcuucgagcugcugcacgcccccgccaccgugugcggcccuaaaaagagcaccaaccuggugaagaacaagugcgugaacuucaacuucaauggccugaccggcaccggcgugcugaccgagagcaacaagaaguuccugcccuuccagcaguucggccgggauaucgacgacaccaccgacgccgugcgggacccccagacccuggagauccuggacaucaccccaugcagcuucggcggcgugagcgugaucacccccggcacaaacaccagcaaccaggucgcagugcuguaccagggagugaacugcaccgaggugcccguggccauccacgccgaccagcugacccccaccuggcggguguacagcaccggcagcaacguguuccagacccgggccggcugccugaucggcgccgagcacgugaacaacuccuacgagugcgacauccccaucggcgccggcaucugcgcuagcuaccagacccagaccaacagccaccggcgggcccggagcguggccagccagagcaucaucgccuacaccaugagcuuaggcgccgagaacagcguggccuacagcaacaacagcaucgccauccccaucaacuucaccauaagcgugaccaccgagauccugccugugagcaugaccaagaccagcguggacuguaccauguacaucugcggcgacagcaccgagugcagcaaccugcugcugcaguacggcagcuucugcacccagcugaaccgggcgcugaccggcaucgccguggagcaggacaagaacacccaagagguguucgcccaggugaagcagaucuacaagaccccacccaucaaggacuucggcggcuucaacuucagccagauccugcccgaccccagcaagcccagcaagcggagcuucaucgaggaccugcuguucaacaaggugacucuggccgacgccggcuucaucaagcaguacggcgauugccugggggacaucgccgcccgggaccugaucugcgcucagaaguucaacggccugaccgugcugccuccccugcugaccgacgagaugaucgcccaguacaccagcgcccugcuugccggcaccaucaccagcggcuggaccuucggcgccggcgccgcacugcagauccccuucgccaugcagauggccuaccgguucaacggcaucggcgugacccagaacgugcuguacgagaaccagaagcugaucgccaaccaguucaacagcgccaucggcaagauccaggacagccugagcagcaccgccagcgcccugggcaagcugcaggacguggugaaccagaacgcccaggcucugaacacccuggugaagcagcugagcagcaacuucggcgccaucagcucagugcugaacgacauccuggccaggcuggacaagguggaggccgaggugcagaucgaccggcugaucaccggccggcugcagagccugcagaccuacgugacccagcagcugauccgggccgccgagauucgggccagcgccaaucuggcagccaccaagaugagcgagugcgugcugggccagagcaagcggguggacuuuugcggcaagggcuaccaccugaugagcuucccccagagcgcuccccacggcgugguguuccuccacgugaccuacgucccagcccaggagaagaacuucacaaccgcccccgccaucugccacgacggcaaggcccacuucccccgggagggaguguucgugagcaacggcacccacugguucgugacccagcggaacuucuacgagccccagaucaucaccacccacaacaccuucgugagcggcaacugcgacguggugaucggcaucgugaacaacaccguguacgacccccugcagcccgagcuggacagcuucaaggaggagcuggacaaguacuucaagaaccacaccagcccugacguggaucugggcgacaucagcggcaucaacgccagcguggugaacauccagaaggagaucgaccggcugaacgagguggccaagaaccugaacgagagccugaucgaccugcaggagcugggcaaguacgagcaguacaucaaguggcccugguacaucuggcugggcuucaucgccggccugaucgccaucgugauggugaccaucaugcugugcugcaugaccagcugcuguagcugccugaagggcugcugcagcugcggcagcugcugcaaguucgacgaggacgacagcgagcccgugcugaagggcgugaagcugcacuacaccugaggacuagucccuguucccagagcccacuuuuuuuucuuuuuuugaaauaaaauagccugucuuucagaucucaaaggcucuuuucagagccaccaaaaaaaaaaaaaaaaaaaaaaaaaaaaaaaaaaaaaaaaaaaaaaaaaaaaaaaaaaaaaaaaaaaaaaaaaaaaaaaaaaaaaaaaaaaaaaaaaaaaa

SEQ ID NO: 23696 - RNA, 4191 nt, Artificial Sequence
  SARS-CoV-2/Wuhan/WIV05/2019__EPI_ISL_402128 spike protein mRNA gc (1-1273)(K417N_E484K_N501Y_D614G)
aggagagggcgcuuggcuugcaaggacccugagcugcggcauugaagcacacccaacccaacucgacugaagucagccucacugaaccggaucugagaaucuucucucucugggcuugccagggcucuccgaaccuagcuagcauccucuucaauuccaacuagaaagcuuaccauguucguguuccuggugcugcugccccuggugagcagccagugcgugaaccugaccacccggacccagcugcccccugccuacaccaacagcuucacccggggcguguacuaccccgacaagguguuccggagcagcgugcugcacagcacccaggaccuguuccugcccuucuucagcaacgugaccugguuccacgccauccacgugagcggcaccaacggcaccaagcgguucgacaacccagugcugcccuucaacgacggcguguacuucgccagcaccgagaagucaaacaucauccggggcuggaucuucggcaccacccuggacagcaagacacagagccugcugaucgugaacaacgccaccaacguggugaucaaggugugcgaguuucaguucugcaacgaccccuuccugggcguguacuaccacaagaacaacaagagcuggauggagagcgaguuccgggucuacagcagcgcuaacaauugcaccuucgaguacgugagccagcccuuccugauggaccucgagggcaagcagggcaacuucaagaaccugcgggaguucguguucaagaacaucgauggcuacuucaagaucuacagcaagcacacccccaucaaccuggugcgggaccugccccagggauucagcgcccuggagccucugguggaccugcccaucggcaucaacaucaccagguuccagacccugcuggcccugcaccggagcuaccugacccccggcgacagcagcagcggcuggaccgccggcgccgccgcauacuacgugggcuaccugcagccacggaccuuccugcugaaguacaacgagaacggcaccaucaccgacgccguggacugcgcccuggacccccugagcgagaccaagugcacccuaaagagcuucaccguggagaagggcaucuaccagaccagcaacuuccgggugcagcccacugagagcaucgugcgguuccccaacauuaccaaccugugucccuucggcgagguguucaacgccacccgguucgccagcguguacgccuggaaccggaagcggaucagcaacugcguggccgacuacagcgugcuguacaacagcgccagcuucagcaccuucaagugcuacggcgugagcccuaccaagcugaacgaccugugcuucaccaacguguacgcugacagcuucgugauccggggcgacgaggugcggcagaucgcccccggccagaccggcaacaucgccgacuacaacuacaagcugcccgacgacuucaccggcugcgugaucgccuggaacagcaacaaccuggacagcaaggugggcggcaacuacaacuaccuguaccggcuguuccguaagagcaaccugaagccauucgagcgggacaucagcaccgagaucuaccaggccggcagcacccccugcaacggugugaagggcuuuaacugcuacuucccccugcagagcuacggcuuccagcccaccuacggcgugggcuaccagcccuaccgggugguggugcugagcuucgagcugcugcacgcccccgccaccgugugcggcccuaaaaagagcaccaaccuggugaagaacaagugcgugaacuucaauuucaacggccugaccggcaccggcgugcugaccgagagcaacaagaaguuccugcccuuccagcaguucggccgggauaucgccgacaccaccgacgcagugcgggacccccagacccuggagauccuggacaucaccccaugcagcuucggcggcgugagcgucaucacccccggcacaaacaccagcaaccagguggccgugcuguaccagggagugaacugcaccgaggugcccguggccauccacgccgaccagcugacccccaccuggcggguguacagcaccggcagcaacguguuccagacccgggccggcugccugaucggcgccgagcacgugaacaacuccuacgagugcgacauccccaucggcgcuggcaucugcgccagcuaccagacccagaccaacagcccccggcgggcccggagcguggccagccagagcaucaucgccuacaccaugagcuuaggcgccgagaacagcguggccuacagcaacaacagcaucgcgaucccuaccaacuucaccaucagcgugaccaccgagauacugcccgugagcaugaccaagaccagcguggacuguaccauguacaucugcggcgacagcaccgagugcagcaaccugcugcugcaguacggcagcuucugcacccagcugaaccgggcccugaccggcaucgccguggagcaggacaagaacacccaagagguguucgcccaggugaagcagaucuacaagacucccccaaucaaggacuucggcggcuucaacuucagccagauccugcccgaccccagcaagcccagcaagcggagcuucaucgaggaccugcuguucaacaaggugacccuggccgacgccggcuucaucaagcaguacggcgacugccugggggauaucgccgcucgggaccugaucugcgcccagaaguucaacggccugaccgugcugcccccucugcugaccgacgagaugaucgcccaguacaccagcgcccugcuugccggcaccaucaccagcggcuggaccuucggcgccggcgcagcccugcagauccccuucgccaugcagauggccuaccgguucaacggcaucggcgugacccagaacgugcuguacgagaaccagaagcugaucgccaaccaguucaacagcgccaucggcaagauccaggacagccugagcagcaccgccagcgcccugggcaagcugcaggacguggugaaccagaacgcucaggcccugaacacccuggugaagcagcugagcagcaacuucggcgccaucagcucagugcugaaugacauccugagcaggcuggacaagguggaggccgaggugcagaucgaccggcugaucaccggccggcugcagagccugcagaccuacgugacccagcagcugauccgggccgccgagauccgggccagcgccaaccuggcagccaccaagaugagcgagugcgugcugggccagagcaagcggguggacuuuugcggcaagggcuaccaccugaugagcuucccccagagcgccccacacggcgugguguuccuccacgucacauacgugcccgcccaggagaagaacuucaccaccgcccccgccauuugccacgacggcaaggcucacuucccccgggagggaguguucgugagcaacggcacccacugguucgugacccagcggaacuucuacgagccccagaucaucaccaccgacaacaccuucgugagcggcaacugcgacguggugaucggcaucgugaacaacaccguguacgacccccugcagccugagcuggacagcuucaaggaggagcuggacaaguacuucaagaaccacaccagccccgacguggaucugggcgacaucagcggcaucaacgccagcguggugaacauccagaaggagaucgaccggcugaacgagguggccaagaaccugaacgagagccugaucgaccugcaggagcugggcaaguacgagcaguacaucaaguggcccugguacaucuggcugggcuucaucgccggccugaucgccaucgugauggugaccaucaugcugugcugcaugaccagcugcuguagcugccugaagggcugcugcagcugcggcagcugcugcaaguucgacgaggacgacagcgagccagugcugaagggcgugaagcugcacuacaccugaggacuagucccuguucccagagcccacuuuuuuuucuuuuuuugaaauaaaauagccugucuuucagaucucaaaggcucuuuucagagccaccaaaaaaaaaaaaaaaaaaaaaaaaaaaaaaaaaaaaaaaaaaaaaaaaaaaaaaaaaaaaaaaaaaaaaaaaaaaaaaaaaaaaaaaaaaaaaaaaaaaaa

SEQ ID NO: 23697 - RNA, 4182 nt, Artificial Sequence
  SARS-CoV-2/Wuhan/WIV05/2019__EPI_ISL_402128 spike protein mRNA gc (1-1273)(L18F_D80A_D215G_L242del_A243del_L244del_R246I_K417N_E484 K_N501Y_D614G_A701V)
aggagagggcgcuuggcuugcaaggacccugagcugcggcauugaagcacacccaacccaacucgacugaagucagccucacugaaccggaucugagaaucuucucucucugggcuugccagggcucuccgaaccuagcuagcauccucuucaauuccaacuagaaagcuuaccauguucguguuccuggugcugcugccccuggugagcagccagugcgugaacuucaccacccggacccagcugcccccugccuacaccaacagcuucacccggggcguguacuaccccgacaagguguuccggagcagcgugcugcacagcacccaggaccuguuccugcccuucuucagcaacgugaccugguuccacgccauccacgugagcggcaccaacggcaccaagcgguucgccaacccagugcugcccuucaacgacggcguguacuucgccagcaccgagaagucaaacaucauccggggcuggaucuuuggcaccacccuggacagcaagacacagagccugcugaucgugaacaacgcuaccaacguggugaucaaggugugcgaguuccaguucugcaacgaccccuuccugggcguguacuaccacaagaacaacaagagcuggauggagagcgaguuccgggucuacagcagcgccaacaauugcaccuucgaguacgugagccagcccuuccugauggaccuggagggcaagcagggcaacuucaagaaccuccgggaguucguguucaagaacaucgacggcuacuucaagaucuacagcaagcacacccccaucaaccuggugcggggacugccccagggcuucagcgcccuggagccucugguggaucugcccaucggcaucaacaucaccagguuccagacccugcacaucagcuaccugacccccggcgacagcagcagcggcuggaccgccggcgccgccgcauacuacgugggcuaccugcagccacggaccuuccugcugaaguacaacgagaacggcaccaucaccgacgccguggacugcgcccuggacccccugagcgagaccaagugcacccuuaagagcuucaccguggagaagggcaucuaccagaccagcaacuuccgggugcagcccacugagagcauugugcgguuccccaacaucaccaaccugugucccuucggcgagguguucaacgccacccgguucgccagcguguacgccuggaaccggaagcggaucagcaacugcguggccgacuacagcgugcuguacaacagcgccagcuucagcaccuucaagugcuacggcgugagcccuaccaagcugaacgaccugugcuucaccaacguguacgcugacagcuucgugauccggggcgacgaggugcggcagaucgcccccggccagaccggcaacaucgccgacuacaacuacaagcugcccgacgacuucaccggcugcgugaucgccuggaacagcaacaaccuggacagcaaggugggcggcaacuacaacuaccuguaccggcuauuccguaagagcaaccugaagccauuugagcgggacaucagcaccgagaucuaccaggccgguagcacccccugcaacggcgugaagggcuucaacugcuacuucccccugcagagcuacggcuuccagcccaccuacggcgugggcuaccagcccuaccgggugguggugcugagcuucgagcugcugcacgcccccgccaccgugugcggcccuaaaaagagcaccaaccuggugaagaacaagugcgugaacuucaauuucaacggccugaccggcaccggcgugcugaccgagagcaacaagaaguuccugcccuuccagcaguucggccgggacaucgccgacaccaccgaugcagugcgggacccccagacccuggagauccuggacaucaccccaugcagcuucggcggcgugagcgucaucacccccggaacaaacaccagcaaccagguggccgugcuguaccagggcgugaacugcaccgaggugcccguggccauccacgccgaccagcugacccccaccuggcggguguacagcaccggcagcaacguguuccagacccgggccggcugccugaucggcgccgagcacgugaacaacuccuacgagugcgacauccccaucggcgcuggcaucugcgccagcuaccagacccagaccaacagcccccggcgggcccggagcguggccagccagagcaucaucgccuacaccaugagccugggcguggagaacagcguggccuacagcaacaacagcaucgccaucccuaccaacuucaccauaagcgugaccaccgagauccugcccgugagcaugaccaagaccagcguggacuguaccauguacaucugcggcgacagcaccgagugcagcaaccuguuacugcaguacggcagcuucugcacccagcugaaccgggcgcugaccggcaucgccguggagcaggacaagaacacccaagagguguucgcccaggugaagcagaucuacaagacucccccaaucaaggacuucggcggcuucaacuucagccagauccugcccgaccccagcaagcccagcaagcggagcuucaucgaggaccugcuguucaacaaggugacccuggccgacgccggcuucaucaagcaguacggggacugccugggcgacaucgccgcccgggaccugaucugcgcucagaaguucaacggccugaccgugcugcccccucugcugaccgaugagaugaucgcccaguacaccagcgcccugcuggccggcaccaucaccagcggcuggaccuucggcgccggcgccgcacugcagauccccuucgccaugcagauggccuaccgguucaacggcaucggcgugacccagaacgugcuguacgagaaccagaagcugaucgccaaccaguucaacagcgccaucggcaagauccaggacagccugagcagcaccgccagcgcccugggcaagcugcaggacguggugaaccagaacgcccaggcucugaacacccuggugaagcagcugagcagcaacuuuggcgccaucagcucagugcugaaugacauccugagccggcuggacaagguggaggccgaggugcagaucgacaggcugaucaccggccggcugcagagccugcagaccuacgugacccagcagcugauccgggccgccgagauucgggccagcgccaaccuggccgcaaccaagaugagcgagugcgugcugggccagagcaagcggguggacuucugcggcaagggcuaccaccugaugagcuucccccagagcgccccacacggcguggucuuccugcacgugacauacgugcccgcccaggagaagaacuucaccaccgcccccgccaucugccacgacggaaaggcccacuucccccgggagggcguguucgugagcaacggcacccacugguucgugacccagcggaacuucuacgagccccagaucaucaccaccgacaacaccuucgugagcggcaacugcgacguggugaucggcaucgugaacaacaccguguacgacccccugcagccugagcuggacagcuucaaggaggagcucgacaaguacuucaagaaccacaccagccccgacguggaccugggcgacaucagcggcaucaacgcuagcguggugaacauccagaaggagaucgaucggcugaacgagguggccaagaaccugaacgagagccugaucgaccugcaggagcugggcaaguacgagcaguacaucaaguggcccugguacaucuggcugggcuucaucgccggccugaucgccaucgugauggugaccaucaugcugugcugcaugaccagcugcuguagcugccugaagggcugcugcagcugcggcagcugcugcaaguucgacgaggacgacagcgagccagugcugaagggcgugaagcugcacuacaccugaggacuagucccuguucccagagcccacuuuuuuuucuuuuuuugaaauaaaauagccugucuuucagaucucaaaggcucuuuucagagccaccaaaaaaaaaaaaaaaaaaaaaaaaaaaaaaaaaaaaaaaaaaaaaaaaaaaaaaaaaaaaaaaaaaaaaaaaaaaaaaaaaaaaaaaaaaaaaaaaaaaaa

SEQ ID NO: 23698 - RNA, 4191 nt, Artificial Sequence
  SARS-CoV-2/Wuhan/WIV05/2019__EPI_ISL_402128 spike protein mRNA gc (1-1273)(E484K_D614G)
aggagagggcgcuuggcuugcaaggacccugagcugcggcauugaagcacacccaacccaacucgacugaagucagccucacugaaccggaucugagaaucuucucucucugggcuugccagggcucuccgaaccuagcuagcauccucuucaauuccaacuagaaagcuuaccauguucguguuccuggugcugcugccccuggugagcagccagugcgugaaccugaccacccggacccagcugcccccugccuacaccaacagcuucacccggggcguguacuaccccgacaagguguuccggagcagcgugcugcacagcacccaggaccuguuccugcccuucuucagcaacgugaccugguuccacgccauccacgugagcggcaccaacggcaccaagcgguucgacaacccagugcugcccuucaacgacggcguguacuucgccagcaccgagaagucaaacaucauccggggcuggaucuucggcaccacccuggacagcaagacacagagccugcugaucgugaacaacgccaccaacguggugaucaaggugugcgaguuucaguucugcaacgaccccuuccugggcguguacuaccacaagaacaacaagagcuggauggagagcgaguuccgggucuacagcagcgcuaacaauugcaccuucgaguacgugagccagcccuuccugauggaccucgagggcaagcagggcaacuucaagaaccugcgggaguucguguucaagaacaucgauggcuacuucaagaucuacagcaagcacacccccaucaaccuggugcgggaccugccccagggauucagcgcccuggagccucugguggaccugcccaucggcaucaacaucaccagguuccagacccugcuggcccugcaccggagcuaccugacccccggcgacagcagcagcggcuggaccgccggcgccgccgcauacuacgugggcuaccugcagccacggaccuuccugcugaaguacaacgagaacggcaccaucaccgacgccguggacugcgcccuggacccccugagcgagaccaagugcacccuaaagagcuucaccguggagaagggcaucuaccagaccagcaacuuccgggugcagcccacugagagcaucgugcgguuccccaacauuaccaaccugugucccuucggcgagguguucaacgccacccgguucgccagcguguacgccuggaaccggaagcggaucagcaacugcguggccgacuacagcgugcuguacaacagcgccagcuucagcaccuucaagugcuacggcgugagcccuaccaagcugaacgaccugugcuucaccaacguguacgcugacagcuucgugauccggggcgacgaggugcggcagaucgcccccggccagaccggcaagaucgccgacuacaacuacaagcugcccgacgacuucaccggcugcgugaucgccuggaacagcaacaaccuggacagcaaggugggcggcaacuacaacuaccuguaccggcuguuccguaagagcaaccugaagccauucgagcgggacaucagcaccgagaucuaccaggccggcagcacccccugcaacggugugaagggcuuuaacugcuacuucccccugcagagcuacggcuuccagcccaccaacggcgugggcuaccagcccuaccgggugguggugcugagcuucgagcugcugcacgcccccgccaccgugugcggcccuaaaaagagcaccaaccuggugaagaacaagugcgugaacuucaauuucaacggccugaccggcaccggcgugcugaccgagagcaacaagaaguuccugcccuuccagcaguucggccgggauaucgccgacaccaccgacgcagugcgggacccccagacccuggagauccuggacaucaccccaugcagcuucggcggcgugagcgucaucacccccggcacaaacaccagcaaccagguggccgugcuguaccagggagugaacugcaccgaggugcccguggccauccacgccgaccagcugacccccaccuggcggguguacagcaccggcagcaacguguuccagacccgggccggcugccugaucggcgccgagcacgugaacaacuccuacgagugcgacauccccaucggcgcuggcaucugcgccagcuaccagacccagaccaacagcccccggcgggcccggagcguggccagccagagcaucaucgccuacaccaugagcuuaggcgccgagaacagcguggccuacagcaacaacagcaucgcgaucccuaccaacuucaccaucagcgugaccaccgagauacugcccgugagcaugaccaagaccagcguggacuguaccauguacaucugcggcgacagcaccgagugcagcaaccugcugcugcaguacggcagcuucugcacccagcugaaccgggcccugaccggcaucgccguggagcaggacaagaacacccaagagguguucgcccaggugaagcagaucuacaagacucccccaaucaaggacuucggcggcuucaacuucagccagauccugcccgaccccagcaagcccagcaagcggagcuucaucgaggaccugcuguucaacaaggugacccuggccgacgccggcuucaucaagcaguacggcgacugccugggggauaucgccgcucgggaccugaucugcgcccagaaguucaacggccugaccgugcugcccccucugcugaccgacgagaugaucgcccaguacaccagcgcccugcuugccggcaccaucaccagcggcuggaccuucggcgccggcgcagcccugcagauccccuucgccaugcagauggccuaccgguucaacggcaucggcgugacccagaacgugcuguacgagaaccagaagcugaucgccaaccaguucaacagcgccaucggcaagauccaggacagccugagcagcaccgccagcgcccugggcaagcugcaggacguggugaaccagaacgcucaggcccugaacacccuggugaagcagcugagcagcaacuucggcgccaucagcucagugcugaaugacauccugagcaggcuggacaagguggaggccgaggugcagaucgaccggcugaucaccggccggcugcagagccugcagaccuacgugacccagcagcugauccgggccgccgagauccgggccagcgccaaccuggcagccaccaagaugagcgagugcgugcugggccagagcaagcggguggacuuuugcggcaagggcuaccaccugaugagcuucccccagagcgccccacacggcgugguguuccuccacgucacauacgugcccgcccaggagaagaacuucaccaccgcccccgccauuugccacgacggcaaggcucacuucccccgggagggaguguucgugagcaacggcacccacugguucgugacccagcggaacuucuacgagccccagaucaucaccaccgacaacaccuucgugagcggcaacugcgacguggugaucggcaucgugaacaacaccguguacgacccccugcagccugagcuggacagcuucaaggaggagcuggacaaguacuucaagaaccacaccagccccgacguggaucugggcgacaucagcggcaucaacgccagcguggugaacauccagaaggagaucgaccggcugaacgagguggccaagaaccugaacgagagccugaucgaccugcaggagcugggcaaguacgagcaguacaucaaguggcccugguacaucuggcugggcuucaucgccggccugaucgccaucgugauggugaccaucaugcugugcugcaugaccagcugcuguagcugccugaagggcugcugcagcugcggcagcugcugcaaguucgacgaggacgacagcgagccagugcugaagggcgugaagcugcacuacaccugaggacuagucccuguucccagagcccacuuuuuuuucuuuuuuugaaauaaaauagccugucuuucagaucucaaaggcucuuuucagagccaccaaaaaaaaaaaaaaaaaaaaaaaaaaaaaaaaaaaaaaaaaaaaaaaaaaaaaaaaaaaaaaaaaaaaaaaaaaaaaaaaaaaaaaaaaaaaaaaaaaaaa

SEQ ID NO: 23699 - RNA, 4191 nt, Artificial Sequence
  SARS-CoV-2/Wuhan/WIV05/2019__EPI_ISL_402128 spike protein mRNA gc (1-1273)(L18F_T20N_P26S_D138Y_R190S_K417T_E484K_N501Y_D614G_H655Y _T1027I)
aggagagggcgcuuggcuugcaaggacccugagcugcggcauugaagcacacccaacccaacucgacugaagucagccucacugaaccggaucugagaaucuucucucucugggcuugccagggcucuccgaaccuagcuagcauccucuucaauuccaacuagaaagcuuaccauguucguguuccuggugcugcugccccuggugagcagccagugcgugaacuucaccaaccggacccagcugcccagcgccuacaccaacagcuucacccggggcguguacuacccugacaagguguuccggagcagcgugcugcacagcacccaggaccuguuccugcccuucuucagcaacgugaccugguuccacgccauccacgugagcggcaccaacggcaccaagcgguucgacaaccccgugcugccauucaacgacggcguguacuucgccagcaccgagaagucaaacaucauccggggcuggaucuuuggcaccacccuggacagcaagacccagagccugcugaucgugaacaacgccacaaacguggugaucaaggugugcgaguuccaguucugcaacuaccccuuccugggcguguacuaccacaagaacaacaagagcuggauggagagcgaguuccgggucuacagcagcgcuaauaacugcaccuucgaguacgugagccagcccuuccugauggaccuggagggcaagcagggcaacuucaagaaccucagcgaguucguguucaagaacaucgacggcuacuucaagaucuacagcaagcacacccccaucaaccuggugcgggaucugccccagggauucagcgcccuggagccccugguggaccugccuaucggcaucaacaucacccgguuccagacccugcuggcccugcacaggagcuaccugacccccggcgacagcagcagcggcuggaccgccggcgccgccgcauacuacgugggcuaccugcagccccggaccuuccugcugaaguacaacgagaacggcaccaucaccgacgccguggacugcgcccuggacccacugagcgagaccaagugcacccuaaagagcuucaccguggagaagggcaucuaccagaccagcaacuuccgggugcagcccaccgagagcaucgugcgguuccccaacauuacuaaccugugucccuucggcgagguguucaacgccacccgguucgccagcguguacgccuggaaccggaagcggaucagcaacugcguggccgacuacagcgugcuguacaacagcgccagcuucagcaccuucaagugcuacggcgugagccccaccaagcugaacgaccugugcuucaccaacguguacgcugacagcuucgugauccggggcgacgaggugcggcagaucgccccuggccagaccggcaccaucgccgacuacaacuacaagcugcccgacgacuucaccggcugcgugaucgccuggaacagcaacaaccuggacagcaaggugggcggcaacuacaacuaccuguaccggcuguuccguaagagcaaccugaagcccuuugagcgggacaucagcaccgagaucuaccaggccggcagcaccccaugcaacggugugaagggcuucaacugcuacuucccccugcagagcuacggcuuccagcccaccuacggcgugggcuaccagcccuaccgggugguggugcugagcuucgagcugcugcacgcccccgccaccgugugcggccccaaaaagagcaccaaccuggugaagaacaagugcgugaacuucaauuucaacggccugaccggcaccggcgugcugaccgagagcaacaagaaguuccugccuuuccagcaguucggccgggacaucgccgauaccaccgacgcagugcgggacccccagacccuggagauccuggacaucacccccugcagcuucggcggcgugagcgucaucaccccaggcacaaacaccagcaaccagguggccgugcuguaccagggagugaacugcaccgaggugcccguggccauccacgccgaccagcugacccccaccuggcggguguacuccaccggcagcaacguguuccagacccgggccggcugccugaucggcgccgaguacgugaacaacagcuacgagugcgacauccccaucggcgcuggcaucugcgccagcuaccagacccagaccaacagcccccggcgggcccggagcguggccagccagagcaucaucgccuacaccaugagccugggcgccgagaacagcguggccuacagcaacaacagcaucgcgauccccaccaacuucaccaucagcgugaccaccgagauauuaccugugagcaugaccaagaccagcguggacuguaccauguacaucugcggcgacagcaccgagugcagcaaccugcugcugcaguacggcagcuucugcacccagcugaaccgggcccugaccggcaucgccguggagcaggacaagaacacccaagagguguucgcccaggugaagcagaucuacaagacuccacccaucaaggacuucggcggcuucaacuucagccagauccugcccgaccccagcaagcccagcaagcggagcuucaucgaggaccugcuguucaacaaggugacccuggccgacgccggcuucaucaagcaguacggcgacugccugggggacaucgccgcucgggaucugaucugcgcccagaaguucaacggccugaccgugcugccuccccugcugaccgacgagaugaucgcccaguacaccagcgcccugcuggccggcaccaucaccagcggcuggaccuucggcgccggcgcagcccuucagauccccuucgccaugcagauggccuaccgguucaacggcaucggcgugacccagaacgugcuguacgagaaccagaagcugaucgccaaccaguucaacagcgccaucggcaagauccaggacagccugagcagcaccgccagcgcccugggcaagcugcaggacguggugaaccagaacgcucaggcccugaacacccuggugaagcagcugagcucaaacuuuggcgccaucagcagcgugcugaaugacauccugagccggcuggacaagguggaggccgaggugcagaucgacaggcugaucaccggccggcugcagagccugcagaccuacgugacccagcagcugauccgggccgccgagauccgggccagcgccaaccuggcagccauuaagaugagcgagugcgugcugggccagagcaagcggguggacuucugcggcaagggcuaccaccugaugagcuucccccagagcgcuccccacggcgugguguuccugcacgucaccuacgugccagcccaggagaagaacuucacaaccgcccccgccaucugccacgacggcaaggcccacuucccccgggagggaguguucgugagcaacggcacccacugguucgugacccagcggaacuucuacgagccccagaucaucaccaccgacaacaccuucgugagcggcaacugcgacguggugaucggcaucgugaacaacaccguguacgacccccuccagcccgagcuggacagcuucaaggaggagcuggacaaguacuucaagaaccacaccagcccugacguggaccugggcgauaucagcggcaucaacgccagcguggugaacauccagaaggagaucgaccggcugaacgagguggccaagaaccugaacgagagccugaucgaccugcaggagcugggcaaguacgagcaguacaucaaguggcccugguacaucuggcugggcuucaucgccggccugaucgccaucgugauggugaccaucaugcugugcugcaugaccagcugcuguagcugccugaagggcugcugcagcugcggcagcugcugcaaguucgacgaggacgacagcgagcccgugcugaagggcgugaagcugcacuacaccugaggacuagucccuguucccagagcccacuuuuuuuucuuuuuuugaaauaaaauagccugucuuucagaucucaaaggcucuuuucagagccaccaaaaaaaaaaaaaaaaaaaaaaaaaaaaaaaaaaaaaaaaaaaaaaaaaaaaaaaaaaaaaaaaaaaaaaaaaaaaaaaaaaaaaaaaaaaaaaaaaaaaa

SEQ ID NO: 23700 - RNA, 4191 nt, Artificial Sequence
  SARS-CoV-2/Wuhan/WIV05/2019__EPI_ISL_402128 spike protein mRNA gc (1-1273)(S13I_W152C_L452R_D614G)
aggagagggcgcuuggcuugcaaggacccugagcugcggcauugaagcacacccaacccaacucgacugaagucagccucacugaaccggaucugagaaucuucucucucugggcuugccagggcucuccgaaccuagcuagcauccucuucaauuccaacuagaaagcuuaccauguucguguuccuggugcugcugccccuggugagcauccagugcgugaaccugaccacccggacccagcugcccccugccuacaccaacagcuucacccggggcguguacuaccccgacaagguguuccggagcagcgugcugcacagcacccaggaccuguuccugcccuucuucagcaacgugaccugguuccacgccauccacgugagcggcaccaacggcaccaagcgguucgacaacccagugcugcccuucaacgacggcguguacuucgccagcaccgagaagucaaacaucauccggggcuggaucuucggcaccacccuggacagcaagacacagagccugcugaucgugaacaacgccaccaacguggugaucaaggugugcgaguuucaguucugcaacgaccccuuccugggcguguacuaccacaagaacaacaagagcugcauggagagcgaguuccgggucuacagcagcgcuaacaauugcaccuucgaguacgugagccagcccuuccugauggaccucgagggcaagcagggcaacuucaagaaccugcgggaguucguguucaagaacaucgauggcuacuucaagaucuacagcaagcacacccccaucaaccuggugcgggaccugccccagggauucagcgcccuggagccucugguggaccugcccaucggcaucaacaucaccagguuccagacccugcuggcccugcaccggagcuaccugacccccggcgacagcagcagcggcuggaccgccggcgccgccgcauacuacgugggcuaccugcagccacggaccuuccugcugaaguacaacgagaacggcaccaucaccgacgccguggacugcgcccuggacccccugagcgagaccaaguguacccuaaagagcuucaccguggagaagggcaucuaccagaccagcaacuuccgggugcagcccacugagagcauugugcgguuccccaacaucaccaaccugugccccuucggcgagguguucaacgccacccgguucgccagcguguacgccuggaaccggaagcggaucagcaacugcguggccgacuacagcgugcuguacaacagcgccagcuucagcaccuucaagugcuacggcgugagcccuaccaagcugaacgaccugugcuucaccaacguguacgcugacagcuucgugauccggggcgacgaggugcggcagaucgcccccggccagaccggcaagaucgccgacuacaacuacaagcugcccgacgacuucaccggcugcgugaucgccuggaacagcaacaaccuggacagcaaggugggcggcaacuacaacuaccgguaccggcuguuccguaagagcaaccugaagccauucgagcgggacaucagcaccgagaucuaccaggccggcagcacccccugcaacgguguggagggcuuuaacugcuacuucccccugcagagcuacggcuuccagcccaccaacggcgugggcuaccagcccuaccgggugguggugcugagcuucgagcugcugcacgcccccgccaccgugugcggcccuaaaaagagcaccaaccuggugaagaacaagugcgugaacuucaauuucaacggccugaccggcaccggcgugcugaccgagagcaacaagaaguuccugcccuuccagcaguucggccgggauaucgccgacaccaccgacgcagugcgggacccccagacccuggagauccuggacaucaccccaugcagcuucggcggcgugagcgucaucacccccggcacaaacaccagcaaccagguggccgugcuguaccagggagugaacugcaccgaggugcccguggccauccacgccgaccagcugacccccaccuggcggguguacagcaccggcagcaacguguuccagacccgggccggcugccugaucggcgccgagcacgugaacaacagcuacgagugcgacauccccaucggcgcuggcaucugugccuccuaccagacccagaccaacagcccccggcgggcccggagcguggccagccagagcaucaucgccuacaccaugagccugggcgccgagaacagcguggccuacagcaacaacagcaucgcgaucccuaccaacuucaccauaagcgugaccaccgagaucuuacccgugagcaugaccaagaccagcguggacugcaccauguacaucugcggcgacagcaccgagugcagcaaccugcugcugcaguacggcagcuucugcacccagcugaaccgggcccugaccggcaucgccguggagcaggacaagaacacccaagagguguucgcccaggugaagcagaucuacaagacucccccaaucaaggacuucggcggcuucaacuucagccagauccugcccgaccccagcaagcccagcaagcggagcuucaucgaggaccugcuguucaacaaggugacccuggccgacgccggcuucaucaagcaguacggcgacugccugggggauaucgccgcucgggaccugaucugcgcccagaaguucaacggccugaccgugcugcccccucugcugaccgacgagaugaucgcccaguacaccagcgcccugcuggccggcaccaucaccagcggcuggaccuucggcgccggcgcagcccuucagauccccuucgccaugcagauggccuacagguucaacggcaucggcgugacccagaacgugcuguacgagaaccagaagcugaucgccaaccaguucaacagcgccaucggcaagauccaggacagccugagcagcaccgccagcgcccugggcaagcugcaggacguggugaaccagaacgcucaggcccugaacacccuggugaagcagcugagcagcaacuucggcgccaucagcagcgugcugaaugacauccugucacggcuggacaagguggaggccgaggugcagaucgaccggcugaucaccggccggcugcagagccugcagaccuacgugacccagcagcugauccgggccgccgagauucgggccagcgccaaccuggcagccaccaagaugagcgagugcgugcugggccagagcaagcggguggacuuuugcggcaagggcuaccaccugaugagcuucccccagagcgccccacacggcgugguguuccugcacgucacauacgugcccgcccaggagaagaacuucaccaccgcccccgccaucugccacgacggcaaggcucacuucccccgggagggaguguucgugagcaacggcacccacugguucgugacccagcggaacuucuacgagccccagaucaucaccaccgacaacaccuucgugagcggcaacugcgacguggugaucggcaucgugaacaacaccguguacgacccccuccagccugagcuggacagcuucaaggaggagcuggacaaguacuucaagaaccacaccagccccgacguggaucugggcgacaucagcggcaucaacgccagcguggugaacauccagaaggagaucgaccggcugaacgagguggccaagaaccugaacgagagccugaucgaccugcaggagcugggcaaguacgagcaguacaucaaguggcccugguacaucuggcugggcuucaucgccggccugaucgccaucgugauggugaccaucaugcugugcugcaugaccagcuguugcagcugccugaagggcugcugcagcugcggcagcugcugcaaguucgacgaggacgacagcgagccagugcugaagggcgugaagcugcacuacaccugaggacuagucccuguucccagagcccacuuuuuuuucuuuuuuugaaauaaaauagccugucuuucagaucucaaaggcucuuuucagagccaccaaaaaaaaaaaaaaaaaaaaaaaaaaaaaaaaaaaaaaaaaaaaaaaaaaaaaaaaaaaaaaaaaaaaaaaaaaaaaaaaaaaaaaaaaaaaaaaaaaaaa

SEQ ID NO: 23701 - RNA, 4191 nt, Artificial Sequence
  SARS-CoV-2/Wuhan/WIV05/2019__EPI_ISL_402128 spike protein mRNA gc mod (1-1273)
aggagagggcgcuuggcuugcaaggacccugagcugcggcauugaagcacacccaacccaacucgacugaagucagccucacugaaccggaucugagaaucuucucucucugggcuugccagggcucuccgaaccuagcuagcauccucuucaauuccaacuagaaagcuuaccauguucguguuucuggugcugcugccccugguguccagccagugugugaaccugaccaccagaacacagcugccuccagccuacaccaacagcuucaccagaggcguguacuaccccgacaagguguucagauccagcgugcugcacucuacccaggaccuguuccugccuuucuucagcaacgugaccugguuccacgccauccacguguccggcaccaauggcaccaagagauucgacaaccccgugcugcccuucaacgacgggguguacuuugccagcaccgagaaguccaacaucaucagaggcuggaucuucggcaccacacuggacagcaagacccagagccugcugaucgugaacaacgccaccaacguggucaucaaagugugcgaguuccaguucugcaacgaccccuuccugggcgucuacuaccacaagaacaacaagagcuggauggaaagcgaguuccggguguacagcagcgccaacaacugcaccuucgaguacgugucccagccuuuccugauggaccuggaaggcaagcagggcaacuucaagaaccugcgcgaguucguguucaagaacaucgacggcuacuucaaaaucuacagcaagcacaccccuaucaaccucgugcgggaucugccucagggcuucucugcucuggaaccccugguggaucugcccaucggcaucaacaucacccgguuucagacacugcuggcccugcacagaagcuaccugacaccuggcgauagcagcagcggauggacagcuggugccgccgcuuacuaugugggcuaccugcagccuagaaccuuccugcugaaguacaacgagaacggcaccaucaccgacgccguggauugugcucuggauccucugagcgagacaaagugcacccugaaguccuucaccguggaaaagggcaucuaccagaccagcaacuuccgggugcagcccaccgaauccaucgugcgguuccccaauaucaccaaucugugccccuucggcgagguguucaaugccaccagauucgccucuguguacgccuggaaccggaagcggaucagcaauugcguggccgacuacuccgugcuguacaacuccgccagcuucagcaccuucaagugcuacggcguguccccuaccaagcugaacgaccugugcuucacaaacguguacgccgacagcuucgugauccggggagaugaagugcggcagauugccccuggacagacaggcaagaucgccgacuacaacuacaagcugcccgacgacuucaccggcugugugauugccuggaacagcaacaaccuggacuccaaagucggcggcaacuacaauuaccuguaccggcuguuccggaaguccaaucugaagcccuucgagcgggacaucagcaccgaaaucuaucaggccggcagcaccccuugcaacggcguggaaggcuucaacugcuacuucccacugcaguccuacggcuuucagcccacaaauggcgugggcuaucagcccuacagagugguggugcugagcuucgaacugcugcaugcuccugccacagugugcggcccuaagaaaagcaccaaucucgugaagaacaaaugcgugaacuucaacuucaacggccugaccggcaccggcgugcugacagagagcaacaagaaguuccugccauuccagcaguuuggccgggauaucgccgauaccacagacgccguuagagauccccagacacuggaaauccuggacaucaccccaugcagcuucggcggagugucugugaucaccccuggcaccaacaccagcaaucagguggcagugcuguaccaggacgugaacuguaccgaagugcccguggccauucacgccgaucagcugacaccuacauggcggguguacuccaccggcagcaauguguuucagaccagagccggcugucugaucggagccgagcacgugaacaauagcuacgagugcgacauccccaucggcgcuggcaucugugccagcuaccagacacagacaaacagccccagacgggcuagaagcguggccagccagagcaucauugccuacacaaugucucugggcgccgagaacagcguggccuacuccaacaacucuaucgcuauccccaccaacuucaccaucagcgugaccaccgagauccugccuguguccaugaccaagaccagcguggacugcaccauguacaucugcggcgauuccaccgagugcuccaaccugcugcugcaguacggcagcuucugcacccagcugaauagagcccugacagggaucgccguggaacaggacaagaacacccaagagguguucgcccaagugaagcaaaucuacaagaccccuccuaucaaggacuucggcggcuucaauuucagccagauucugcccgauccuagcaagcccagcaagcggagcuucaucgaggaccugcuguucaacaaagugacacuggccgacgccggcuucaucaagcaguauggcgauugucugggcgacauugccgccagggaucugauuugcgcccagaaguuuaacggacugacagugcugccuccucugcugaccgaugagaugaucgcccaguacacaucugcccugcuggccggcacaaucacaagcggcuggacauuuggagcuggcgccgcucugcagauccccuuugcuaugcagauggccuaccgguucaacggcaucggagugacccagaaugugcuguacgagaaccagaagcugaucgccaaccaguucaacagcgccaucggcaagauccaggacagccugagcagcacagcaagcgcccugggaaagcugcaggacguggucaaccagaaugcccaggcacugaacacccuggucaagcagcuguccuccaacuucggcgccaucagcucugugcugaacgauauccugagcagacuggacaaggucgaggccgaggugcagaucgacagacugaucacaggcagacugcagagccuccagacauacgugacccagcagcugaucagagccgccgagauuagagccucugccaaucuggccgccaccaagaugucugagugugugcugggccagagcaagagaguggacuuuugcggcaagggcuaccaccugaugagcuucccucagucugccccucacggcgugguguuucugcacgugacauaugugcccgcucaagagaagaauuucaccaccgcuccagccaucugccacgacggcaaagcccacuuuccuagagaaggcguguucguguccaacggcacccauugguucgugacacagcggaacuucuacgagccccagaucaucaccaccgacaacaccuucgugucuggcaacugcgacguugugaucggcauugugaacaauaccguguacgacccucugcagcccgagcuggacagcuucaaagaggaacuggacaaguacuuuaagaaccacacaagccccgacguggaccugggcgauaucagcggaaucaaugccagcgucgugaacauccagaaagagaucgaccggcugaacgagguggccaagaaucugaacgagagccugaucgaccugcaagaacuggggaaguacgagcaguacaucaaguggcccugguacaucuggcugggcuuuaucgccggacugauugccaucgugauggucacaaucaugcuguguugcaugaccagcugcuguagcugccugaagggcuguuguagcuguggcagcugcugcaaguucgacgaggacgauucugagcccgugcugaagggcgugaaacugcacuacaccugaggacuagucccuguucccagagcccacuuuuuuuucuuuuuuugaaauaaaauagccugucuuucagaucucaaaggcucuuuucagagccaccaaaaaaaaaaaaaaaaaaaaaaaaaaaaaaaaaaaaaaaaaaaaaaaaaaaaaaaaaaaaaaaaaaaaaaaaaaaaaaaaaaaaaaaaaaaaaaaaaaaaa

SEQ ID NO: 23702 - RNA, 4191 nt, Artificial Sequence
  SARS-CoV-2/Wuhan/WIV05/2019__EPI_ISL_402128 spike protein mRNA gc mod (1-1273)(D614G)
aggagagggcgcuuggcuugcaaggacccugagcugcggcauugaagcacacccaacccaacucgacugaagucagccucacugaaccggaucugagaaucuucucucucugggcuugccagggcucuccgaaccuagcuagcauccucuucaauuccaacuagaaagcuuaccauguucguguuucuggugcugcugccccugguguccagccagugugugaaccugaccaccagaacacagcugccuccagccuacaccaacagcuucaccagaggcguguacuaccccgacaagguguucagauccagcgugcugcacucuacccaggaccuguuccugccuuucuucagcaacgugaccugguuccacgccauccacguguccggcaccaauggcaccaagagauucgacaaccccgugcugcccuucaacgacgggguguacuuugccagcaccgagaaguccaacaucaucagaggcuggaucuucggcaccacacuggacagcaagacccagagccugcugaucgugaacaacgccaccaacguggucaucaaagugugcgaguuccaguucugcaacgaccccuuccugggcgucuacuaccacaagaacaacaagagcuggauggaaagcgaguuccggguguacagcagcgccaacaacugcaccuucgaguacgugucccagccuuuccugauggaccuggaaggcaagcagggcaacuucaagaaccugcgcgaguucguguucaagaacaucgacggcuacuucaaaaucuacagcaagcacaccccuaucaaccucgugcgggaucugccucagggcuucucugcucuggaaccccugguggaucugcccaucggcaucaacaucacccgguuucagacacugcuggcccugcacagaagcuaccugacaccuggcgauagcagcagcggauggacagcuggugccgccgcuuacuaugugggcuaccugcagccuagaaccuuccugcugaaguacaacgagaacggcaccaucaccgacgccguggauugugcucuggauccucugagcgagacaaagugcacccugaaguccuucaccguggaaaagggcaucuaccagaccagcaacuuccgggugcagcccaccgaauccaucgugcgguuccccaauaucaccaaucugugccccuucggcgagguguucaaugccaccagauucgccucuguguacgccuggaaccggaagcggaucagcaauugcguggccgacuacuccgugcuguacaacuccgccagcuucagcaccuucaagugcuacggcguguccccuaccaagcugaacgaccugugcuucacaaacguguacgccgacagcuucgugauccggggagaugaagugcggcagauugccccuggacagacaggcaagaucgccgacuacaacuacaagcugcccgacgacuucaccggcugugugauugccuggaacagcaacaaccuggacuccaaagucggcggcaacuacaauuaccuguaccggcuguuccggaaguccaaucugaagcccuucgagcgggacaucagcaccgaaaucuaucaggccggcagcaccccuugcaacggcguggaaggcuucaacugcuacuucccacugcaguccuacggcuuucagcccacaaauggcgugggcuaucagcccuacagagugguggugcugagcuucgaacugcugcaugcuccugccacagugugcggcccuaagaaaagcaccaaucucgugaagaacaaaugcgugaacuucaacuucaacggccugaccggcaccggcgugcugacagagagcaacaagaaguuccugccauuccagcaguuuggccgggauaucgccgauaccacagacgccguuagagauccccagacacuggaaauccuggacaucaccccaugcagcuucggcggagugucugugaucaccccuggcaccaacaccagcaaucagguggcagugcuguaccagggcgugaacuguaccgaagugcccguggccauucacgccgaucagcugacaccuacauggcggguguacuccaccggcagcaauguguuucagaccagagccggcugucugaucggagccgagcacgugaacaauagcuacgagugcgacauccccaucggcgcuggcaucugugccagcuaccagacacagacaaacagccccagacgggcuagaagcguggccagccagagcaucauugccuacacaaugucucugggcgccgagaacagcguggccuacuccaacaacucuaucgcuauccccaccaacuucaccaucagcgugaccaccgagauccugccuguguccaugaccaagaccagcguggacugcaccauguacaucugcggcgauuccaccgagugcuccaaccugcugcugcaguacggcagcuucugcacccagcugaauagagcccugacagggaucgccguggaacaggacaagaacacccaagagguguucgcccaagugaagcaaaucuacaagaccccuccuaucaaggacuucggcggcuucaauuucagccagauucugcccgauccuagcaagcccagcaagcggagcuucaucgaggaccugcuguucaacaaagugacacuggccgacgccggcuucaucaagcaguauggcgauugucugggcgacauugccgccagggaucugauuugcgcccagaaguuuaacggacugacagugcugccuccucugcugaccgaugagaugaucgcccaguacacaucugcccugcuggccggcacaaucacaagcggcuggacauuuggagcuggcgccgcucugcagauccccuuugcuaugcagauggccuaccgguucaacggcaucggagugacccagaaugugcuguacgagaaccagaagcugaucgccaaccaguucaacagcgccaucggcaagauccaggacagccugagcagcacagcaagcgcccugggaaagcugcaggacguggucaaccagaaugcccaggcacugaacacccuggucaagcagcuguccuccaacuucggcgccaucagcucugugcugaacgauauccugagcagacuggacaaggucgaggccgaggugcagaucgacagacugaucacaggcagacugcagagccuccagacauacgugacccagcagcugaucagagccgccgagauuagagccucugccaaucuggccgccaccaagaugucugagugugugcugggccagagcaagagaguggacuuuugcggcaagggcuaccaccugaugagcuucccucagucugccccucacggcgugguguuucugcacgugacauaugugcccgcucaagagaagaauuucaccaccgcuccagccaucugccacgacggcaaagcccacuuuccuagagaaggcguguucguguccaacggcacccauugguucgugacacagcggaacuucuacgagccccagaucaucaccaccgacaacaccuucgugucuggcaacugcgacguugugaucggcauugugaacaauaccguguacgacccucugcagcccgagcuggacagcuucaaagaggaacuggacaaguacuuuaagaaccacacaagccccgacguggaccugggcgauaucagcggaaucaaugccagcgucgugaacauccagaaagagaucgaccggcugaacgagguggccaagaaucugaacgagagccugaucgaccugcaagaacuggggaaguacgagcaguacaucaaguggcccugguacaucuggcugggcuuuaucgccggacugauugccaucgugauggucacaaucaugcuguguugcaugaccagcugcuguagcugccugaagggcuguuguagcuguggcagcugcugcaaguucgacgaggacgauucugagcccgugcugaagggcgugaaacugcacuacaccugaggacuagucccuguucccagagcccacuuuuuuuucuuuuuuugaaauaaaauagccugucuuucagaucucaaaggcucuuuucagagccaccaaaaaaaaaaaaaaaaaaaaaaaaaaaaaaaaaaaaaaaaaaaaaaaaaaaaaaaaaaaaaaaaaaaaaaaaaaaaaaaaaaaaaaaaaaaaaaaaaaaaa

SEQ ID NO: 23703 - RNA, 4191 nt, Artificial Sequence
  SARS-CoV-2/Wuhan/WIV05/2019__EPI_ISL_402128 spike protein mRNA gc mod (1-1273)(A222V_D614G)
aggagagggcgcuuggcuugcaaggacccugagcugcggcauugaagcacacccaacccaacucgacugaagucagccucacugaaccggaucugagaaucuucucucucugggcuugccagggcucuccgaaccuagcuagcauccucuucaauuccaacuagaaagcuuaccauguucguguuucuggugcugcugccccugguguccagccagugugugaaccugaccaccagaacacagcugccuccagccuacaccaacagcuucaccagaggcguguacuaccccgacaagguguucagauccagcgugcugcacucuacccaggaccuguuccugccuuucuucagcaacgugaccugguuccacgccauccacguguccggcaccaauggcaccaagagauucgacaaccccgugcugcccuucaacgacgggguguacuuugccagcaccgagaaguccaacaucaucagaggcuggaucuucggcaccacacuggacagcaagacccagagccugcugaucgugaacaacgccaccaacguggucaucaaagugugcgaguuccaguucugcaacgaccccuuccugggcgucuacuaccacaagaacaacaagagcuggauggaaagcgaguuccggguguacagcagcgccaacaacugcaccuucgaguacgugucccagccuuuccugauggaccuggaaggcaagcagggcaacuucaagaaccugcgcgaguucguguucaagaacaucgacggcuacuucaaaaucuacagcaagcacaccccuaucaaccucgugcgggaucugccucagggcuucucugugcuggaaccccugguggaucugcccaucggcaucaacaucacccgguuucagacacugcuggcccugcacagaagcuaccugacaccuggcgauagcagcagcggauggacagcuggugccgccgcuuacuaugugggcuaccugcagccuagaaccuuccugcugaaguacaacgagaacggcaccaucaccgacgccguggauugugcucuggauccucugagcgagacaaagugcacccugaaguccuucaccguggaaaagggcaucuaccagaccagcaacuuccgggugcagcccaccgaauccaucgugcgguuccccaauaucaccaaucugugccccuucggcgagguguucaaugccaccagauucgccucuguguacgccuggaaccggaagcggaucagcaauugcguggccgacuacuccgugcuguacaacuccgccagcuucagcaccuucaagugcuacggcguguccccuaccaagcugaacgaccugugcuucacaaacguguacgccgacagcuucgugauccggggagaugaagugcggcagauugccccuggacagacaggcaagaucgccgacuacaacuacaagcugcccgacgacuucaccggcugugugauugccuggaacagcaacaaccuggacuccaaagucggcggcaacuacaauuaccuguaccggcuguuccggaaguccaaucugaagcccuucgagcgggacaucagcaccgaaaucuaucaggccggcagcaccccuugcaacggcguggaaggcuucaacugcuacuucccacugcaguccuacggcuuucagcccacaaauggcgugggcuaucagcccuacagagugguggugcugagcuucgaacugcugcaugcuccugccacagugugcggcccuaagaaaagcaccaaucucgugaagaacaaaugcgugaacuucaacuucaacggccugaccggcaccggcgugcugacagagagcaacaagaaguuccugccauuccagcaguuuggccgggauaucgccgauaccacagacgccguuagagauccccagacacuggaaauccuggacaucaccccaugcagcuucggcggagugucugugaucaccccuggcaccaacaccagcaaucagguggcagugcuguaccagggcgugaacuguaccgaagugcccguggccauucacgccgaucagcugacaccuacauggcggguguacuccaccggcagcaauguguuucagaccagagccggcugucugaucggagccgagcacgugaacaauagcuacgagugcgacauccccaucggcgcuggcaucugugccagcuaccagacacagacaaacagccccagacgggcuagaagcguggccagccagagcaucauugccuacacaaugucucugggcgccgagaacagcguggccuacuccaacaacucuaucgcuauccccaccaacuucaccaucagcgugaccaccgagauccugccuguguccaugaccaagaccagcguggacugcaccauguacaucugcggcgauuccaccgagugcuccaaccugcugcugcaguacggcagcuucugcacccagcugaauagagcccugacagggaucgccguggaacaggacaagaacacccaagagguguucgcccaagugaagcaaaucuacaagaccccuccuaucaaggacuucggcggcuucaauuucagccagauucugcccgauccuagcaagcccagcaagcggagcuucaucgaggaccugcuguucaacaaagugacacuggccgacgccggcuucaucaagcaguauggcgauugucugggcgacauugccgccagggaucugauuugcgcccagaaguuuaacggacugacagugcugccuccucugcugaccgaugagaugaucgcccaguacacaucugcccugcuggccggcacaaucacaagcggcuggacauuuggagcuggcgccgcucugcagauccccuuugcuaugcagauggccuaccgguucaacggcaucggagugacccagaaugugcuguacgagaaccagaagcugaucgccaaccaguucaacagcgccaucggcaagauccaggacagccugagcagcacagcaagcgcccugggaaagcugcaggacguggucaaccagaaugcccaggcacugaacacccuggucaagcagcuguccuccaacuucggcgccaucagcucugugcugaacgauauccugagcagacuggacaaggucgaggccgaggugcagaucgacagacugaucacaggcagacugcagagccuccagacauacgugacccagcagcugaucagagccgccgagauuagagccucugccaaucuggccgccaccaagaugucugagugugugcugggccagagcaagagaguggacuuuugcggcaagggcuaccaccugaugagcuucccucagucugccccucacggcgugguguuucugcacgugacauaugugcccgcucaagagaagaauuucaccaccgcuccagccaucugccacgacggcaaagcccacuuuccuagagaaggcguguucguguccaacggcacccauugguucgugacacagcggaacuucuacgagccccagaucaucaccaccgacaacaccuucgugucuggcaacugcgacguugugaucggcauugugaacaauaccguguacgacccucugcagcccgagcuggacagcuucaaagaggaacuggacaaguacuuuaagaaccacacaagccccgacguggaccugggcgauaucagcggaaucaaugccagcgucgugaacauccagaaagagaucgaccggcugaacgagguggccaagaaucugaacgagagccugaucgaccugcaagaacuggggaaguacgagcaguacaucaaguggcccugguacaucuggcugggcuuuaucgccggacugauugccaucgugauggucacaaucaugcuguguugcaugaccagcugcuguagcugccugaagggcuguuguagcuguggcagcugcugcaaguucgacgaggacgauucugagcccgugcugaagggcgugaaacugcacuacaccugaggacuagucccuguucccagagcccacuuuuuuuucuuuuuuugaaauaaaauagccugucuuucagaucucaaaggcucuuuucagagccaccaaaaaaaaaaaaaaaaaaaaaaaaaaaaaaaaaaaaaaaaaaaaaaaaaaaaaaaaaaaaaaaaaaaaaaaaaaaaaaaaaaaaaaaaaaaaaaaaaaaaa

SEQ ID NO: 23704 - RNA, 4191 nt, Artificial Sequence
  SARS-CoV-2/Wuhan/WIV05/2019__EPI_ISL_402128 spike protein mRNA gc mod (1-1273)(N439K_D614G)
aggagagggcgcuuggcuugcaaggacccugagcugcggcauugaagcacacccaacccaacucgacugaagucagccucacugaaccggaucugagaaucuucucucucugggcuugccagggcucuccgaaccuagcuagcauccucuucaauuccaacuagaaagcuuaccauguucguguuucuggugcugcugccccugguguccagccagugugugaaccugaccaccagaacacagcugccuccagccuacaccaacagcuucaccagaggcguguacuaccccgacaagguguucagauccagcgugcugcacucuacccaggaccuguuccugccuuucuucagcaacgugaccugguuccacgccauccacguguccggcaccaauggcaccaagagauucgacaaccccgugcugcccuucaacgacgggguguacuuugccagcaccgagaaguccaacaucaucagaggcuggaucuucggcaccacacuggacagcaagacccagagccugcugaucgugaacaacgccaccaacguggucaucaaagugugcgaguuccaguucugcaacgaccccuuccugggcgucuacuaccacaagaacaacaagagcuggauggaaagcgaguuccggguguacagcagcgccaacaacugcaccuucgaguacgugucccagccuuuccugauggaccuggaaggcaagcagggcaacuucaagaaccugcgcgaguucguguucaagaacaucgacggcuacuucaaaaucuacagcaagcacaccccuaucaaccucgugcgggaucugccucagggcuucucugcucuggaaccccugguggaucugcccaucggcaucaacaucacccgguuucagacacugcuggcccugcacagaagcuaccugacaccuggcgauagcagcagcggauggacagcuggugccgccgcuuacuaugugggcuaccugcagccuagaaccuuccugcugaaguacaacgagaacggcaccaucaccgacgccguggauugugcucuggauccucugagcgagacaaagugcacccugaaguccuucaccguggaaaagggcaucuaccagaccagcaacuuccgggugcagcccaccgaauccaucgugcgguuccccaauaucaccaaucugugccccuucggcgagguguucaaugccaccagauucgccucuguguacgccuggaaccggaagcggaucagcaauugcguggccgacuacuccgugcuguacaacuccgccagcuucagcaccuucaagugcuacggcguguccccuaccaagcugaacgaccugugcuucacaaacguguacgccgacagcuucgugauccggggagaugaagugcggcagauugccccuggacagacaggcaagaucgccgacuacaacuacaagcugcccgacgacuucaccggcugugugauugccuggaacagcaagaaccuggacuccaaagucggcggcaacuacaauuaccuguaccggcuguuccggaaguccaaucugaagcccuucgagcgggacaucagcaccgaaaucuaucaggccggcagcaccccuugcaacggcguggaaggcuucaacugcuacuucccacugcaguccuacggcuuucagcccacaaauggcgugggcuaucagcccuacagagugguggugcugagcuucgaacugcugcaugcuccugccacagugugcggcccuaagaaaagcaccaaucucgugaagaacaaaugcgugaacuucaacuucaacggccugaccggcaccggcgugcugacagagagcaacaagaaguuccugccauuccagcaguuuggccgggauaucgccgauaccacagacgccguuagagauccccagacacuggaaauccuggacaucaccccaugcagcuucggcggagugucugugaucaccccuggcaccaacaccagcaaucagguggcagugcuguaccagggcgugaacuguaccgaagugcccguggccauucacgccgaucagcugacaccuacauggcggguguacuccaccggcagcaauguguuucagaccagagccggcugucugaucggagccgagcacgugaacaauagcuacgagugcgacauccccaucggcgcuggcaucugugccagcuaccagacacagacaaacagccccagacgggcuagaagcguggccagccagagcaucauugccuacacaaugucucugggcgccgagaacagcguggccuacuccaacaacucuaucgcuauccccaccaacuucaccaucagcgugaccaccgagauccugccuguguccaugaccaagaccagcguggacugcaccauguacaucugcggcgauuccaccgagugcuccaaccugcugcugcaguacggcagcuucugcacccagcugaauagagcccugacagggaucgccguggaacaggacaagaacacccaagagguguucgcccaagugaagcaaaucuacaagaccccuccuaucaaggacuucggcggcuucaauuucagccagauucugcccgauccuagcaagcccagcaagcggagcuucaucgaggaccugcuguucaacaaagugacacuggccgacgccggcuucaucaagcaguauggcgauugucugggcgacauugccgccagggaucugauuugcgcccagaaguuuaacggacugacagugcugccuccucugcugaccgaugagaugaucgcccaguacacaucugcccugcuggccggcacaaucacaagcggcuggacauuuggagcuggcgccgcucugcagauccccuuugcuaugcagauggccuaccgguucaacggcaucggagugacccagaaugugcuguacgagaaccagaagcugaucgccaaccaguucaacagcgccaucggcaagauccaggacagccugagcagcacagcaagcgcccugggaaagcugcaggacguggucaaccagaaugcccaggcacugaacacccuggucaagcagcuguccuccaacuucggcgccaucagcucugugcugaacgauauccugagcagacuggacaaggucgaggccgaggugcagaucgacagacugaucacaggcagacugcagagccuccagacauacgugacccagcagcugaucagagccgccgagauuagagccucugccaaucuggccgccaccaagaugucugagugugugcugggccagagcaagagaguggacuuuugcggcaagggcuaccaccugaugagcuucccucagucugccccucacggcgugguguuucugcacgugacauaugugcccgcucaagagaagaauuucaccaccgcuccagccaucugccacgacggcaaagcccacuuuccuagagaaggcguguucguguccaacggcacccauugguucgugacacagcggaacuucuacgagccccagaucaucaccaccgacaacaccuucgugucuggcaacugcgacguugugaucggcauugugaacaauaccguguacgacccucugcagcccgagcuggacagcuucaaagaggaacuggacaaguacuuuaagaaccacacaagccccgacguggaccugggcgauaucagcggaaucaaugccagcgucgugaacauccagaaagagaucgaccggcugaacgagguggccaagaaucugaacgagagccugaucgaccugcaagaacuggggaaguacgagcaguacaucaaguggcccugguacaucuggcugggcuuuaucgccggacugauugccaucgugauggucacaaucaugcuguguugcaugaccagcugcuguagcugccugaagggcuguuguagcuguggcagcugcugcaaguucgacgaggacgauucugagcccgugcugaagggcgugaaacugcacuacaccugaggacuagucccuguucccagagcccacuuuuuuuucuuuuuuugaaauaaaauagccugucuuucagaucucaaaggcucuuuucagagccaccaaaaaaaaaaaaaaaaaaaaaaaaaaaaaaaaaaaaaaaaaaaaaaaaaaaaaaaaaaaaaaaaaaaaaaaaaaaaaaaaaaaaaaaaaaaaaaaaaaaaa

SEQ ID NO: 23705 - RNA, 4191 nt, Artificial Sequence
  SARS-CoV-2/Wuhan/WIV05/2019__EPI_ISL_402128 spike protein mRNA gc mod (1-1273)(S477N_D614G)
aggagagggcgcuuggcuugcaaggacccugagcugcggcauugaagcacacccaacccaacucgacugaagucagccucacugaaccggaucugagaaucuucucucucugggcuugccagggcucuccgaaccuagcuagcauccucuucaauuccaacuagaaagcuuaccauguucguguuucuggugcugcugccccugguguccagccagugugugaaccugaccaccagaacacagcugccuccagccuacaccaacagcuucaccagaggcguguacuaccccgacaagguguucagauccagcgugcugcacucuacccaggaccuguuccugccuuucuucagcaacgugaccugguuccacgccauccacguguccggcaccaauggcaccaagagauucgacaaccccgugcugcccuucaacgacgggguguacuuugccagcaccgagaaguccaacaucaucagaggcuggaucuucggcaccacacuggacagcaagacccagagccugcugaucgugaacaacgccaccaacguggucaucaaagugugcgaguuccaguucugcaacgaccccuuccugggcgucuacuaccacaagaacaacaagagcuggauggaaagcgaguuccggguguacagcagcgccaacaacugcaccuucgaguacgugucccagccuuuccugauggaccuggaaggcaagcagggcaacuucaagaaccugcgcgaguucguguucaagaacaucgacggcuacuucaaaaucuacagcaagcacaccccuaucaaccucgugcgggaucugccucagggcuucucugcucuggaaccccugguggaucugcccaucggcaucaacaucacccgguuucagacacugcuggcccugcacagaagcuaccugacaccuggcgauagcagcagcggauggacagcuggugccgccgcuuacuaugugggcuaccugcagccuagaaccuuccugcugaaguacaacgagaacggcaccaucaccgacgccguggauugugcucuggauccucugagcgagacaaagugcacccugaaguccuucaccguggaaaagggcaucuaccagaccagcaacuuccgggugcagcccaccgaauccaucgugcgguuccccaauaucaccaaucugugccccuucggcgagguguucaaugccaccagauucgccucuguguacgccuggaaccggaagcggaucagcaauugcguggccgacuacuccgugcuguacaacuccgccagcuucagcaccuucaagugcuacggcguguccccuaccaagcugaacgaccugugcuucacaaacguguacgccgacagcuucgugauccggggagaugaagugcggcagauugccccuggacagacaggcaagaucgccgacuacaacuacaagcugcccgacgacuucaccggcugugugauugccuggaacagcaacaaccuggacuccaaagucggcggcaacuacaauuaccuguaccggcuguuccggaaguccaaucugaagcccuucgagcgggacaucagcaccgaaaucuaucaggccggcaacaccccuugcaacggcguggaaggcuucaacugcuacuucccacugcaguccuacggcuuucagcccacaaauggcgugggcuaucagcccuacagagugguggugcugagcuucgaacugcugcaugcuccugccacagugugcggcccuaagaaaagcaccaaucucgugaagaacaaaugcgugaacuucaacuucaacggccugaccggcaccggcgugcugacagagagcaacaagaaguuccugccauuccagcaguuuggccgggauaucgccgauaccacagacgccguuagagauccccagacacuggaaauccuggacaucaccccaugcagcuucggcggagugucugugaucaccccuggcaccaacaccagcaaucagguggcagugcuguaccagggcgugaacuguaccgaagugcccguggccauucacgccgaucagcugacaccuacauggcggguguacuccaccggcagcaauguguuucagaccagagccggcugucugaucggagccgagcacgugaacaauagcuacgagugcgacauccccaucggcgcuggcaucugugccagcuaccagacacagacaaacagccccagacgggcuagaagcguggccagccagagcaucauugccuacacaaugucucugggcgccgagaacagcguggccuacuccaacaacucuaucgcuauccccaccaacuucaccaucagcgugaccaccgagauccugccuguguccaugaccaagaccagcguggacugcaccauguacaucugcggcgauuccaccgagugcuccaaccugcugcugcaguacggcagcuucugcacccagcugaauagagcccugacagggaucgccguggaacaggacaagaacacccaagagguguucgcccaagugaagcaaaucuacaagaccccuccuaucaaggacuucggcggcuucaauuucagccagauucugcccgauccuagcaagcccagcaagcggagcuucaucgaggaccugcuguucaacaaagugacacuggccgacgccggcuucaucaagcaguauggcgauugucugggcgacauugccgccagggaucugauuugcgcccagaaguuuaacggacugacagugcugccuccucugcugaccgaugagaugaucgcccaguacacaucugcccugcuggccggcacaaucacaagcggcuggacauuuggagcuggcgccgcucugcagauccccuuugcuaugcagauggccuaccgguucaacggcaucggagugacccagaaugugcuguacgagaaccagaagcugaucgccaaccaguucaacagcgccaucggcaagauccaggacagccugagcagcacagcaagcgcccugggaaagcugcaggacguggucaaccagaaugcccaggcacugaacacccuggucaagcagcuguccuccaacuucggcgccaucagcucugugcugaacgauauccugagcagacuggacaaggucgaggccgaggugcagaucgacagacugaucacaggcagacugcagagccuccagacauacgugacccagcagcugaucagagccgccgagauuagagccucugccaaucuggccgccaccaagaugucugagugugugcugggccagagcaagagaguggacuuuugcggcaagggcuaccaccugaugagcuucccucagucugccccucacggcgugguguuucugcacgugacauaugugcccgcucaagagaagaauuucaccaccgcuccagccaucugccacgacggcaaagcccacuuuccuagagaaggcguguucguguccaacggcacccauugguucgugacacagcggaacuucuacgagccccagaucaucaccaccgacaacaccuucgugucuggcaacugcgacguugugaucggcauugugaacaauaccguguacgacccucugcagcccgagcuggacagcuucaaagaggaacuggacaaguacuuuaagaaccacacaagccccgacguggaccugggcgauaucagcggaaucaaugccagcgucgugaacauccagaaagagaucgaccggcugaacgagguggccaagaaucugaacgagagccugaucgaccugcaagaacuggggaaguacgagcaguacaucaaguggcccugguacaucuggcugggcuuuaucgccggacugauugccaucgugauggucacaaucaugcuguguugcaugaccagcugcuguagcugccugaagggcuguuguagcuguggcagcugcugcaaguucgacgaggacgauucugagcccgugcugaagggcgugaaacugcacuacaccugaggacuagucccuguucccagagcccacuuuuuuuucuuuuuuugaaauaaaauagccugucuuucagaucucaaaggcucuuuucagagccaccaaaaaaaaaaaaaaaaaaaaaaaaaaaaaaaaaaaaaaaaaaaaaaaaaaaaaaaaaaaaaaaaaaaaaaaaaaaaaaaaaaaaaaaaaaaaaaaaaaaaa

SEQ ID NO: 23706 - RNA, 4191 nt, Artificial Sequence
  SARS-CoV-2/Wuhan/WIV05/2019__EPI_ISL_402128 spike protein mRNA gc mod (1-1273)(N501Y_D614G)
aggagagggcgcuuggcuugcaaggacccugagcugcggcauugaagcacacccaacccaacucgacugaagucagccucacugaaccggaucugagaaucuucucucucugggcuugccagggcucuccgaaccuagcuagcauccucuucaauuccaacuagaaagcuuaccauguucguguuucuggugcugcugccccugguguccagccagugugugaaccugaccaccagaacacagcugccuccagccuacaccaacagcuucaccagaggcguguacuaccccgacaagguguucagauccagcgugcugcacucuacccaggaccuguuccugccuuucuucagcaacgugaccugguuccacgccauccacguguccggcaccaauggcaccaagagauucgacaaccccgugcugcccuucaacgacgggguguacuuugccagcaccgagaaguccaacaucaucagaggcuggaucuucggcaccacacuggacagcaagacccagagccugcugaucgugaacaacgccaccaacguggucaucaaagugugcgaguuccaguucugcaacgaccccuuccugggcgucuacuaccacaagaacaacaagagcuggauggaaagcgaguuccggguguacagcagcgccaacaacugcaccuucgaguacgugucccagccuuuccugauggaccuggaaggcaagcagggcaacuucaagaaccugcgcgaguucguguucaagaacaucgacggcuacuucaaaaucuacagcaagcacaccccuaucaaccucgugcgggaucugccucagggcuucucugcucuggaaccccugguggaucugcccaucggcaucaacaucacccgguuucagacacugcuggcccugcacagaagcuaccugacaccuggcgauagcagcagcggauggacagcuggugccgccgcuuacuaugugggcuaccugcagccuagaaccuuccugcugaaguacaacgagaacggcaccaucaccgacgccguggauugugcucuggauccucugagcgagacaaagugcacccugaaguccuucaccguggaaaagggcaucuaccagaccagcaacuuccgggugcagcccaccgaauccaucgugcgguuccccaauaucaccaaucugugccccuucggcgagguguucaaugccaccagauucgccucuguguacgccuggaaccggaagcggaucagcaauugcguggccgacuacuccgugcuguacaacuccgccagcuucagcaccuucaagugcuacggcguguccccuaccaagcugaacgaccugugcuucacaaacguguacgccgacagcuucgugauccggggagaugaagugcggcagauugccccuggacagacaggcaagaucgccgacuacaacuacaagcugcccgacgacuucaccggcugugugauugccuggaacagcaacaaccuggacuccaaagucggcggcaacuacaauuaccuguaccggcuguuccggaaguccaaucugaagcccuucgagcgggacaucagcaccgaaaucuaucaggccggcagcaccccuugcaacggcguggaaggcuucaacugcuacuucccacugcaguccuacggcuuucagcccacauacggcgugggcuaucagcccuacagagugguggugcugagcuucgaacugcugcaugcuccugccacagugugcggcccuaagaaaagcaccaaucucgugaagaacaaaugcgugaacuucaacuucaacggccugaccggcaccggcgugcugacagagagcaacaagaaguuccugccauuccagcaguuuggccgggauaucgccgauaccacagacgccguuagagauccccagacacuggaaauccuggacaucaccccaugcagcuucggcggagugucugugaucaccccuggcaccaacaccagcaaucagguggcagugcuguaccagggcgugaacuguaccgaagugcccguggccauucacgccgaucagcugacaccuacauggcggguguacuccaccggcagcaauguguuucagaccagagccggcugucugaucggagccgagcacgugaacaauagcuacgagugcgacauccccaucggcgcuggcaucugugccagcuaccagacacagacaaacagccccagacgggcuagaagcguggccagccagagcaucauugccuacacaaugucucugggcgccgagaacagcguggccuacuccaacaacucuaucgcuauccccaccaacuucaccaucagcgugaccaccgagauccugccuguguccaugaccaagaccagcguggacugcaccauguacaucugcggcgauuccaccgagugcuccaaccugcugcugcaguacggcagcuucugcacccagcugaauagagcccugacagggaucgccguggaacaggacaagaacacccaagagguguucgcccaagugaagcaaaucuacaagaccccuccuaucaaggacuucggcggcuucaauuucagccagauucugcccgauccuagcaagcccagcaagcggagcuucaucgaggaccugcuguucaacaaagugacacuggccgacgccggcuucaucaagcaguauggcgauugucugggcgacauugccgccagggaucugauuugcgcccagaaguuuaacggacugacagugcugccuccucugcugaccgaugagaugaucgcccaguacacaucugcccugcuggccggcacaaucacaagcggcuggacauuuggagcuggcgccgcucugcagauccccuuugcuaugcagauggccuaccgguucaacggcaucggagugacccagaaugugcuguacgagaaccagaagcugaucgccaaccaguucaacagcgccaucggcaagauccaggacagccugagcagcacagcaagcgcccugggaaagcugcaggacguggucaaccagaaugcccaggcacugaacacccuggucaagcagcuguccuccaacuucggcgccaucagcucugugcugaacgauauccugagcagacuggacaaggucgaggccgaggugcagaucgacagacugaucacaggcagacugcagagccuccagacauacgugacccagcagcugaucagagccgccgagauuagagccucugccaaucuggccgccaccaagaugucugagugugugcugggccagagcaagagaguggacuuuugcggcaagggcuaccaccugaugagcuucccucagucugccccucacggcgugguguuucugcacgugacauaugugcccgcucaagagaagaauuucaccaccgcuccagccaucugccacgacggcaaagcccacuuuccuagagaaggcguguucguguccaacggcacccauugguucgugacacagcggaacuucuacgagccccagaucaucaccaccgacaacaccuucgugucuggcaacugcgacguugugaucggcauugugaacaauaccguguacgacccucugcagcccgagcuggacagcuucaaagaggaacuggacaaguacuuuaagaaccacacaagccccgacguggaccugggcgauaucagcggaaucaaugccagcgucgugaacauccagaaagagaucgaccggcugaacgagguggccaagaaucugaacgagagccugaucgaccugcaagaacuggggaaguacgagcaguacaucaaguggcccugguacaucuggcugggcuuuaucgccggacugauugccaucgugauggucacaaucaugcuguguugcaugaccagcugcuguagcugccugaagggcuguuguagcuguggcagcugcugcaaguucgacgaggacgauucugagcccgugcugaagggcgugaaacugcacuacaccugaggacuagucccuguucccagagcccacuuuuuuuucuuuuuuugaaauaaaauagccugucuuucagaucucaaaggcucuuuucagagccaccaaaaaaaaaaaaaaaaaaaaaaaaaaaaaaaaaaaaaaaaaaaaaaaaaaaaaaaaaaaaaaaaaaaaaaaaaaaaaaaaaaaaaaaaaaaaaaaaaaaaa

SEQ ID NO: 23707 - RNA, 4185 nt, Artificial Sequence
  SARS-CoV-2/Wuhan/WIV05/2019__EPI_ISL_402128 spike protein mRNA gc mod (1-1273)(H69del_V70del_D614G)
aggagagggcgcuuggcuugcaaggacccugagcugcggcauugaagcacacccaacccaacucgacugaagucagccucacugaaccggaucugagaaucuucucucucugggcuugccagggcucuccgaaccuagcuagcauccucuucaauuccaacuagaaagcuuaccauguucguguuucuggugcugcugccccugguguccagccagugugugaaccugaccaccagaacacagcugccuccagccuacaccaacagcuucaccagaggcguguacuaccccgacaagguguucagauccagcgugcugcacucuacccaggaccuguuccugccuuucuucagcaacgugaccugguuccacgccaucuccggcaccaauggcaccaagagauucgacaaccccgugcugcccuucaacgacgggguguacuuugccagcaccgagaaguccaacaucaucagaggcuggaucuucggcaccacacuggacagcaagacccagagccugcugaucgugaacaacgccaccaacguggucaucaaagugugcgaguuccaguucugcaacgaccccuuccugggcgucuacuaccacaagaacaacaagagcuggauggaaagcgaguuccggguguacagcagcgccaacaacugcaccuucgaguacgugucccagccuuuccugauggaccuggaaggcaagcagggcaacuucaagaaccugcgcgaguucguguucaagaacaucgacggcuacuucaaaaucuacagcaagcacaccccuaucaaccucgugcgggaucugccucagggcuucucugcucuggaaccccugguggaucugcccaucggcaucaacaucacccgguuucagacacugcuggcccugcacagaagcuaccugacaccuggcgauagcagcagcggauggacagcuggugccgccgcuuacuaugugggcuaccugcagccuagaaccuuccugcugaaguacaacgagaacggcaccaucaccgacgccguggauugugcucuggauccucugagcgagacaaagugcacccugaaguccuucaccguggaaaagggcaucuaccagaccagcaacuuccgggugcagcccaccgaauccaucgugcgguuccccaauaucaccaaucugugccccuucggcgagguguucaaugccaccagauucgccucuguguacgccuggaaccggaagcggaucagcaauugcguggccgacuacuccgugcuguacaacuccgccagcuucagcaccuucaagugcuacggcguguccccuaccaagcugaacgaccugugcuucacaaacguguacgccgacagcuucgugauccggggagaugaagugcggcagauugccccuggacagacaggcaagaucgccgacuacaacuacaagcugcccgacgacuucaccggcugugugauugccuggaacagcaacaaccuggacuccaaagucggcggcaacuacaauuaccuguaccggcuguuccggaaguccaaucugaagcccuucgagcgggacaucagcaccgaaaucuaucaggccggcagcaccccuugcaacggcguggaaggcuucaacugcuacuucccacugcaguccuacggcuuucagcccacaaauggcgugggcuaucagcccuacagagugguggugcugagcuucgaacugcugcaugcuccugccacagugugcggcccuaagaaaagcaccaaucucgugaagaacaaaugcgugaacuucaacuucaacggccugaccggcaccggcgugcugacagagagcaacaagaaguuccugccauuccagcaguuuggccgggauaucgccgauaccacagacgccguuagagauccccagacacuggaaauccuggacaucaccccaugcagcuucggcggagugucugugaucaccccuggcaccaacaccagcaaucagguggcagugcuguaccagggcgugaacuguaccgaagugcccguggccauucacgccgaucagcugacaccuacauggcggguguacuccaccggcagcaauguguuucagaccagagccggcugucugaucggagccgagcacgugaacaauagcuacgagugcgacauccccaucggcgcuggcaucugugccagcuaccagacacagacaaacagccccagacgggcuagaagcguggccagccagagcaucauugccuacacaaugucucugggcgccgagaacagcguggccuacuccaacaacucuaucgcuauccccaccaacuucaccaucagcgugaccaccgagauccugccuguguccaugaccaagaccagcguggacugcaccauguacaucugcggcgauuccaccgagugcuccaaccugcugcugcaguacggcagcuucugcacccagcugaauagagcccugacagggaucgccguggaacaggacaagaacacccaagagguguucgcccaagugaagcaaaucuacaagaccccuccuaucaaggacuucggcggcuucaauuucagccagauucugcccgauccuagcaagcccagcaagcggagcuucaucgaggaccugcuguucaacaaagugacacuggccgacgccggcuucaucaagcaguauggcgauugucugggcgacauugccgccagggaucugauuugcgcccagaaguuuaacggacugacagugcugccuccucugcugaccgaugagaugaucgcccaguacacaucugcccugcuggccggcacaaucacaagcggcuggacauuuggagcuggcgccgcucugcagauccccuuugcuaugcagauggccuaccgguucaacggcaucggagugacccagaaugugcuguacgagaaccagaagcugaucgccaaccaguucaacagcgccaucggcaagauccaggacagccugagcagcacagcaagcgcccugggaaagcugcaggacguggucaaccagaaugcccaggcacugaacacccuggucaagcagcuguccuccaacuucggcgccaucagcucugugcugaacgauauccugagcagacuggacaaggucgaggccgaggugcagaucgacagacugaucacaggcagacugcagagccuccagacauacgugacccagcagcugaucagagccgccgagauuagagccucugccaaucuggccgccaccaagaugucugagugugugcugggccagagcaagagaguggacuuuugcggcaagggcuaccaccugaugagcuucccucagucugccccucacggcgugguguuucugcacgugacauaugugcccgcucaagagaagaauuucaccaccgcuccagccaucugccacgacggcaaagcccacuuuccuagagaaggcguguucguguccaacggcacccauugguucgugacacagcggaacuucuacgagccccagaucaucaccaccgacaacaccuucgugucuggcaacugcgacguugugaucggcauugugaacaauaccguguacgacccucugcagcccgagcuggacagcuucaaagaggaacuggacaaguacuuuaagaaccacacaagccccgacguggaccugggcgauaucagcggaaucaaugccagcgucgugaacauccagaaagagaucgaccggcugaacgagguggccaagaaucugaacgagagccugaucgaccugcaagaacuggggaaguacgagcaguacaucaaguggcccugguacaucuggcugggcuuuaucgccggacugauugccaucgugauggucacaaucaugcuguguugcaugaccagcugcuguagcugccugaagggcuguuguagcuguggcagcugcugcaaguucgacgaggacgauucugagcccgugcugaagggcgugaaacugcacuacaccugaggacuagucccuguucccagagcccacuuuuuuuucuuuuuuugaaauaaaauagccugucuuucagaucucaaaggcucuuuucagagccaccaaaaaaaaaaaaaaaaaaaaaaaaaaaaaaaaaaaaaaaaaaaaaaaaaaaaaaaaaaaaaaaaaaaaaaaaaaaaaaaaaaaaaaaaaaaaaaaaaaaaa

SEQ ID NO: 23708 - RNA, 4191 nt, Artificial Sequence
  SARS-CoV-2/Wuhan/WIV05/2019__EPI_ISL_402128 spike protein mRNA gc mod (1-1273)(Y453F_D614G)
aggagagggcgcuuggcuugcaaggacccugagcugcggcauugaagcacacccaacccaacucgacugaagucagccucacugaaccggaucugagaaucuucucucucugggcuugccagggcucuccgaaccuagcuagcauccucuucaauuccaacuagaaagcuuaccauguucguguuucuggugcugcugccccugguguccagccagugugugaaccugaccaccagaacacagcugccuccagccuacaccaacagcuucaccagaggcguguacuaccccgacaagguguucagauccagcgugcugcacucuacccaggaccuguuccugccuuucuucagcaacgugaccugguuccacgccauccacguguccggcaccaauggcaccaagagauucgacaaccccgugcugcccuucaacgacgggguguacuuugccagcaccgagaaguccaacaucaucagaggcuggaucuucggcaccacacuggacagcaagacccagagccugcugaucgugaacaacgccaccaacguggucaucaaagugugcgaguuccaguucugcaacgaccccuuccugggcgucuacuaccacaagaacaacaagagcuggauggaaagcgaguuccggguguacagcagcgccaacaacugcaccuucgaguacgugucccagccuuuccugauggaccuggaaggcaagcagggcaacuucaagaaccugcgcgaguucguguucaagaacaucgacggcuacuucaaaaucuacagcaagcacaccccuaucaaccucgugcgggaucugccucagggcuucucugcucuggaaccccugguggaucugcccaucggcaucaacaucacccgguuucagacacugcuggcccugcacagaagcuaccugacaccuggcgauagcagcagcggauggacagcuggugccgccgcuuacuaugugggcuaccugcagccuagaaccuuccugcugaaguacaacgagaacggcaccaucaccgacgccguggauugugcucuggauccucugagcgagacaaagugcacccugaaguccuucaccguggaaaagggcaucuaccagaccagcaacuuccgggugcagcccaccgaauccaucgugcgguuccccaauaucaccaaucugugccccuucggcgagguguucaaugccaccagauucgccucuguguacgccuggaaccggaagcggaucagcaauugcguggccgacuacuccgugcuguacaacuccgccagcuucagcaccuucaagugcuacggcguguccccuaccaagcugaacgaccugugcuucacaaacguguacgccgacagcuucgugauccggggagaugaagugcggcagauugccccuggacagacaggcaagaucgccgacuacaacuacaagcugcccgacgacuucaccggcugugugauugccuggaacagcaacaaccuggacuccaaagucggcggcaacuacaauuaccuguuccggcuguuccggaaguccaaucugaagcccuucgagcgggacaucagcaccgaaaucuaucaggccggcagcaccccuugcaacggcguggaaggcuucaacugcuacuucccacugcaguccuacggcuuucagcccacaaauggcgugggcuaucagcccuacagagugguggugcugagcuucgaacugcugcaugcuccugccacagugugcggcccuaagaaaagcaccaaucucgugaagaacaaaugcgugaacuucaacuucaacggccugaccggcaccggcgugcugacagagagcaacaagaaguuccugccauuccagcaguuuggccgggauaucgccgauaccacagacgccguuagagauccccagacacuggaaauccuggacaucaccccaugcagcuucggcggagugucugugaucaccccuggcaccaacaccagcaaucagguggcagugcuguaccagggcgugaacuguaccgaagugcccguggccauucacgccgaucagcugacaccuacauggcggguguacuccaccggcagcaauguguuucagaccagagccggcugucugaucggagccgagcacgugaacaauagcuacgagugcgacauccccaucggcgcuggcaucugugccagcuaccagacacagacaaacagccccagacgggcuagaagcguggccagccagagcaucauugccuacacaaugucucugggcgccgagaacagcguggccuacuccaacaacucuaucgcuauccccaccaacuucaccaucagcgugaccaccgagauccugccuguguccaugaccaagaccagcguggacugcaccauguacaucugcggcgauuccaccgagugcuccaaccugcugcugcaguacggcagcuucugcacccagcugaauagagcccugacagggaucgccguggaacaggacaagaacacccaagagguguucgcccaagugaagcaaaucuacaagaccccuccuaucaaggacuucggcggcuucaauuucagccagauucugcccgauccuagcaagcccagcaagcggagcuucaucgaggaccugcuguucaacaaagugacacuggccgacgccggcuucaucaagcaguauggcgauugucugggcgacauugccgccagggaucugauuugcgcccagaaguuuaacggacugacagugcugccuccucugcugaccgaugagaugaucgcccaguacacaucugcccugcuggccggcacaaucacaagcggcuggacauuuggagcuggcgccgcucugcagauccccuuugcuaugcagauggccuaccgguucaacggcaucggagugacccagaaugugcuguacgagaaccagaagcugaucgccaaccaguucaacagcgccaucggcaagauccaggacagccugagcagcacagcaagcgcccugggaaagcugcaggacguggucaaccagaaugcccaggcacugaacacccuggucaagcagcuguccuccaacuucggcgccaucagcucugugcugaacgauauccugagcagacuggacaaggucgaggccgaggugcagaucgacagacugaucacaggcagacugcagagccuccagacauacgugacccagcagcugaucagagccgccgagauuagagccucugccaaucuggccgccaccaagaugucugagugugugcugggccagagcaagagaguggacuuuugcggcaagggcuaccaccugaugagcuucccucagucugccccucacggcgugguguuucugcacgugacauaugugcccgcucaagagaagaauuucaccaccgcuccagccaucugccacgacggcaaagcccacuuuccuagagaaggcguguucguguccaacggcacccauugguucgugacacagcggaacuucuacgagccccagaucaucaccaccgacaacaccuucgugucuggcaacugcgacguugugaucggcauugugaacaauaccguguacgacccucugcagcccgagcuggacagcuucaaagaggaacuggacaaguacuuuaagaaccacacaagccccgacguggaccugggcgauaucagcggaaucaaugccagcgucgugaacauccagaaagagaucgaccggcugaacgagguggccaagaaucugaacgagagccugaucgaccugcaagaacuggggaaguacgagcaguacaucaaguggcccugguacaucuggcugggcuuuaucgccggacugauugccaucgugauggucacaaucaugcuguguugcaugaccagcugcuguagcugccugaagggcuguuguagcuguggcagcugcugcaaguucgacgaggacgauucugagcccgugcugaagggcgugaaacugcacuacaccugaggacuagucccuguucccagagcccacuuuuuuuucuuuuuuugaaauaaaauagccugucuuucagaucucaaaggcucuuuucagagccaccaaaaaaaaaaaaaaaaaaaaaaaaaaaaaaaaaaaaaaaaaaaaaaaaaaaaaaaaaaaaaaaaaaaaaaaaaaaaaaaaaaaaaaaaaaaaaaaaaaaaa

SEQ ID NO: 23709 - RNA, 4191 nt, Artificial Sequence
  SARS-CoV-2/Wuhan/WIV05/2019__EPI_ISL_402128 spike protein mRNA gc mod (1-1273)(D614G_I692V)
aggagagggcgcuuggcuugcaaggacccugagcugcggcauugaagcacacccaacccaacucgacugaagucagccucacugaaccggaucugagaaucuucucucucugggcuugccagggcucuccgaaccuagcuagcauccucuucaauuccaacuagaaagcuuaccauguucguguuucuggugcugcugccccugguguccagccagugugugaaccugaccaccagaacacagcugccuccagccuacaccaacagcuucaccagaggcguguacuaccccgacaagguguucagauccagcgugcugcacucuacccaggaccuguuccugccuuucuucagcaacgugaccugguuccacgccauccacguguccggcaccaauggcaccaagagauucgacaaccccgugcugcccuucaacgacgggguguacuuugccagcaccgagaaguccaacaucaucagaggcuggaucuucggcaccacacuggacagcaagacccagagccugcugaucgugaacaacgccaccaacguggucaucaaagugugcgaguuccaguucugcaacgaccccuuccugggcgucuacuaccacaagaacaacaagagcuggauggaaagcgaguuccggguguacagcagcgccaacaacugcaccuucgaguacgugucccagccuuuccugauggaccuggaaggcaagcagggcaacuucaagaaccugcgcgaguucguguucaagaacaucgacggcuacuucaaaaucuacagcaagcacaccccuaucaaccucgugcgggaucugccucagggcuucucugcucuggaaccccugguggaucugcccaucggcaucaacaucacccgguuucagacacugcuggcccugcacagaagcuaccugacaccuggcgauagcagcagcggauggacagcuggugccgccgcuuacuaugugggcuaccugcagccuagaaccuuccugcugaaguacaacgagaacggcaccaucaccgacgccguggauugugcucuggauccucugagcgagacaaagugcacccugaaguccuucaccguggaaaagggcaucuaccagaccagcaacuuccgggugcagcccaccgaauccaucgugcgguuccccaauaucaccaaucugugccccuucggcgagguguucaaugccaccagauucgccucuguguacgccuggaaccggaagcggaucagcaauugcguggccgacuacuccgugcuguacaacuccgccagcuucagcaccuucaagugcuacggcguguccccuaccaagcugaacgaccugugcuucacaaacguguacgccgacagcuucgugauccggggagaugaagugcggcagauugccccuggacagacaggcaagaucgccgacuacaacuacaagcugcccgacgacuucaccggcugugugauugccuggaacagcaacaaccuggacuccaaagucggcggcaacuacaauuaccuguaccggcuguuccggaaguccaaucugaagcccuucgagcgggacaucagcaccgaaaucuaucaggccggcagcaccccuugcaacggcguggaaggcuucaacugcuacuucccacugcaguccuacggcuuucagcccacaaauggcgugggcuaucagcccuacagagugguggugcugagcuucgaacugcugcaugcuccugccacagugugcggcccuaagaaaagcaccaaucucgugaagaacaaaugcgugaacuucaacuucaacggccugaccggcaccggcgugcugacagagagcaacaagaaguuccugccauuccagcaguuuggccgggauaucgccgauaccacagacgccguuagagauccccagacacuggaaauccuggacaucaccccaugcagcuucggcggagugucugugaucaccccuggcaccaacaccagcaaucagguggcagugcuguaccagggcgugaacuguaccgaagugcccguggccauucacgccgaucagcugacaccuacauggcggguguacuccaccggcagcaauguguuucagaccagagccggcugucugaucggagccgagcacgugaacaauagcuacgagugcgacauccccaucggcgcuggcaucugugccagcuaccagacacagacaaacagccccagacgggcuagaagcguggccagccagagcgugauugccuacacaaugucucugggcgccgagaacagcguggccuacuccaacaacucuaucgcuauccccaccaacuucaccaucagcgugaccaccgagauccugccuguguccaugaccaagaccagcguggacugcaccauguacaucugcggcgauuccaccgagugcuccaaccugcugcugcaguacggcagcuucugcacccagcugaauagagcccugacagggaucgccguggaacaggacaagaacacccaagagguguucgcccaagugaagcaaaucuacaagaccccuccuaucaaggacuucggcggcuucaauuucagccagauucugcccgauccuagcaagcccagcaagcggagcuucaucgaggaccugcuguucaacaaagugacacuggccgacgccggcuucaucaagcaguauggcgauugucugggcgacauugccgccagggaucugauuugcgcccagaaguuuaacggacugacagugcugccuccucugcugaccgaugagaugaucgcccaguacacaucugcccugcuggccggcacaaucacaagcggcuggacauuuggagcuggcgccgcucugcagauccccuuugcuaugcagauggccuaccgguucaacggcaucggagugacccagaaugugcuguacgagaaccagaagcugaucgccaaccaguucaacagcgccaucggcaagauccaggacagccugagcagcacagcaagcgcccugggaaagcugcaggacguggucaaccagaaugcccaggcacugaacacccuggucaagcagcuguccuccaacuucggcgccaucagcucugugcugaacgauauccugagcagacuggacaaggucgaggccgaggugcagaucgacagacugaucacaggcagacugcagagccuccagacauacgugacccagcagcugaucagagccgccgagauuagagccucugccaaucuggccgccaccaagaugucugagugugugcugggccagagcaagagaguggacuuuugcggcaagggcuaccaccugaugagcuucccucagucugccccucacggcgugguguuucugcacgugacauaugugcccgcucaagagaagaauuucaccaccgcuccagccaucugccacgacggcaaagcccacuuuccuagagaaggcguguucguguccaacggcacccauugguucgugacacagcggaacuucuacgagccccagaucaucaccaccgacaacaccuucgugucuggcaacugcgacguugugaucggcauugugaacaauaccguguacgacccucugcagcccgagcuggacagcuucaaagaggaacuggacaaguacuuuaagaaccacacaagccccgacguggaccugggcgauaucagcggaaucaaugccagcgucgugaacauccagaaagagaucgaccggcugaacgagguggccaagaaucugaacgagagccugaucgaccugcaagaacuggggaaguacgagcaguacaucaaguggcccugguacaucuggcugggcuuuaucgccggacugauugccaucgugauggucacaaucaugcuguguugcaugaccagcugcuguagcugccugaagggcuguuguagcuguggcagcugcugcaaguucgacgaggacgauucugagcccgugcugaagggcgugaaacugcacuacaccugaggacuagucccuguucccagagcccacuuuuuuuucuuuuuuugaaauaaaauagccugucuuucagaucucaaaggcucuuuucagagccaccaaaaaaaaaaaaaaaaaaaaaaaaaaaaaaaaaaaaaaaaaaaaaaaaaaaaaaaaaaaaaaaaaaaaaaaaaaaaaaaaaaaaaaaaaaaaaaaaaaaaa

SEQ ID NO: 23710 - RNA, 4191 nt, Artificial Sequence
  SARS-CoV-2/Wuhan/WIV05/2019__EPI_ISL_402128 spike protein mRNA gc mod (1-1273)(D614G_M1229I)
aggagagggcgcuuggcuugcaaggacccugagcugcggcauugaagcacacccaacccaacucgacugaagucagccucacugaaccggaucugagaaucuucucucucugggcuugccagggcucuccgaaccuagcuagcauccucuucaauuccaacuagaaagcuuaccauguucguguuucuggugcugcugccccugguguccagccagugugugaaccugaccaccagaacacagcugccuccagccuacaccaacagcuucaccagaggcguguacuaccccgacaagguguucagauccagcgugcugcacucuacccaggaccuguuccugccuuucuucagcaacgugaccugguuccacgccauccacguguccggcaccaauggcaccaagagauucgacaaccccgugcugcccuucaacgacgggguguacuuugccagcaccgagaaguccaacaucaucagaggcuggaucuucggcaccacacuggacagcaagacccagagccugcugaucgugaacaacgccaccaacguggucaucaaagugugcgaguuccaguucugcaacgaccccuuccugggcgucuacuaccacaagaacaacaagagcuggauggaaagcgaguuccggguguacagcagcgccaacaacugcaccuucgaguacgugucccagccuuuccugauggaccuggaaggcaagcagggcaacuucaagaaccugcgcgaguucguguucaagaacaucgacggcuacuucaaaaucuacagcaagcacaccccuaucaaccucgugcgggaucugccucagggcuucucugcucuggaaccccugguggaucugcccaucggcaucaacaucacccgguuucagacacugcuggcccugcacagaagcuaccugacaccuggcgauagcagcagcggauggacagcuggugccgccgcuuacuaugugggcuaccugcagccuagaaccuuccugcugaaguacaacgagaacggcaccaucaccgacgccguggauugugcucuggauccucugagcgagacaaagugcacccugaaguccuucaccguggaaaagggcaucuaccagaccagcaacuuccgggugcagcccaccgaauccaucgugcgguuccccaauaucaccaaucugugccccuucggcgagguguucaaugccaccagauucgccucuguguacgccuggaaccggaagcggaucagcaauugcguggccgacuacuccgugcuguacaacuccgccagcuucagcaccuucaagugcuacggcguguccccuaccaagcugaacgaccugugcuucacaaacguguacgccgacagcuucgugauccggggagaugaagugcggcagauugccccuggacagacaggcaagaucgccgacuacaacuacaagcugcccgacgacuucaccggcugugugauugccuggaacagcaacaaccuggacuccaaagucggcggcaacuacaauuaccuguaccggcuguuccggaaguccaaucugaagcccuucgagcgggacaucagcaccgaaaucuaucaggccggcagcaccccuugcaacggcguggaaggcuucaacugcuacuucccacugcaguccuacggcuuucagcccacaaauggcgugggcuaucagcccuacagagugguggugcugagcuucgaacugcugcaugcuccugccacagugugcggcccuaagaaaagcaccaaucucgugaagaacaaaugcgugaacuucaacuucaacggccugaccggcaccggcgugcugacagagagcaacaagaaguuccugccauuccagcaguuuggccgggauaucgccgauaccacagacgccguuagagauccccagacacuggaaauccuggacaucaccccaugcagcuucggcggagugucugugaucaccccuggcaccaacaccagcaaucagguggcagugcuguaccagggcgugaacuguaccgaagugcccguggccauucacgccgaucagcugacaccuacauggcggguguacuccaccggcagcaauguguuucagaccagagccggcugucugaucggagccgagcacgugaacaauagcuacgagugcgacauccccaucggcgcuggcaucugugccagcuaccagacacagacaaacagccccagacgggcuagaagcguggccagccagagcaucauugccuacacaaugucucugggcgccgagaacagcguggccuacuccaacaacucuaucgcuauccccaccaacuucaccaucagcgugaccaccgagauccugccuguguccaugaccaagaccagcguggacugcaccauguacaucugcggcgauuccaccgagugcuccaaccugcugcugcaguacggcagcuucugcacccagcugaauagagcccugacagggaucgccguggaacaggacaagaacacccaagagguguucgcccaagugaagcaaaucuacaagaccccuccuaucaaggacuucggcggcuucaauuucagccagauucugcccgauccuagcaagcccagcaagcggagcuucaucgaggaccugcuguucaacaaagugacacuggccgacgccggcuucaucaagcaguauggcgauugucugggcgacauugccgccagggaucugauuugcgcccagaaguuuaacggacugacagugcugccuccucugcugaccgaugagaugaucgcccaguacacaucugcccugcuggccggcacaaucacaagcggcuggacauuuggagcuggcgccgcucugcagauccccuuugcuaugcagauggccuaccgguucaacggcaucggagugacccagaaugugcuguacgagaaccagaagcugaucgccaaccaguucaacagcgccaucggcaagauccaggacagccugagcagcacagcaagcgcccugggaaagcugcaggacguggucaaccagaaugcccaggcacugaacacccuggucaagcagcuguccuccaacuucggcgccaucagcucugugcugaacgauauccugagcagacuggacaaggucgaggccgaggugcagaucgacagacugaucacaggcagacugcagagccuccagacauacgugacccagcagcugaucagagccgccgagauuagagccucugccaaucuggccgccaccaagaugucugagugugugcugggccagagcaagagaguggacuuuugcggcaagggcuaccaccugaugagcuucccucagucugccccucacggcgugguguuucugcacgugacauaugugcccgcucaagagaagaauuucaccaccgcuccagccaucugccacgacggcaaagcccacuuuccuagagaaggcguguucguguccaacggcacccauugguucgugacacagcggaacuucuacgagccccagaucaucaccaccgacaacaccuucgugucuggcaacugcgacguugugaucggcauugugaacaauaccguguacgacccucugcagcccgagcuggacagcuucaaagaggaacuggacaaguacuuuaagaaccacacaagccccgacguggaccugggcgauaucagcggaaucaaugccagcgucgugaacauccagaaagagaucgaccggcugaacgagguggccaagaaucugaacgagagccugaucgaccugcaagaacuggggaaguacgagcaguacaucaaguggcccugguacaucuggcugggcuuuaucgccggacugauugccaucgugaucgucacaaucaugcuguguugcaugaccagcugcuguagcugccugaagggcuguuguagcuguggcagcugcugcaaguucgacgaggacgauucugagcccgugcugaagggcgugaaacugcacuacaccugaggacuagucccuguucccagagcccacuuuuuuuucuuuuuuugaaauaaaauagccugucuuucagaucucaaaggcucuuuucagagccaccaaaaaaaaaaaaaaaaaaaaaaaaaaaaaaaaaaaaaaaaaaaaaaaaaaaaaaaaaaaaaaaaaaaaaaaaaaaaaaaaaaaaaaaaaaaaaaaaaaaaa

SEQ ID NO: 23711 - RNA, 4185 nt, Artificial Sequence
  SARS-CoV-2/Wuhan/WIV05/2019__EPI_ISL_402128 spike protein mRNA gc mod (1-1273)(H69del_V70del_A222V_Y453F_S477N_D614G_I692V)
aggagagggcgcuuggcuugcaaggacccugagcugcggcauugaagcacacccaacccaacucgacugaagucagccucacugaaccggaucugagaaucuucucucucugggcuugccagggcucuccgaaccuagcuagcauccucuucaauuccaacuagaaagcuuaccauguucguguuucuggugcugcugccccugguguccagccagugugugaaccugaccaccagaacacagcugccuccagccuacaccaacagcuucaccagaggcguguacuaccccgacaagguguucagauccagcgugcugcacucuacccaggaccuguuccugccuuucuucagcaacgugaccugguuccacgccaucuccggcaccaauggcaccaagagauucgacaaccccgugcugcccuucaacgacgggguguacuuugccagcaccgagaaguccaacaucaucagaggcuggaucuucggcaccacacuggacagcaagacccagagccugcugaucgugaacaacgccaccaacguggucaucaaagugugcgaguuccaguucugcaacgaccccuuccugggcgucuacuaccacaagaacaacaagagcuggauggaaagcgaguuccggguguacagcagcgccaacaacugcaccuucgaguacgugucccagccuuuccugauggaccuggaaggcaagcagggcaacuucaagaaccugcgcgaguucguguucaagaacaucgacggcuacuucaaaaucuacagcaagcacaccccuaucaaccucgugcgggaucugccucagggcuucucugugcuggaaccccugguggaucugcccaucggcaucaacaucacccgguuucagacacugcuggcccugcacagaagcuaccugacaccuggcgauagcagcagcggauggacagcuggugccgccgcuuacuaugugggcuaccugcagccuagaaccuuccugcugaaguacaacgagaacggcaccaucaccgacgccguggauugugcucuggauccucugagcgagacaaagugcacccugaaguccuucaccguggaaaagggcaucuaccagaccagcaacuuccgggugcagcccaccgaauccaucgugcgguuccccaauaucaccaaucugugccccuucggcgagguguucaaugccaccagauucgccucuguguacgccuggaaccggaagcggaucagcaauugcguggccgacuacuccgugcuguacaacuccgccagcuucagcaccuucaagugcuacggcguguccccuaccaagcugaacgaccugugcuucacaaacguguacgccgacagcuucgugauccggggagaugaagugcggcagauugccccuggacagacaggcaagaucgccgacuacaacuacaagcugcccgacgacuucaccggcugugugauugccuggaacagcaacaaccuggacuccaaagucggcggcaacuacaauuaccuguuccggcuguuccggaaguccaaucugaagcccuucgagcgggacaucagcaccgaaaucuaucaggccggcaacaccccuugcaacggcguggaaggcuucaacugcuacuucccacugcaguccuacggcuuucagcccacaaauggcgugggcuaucagcccuacagagugguggugcugagcuucgaacugcugcaugcuccugccacagugugcggcccuaagaaaagcaccaaucucgugaagaacaaaugcgugaacuucaacuucaacggccugaccggcaccggcgugcugacagagagcaacaagaaguuccugccauuccagcaguuuggccgggauaucgccgauaccacagacgccguuagagauccccagacacuggaaauccuggacaucaccccaugcagcuucggcggagugucugugaucaccccuggcaccaacaccagcaaucagguggcagugcuguaccagggcgugaacuguaccgaagugcccguggccauucacgccgaucagcugacaccuacauggcggguguacuccaccggcagcaauguguuucagaccagagccggcugucugaucggagccgagcacgugaacaauagcuacgagugcgacauccccaucggcgcuggcaucugugccagcuaccagacacagacaaacagccccagacgggcuagaagcguggccagccagagcgugauugccuacacaaugucucugggcgccgagaacagcguggccuacuccaacaacucuaucgcuauccccaccaacuucaccaucagcgugaccaccgagauccugccuguguccaugaccaagaccagcguggacugcaccauguacaucugcggcgauuccaccgagugcuccaaccugcugcugcaguacggcagcuucugcacccagcugaauagagcccugacagggaucgccguggaacaggacaagaacacccaagagguguucgcccaagugaagcaaaucuacaagaccccuccuaucaaggacuucggcggcuucaauuucagccagauucugcccgauccuagcaagcccagcaagcggagcuucaucgaggaccugcuguucaacaaagugacacuggccgacgccggcuucaucaagcaguauggcgauugucugggcgacauugccgccagggaucugauuugcgcccagaaguuuaacggacugacagugcugccuccucugcugaccgaugagaugaucgcccaguacacaucugcccugcuggccggcacaaucacaagcggcuggacauuuggagcuggcgccgcucugcagauccccuuugcuaugcagauggccuaccgguucaacggcaucggagugacccagaaugugcuguacgagaaccagaagcugaucgccaaccaguucaacagcgccaucggcaagauccaggacagccugagcagcacagcaagcgcccugggaaagcugcaggacguggucaaccagaaugcccaggcacugaacacccuggucaagcagcuguccuccaacuucggcgccaucagcucugugcugaacgauauccugagcagacuggacaaggucgaggccgaggugcagaucgacagacugaucacaggcagacugcagagccuccagacauacgugacccagcagcugaucagagccgccgagauuagagccucugccaaucuggccgccaccaagaugucugagugugugcugggccagagcaagagaguggacuuuugcggcaagggcuaccaccugaugagcuucccucagucugccccucacggcgugguguuucugcacgugacauaugugcccgcucaagagaagaauuucaccaccgcuccagccaucugccacgacggcaaagcccacuuuccuagagaaggcguguucguguccaacggcacccauugguucgugacacagcggaacuucuacgagccccagaucaucaccaccgacaacaccuucgugucuggcaacugcgacguugugaucggcauugugaacaauaccguguacgacccucugcagcccgagcuggacagcuucaaagaggaacuggacaaguacuuuaagaaccacacaagccccgacguggaccugggcgauaucagcggaaucaaugccagcgucgugaacauccagaaagagaucgaccggcugaacgagguggccaagaaucugaacgagagccugaucgaccugcaagaacuggggaaguacgagcaguacaucaaguggcccugguacaucuggcugggcuuuaucgccggacugauugccaucgugauggucacaaucaugcuguguugcaugaccagcugcuguagcugccugaagggcuguuguagcuguggcagcugcugcaaguucgacgaggacgauucugagcccgugcugaagggcgugaaacugcacuacaccugaggacuagucccuguucccagagcccacuuuuuuuucuuuuuuugaaauaaaauagccugucuuucagaucucaaaggcucuuuucagagccaccaaaaaaaaaaaaaaaaaaaaaaaaaaaaaaaaaaaaaaaaaaaaaaaaaaaaaaaaaaaaaaaaaaaaaaaaaaaaaaaaaaaaaaaaaaaaaaaaaaaaa

SEQ ID NO: 23712 - RNA, 4185 nt, Artificial Sequence
  SARS-CoV-2/Wuhan/WIV05/2019__EPI_ISL_402128 spike protein mRNA gc mod (1-1273)(H69del_V70del_Y453F_D614G_I692V_M1229I)
aggagagggcgcuuggcuugcaaggacccugagcugcggcauugaagcacacccaacccaacucgacugaagucagccucacugaaccggaucugagaaucuucucucucugggcuugccagggcucuccgaaccuagcuagcauccucuucaauuccaacuagaaagcuuaccauguucguguuucuggugcugcugccccugguguccagccagugugugaaccugaccaccagaacacagcugccuccagccuacaccaacagcuucaccagaggcguguacuaccccgacaagguguucagauccagcgugcugcacucuacccaggaccuguuccugccuuucuucagcaacgugaccugguuccacgccaucuccggcaccaauggcaccaagagauucgacaaccccgugcugcccuucaacgacgggguguacuuugccagcaccgagaaguccaacaucaucagaggcuggaucuucggcaccacacuggacagcaagacccagagccugcugaucgugaacaacgccaccaacguggucaucaaagugugcgaguuccaguucugcaacgaccccuuccugggcgucuacuaccacaagaacaacaagagcuggauggaaagcgaguuccggguguacagcagcgccaacaacugcaccuucgaguacgugucccagccuuuccugauggaccuggaaggcaagcagggcaacuucaagaaccugcgcgaguucguguucaagaacaucgacggcuacuucaaaaucuacagcaagcacaccccuaucaaccucgugcgggaucugccucagggcuucucugcucuggaaccccugguggaucugcccaucggcaucaacaucacccgguuucagacacugcuggcccugcacagaagcuaccugacaccuggcgauagcagcagcggauggacagcuggugccgccgcuuacuaugugggcuaccugcagccuagaaccuuccugcugaaguacaacgagaacggcaccaucaccgacgccguggauugugcucuggauccucugagcgagacaaagugcacccugaaguccuucaccguggaaaagggcaucuaccagaccagcaacuuccgggugcagcccaccgaauccaucgugcgguuccccaauaucaccaaucugugccccuucggcgagguguucaaugccaccagauucgccucuguguacgccuggaaccggaagcggaucagcaauugcguggccgacuacuccgugcuguacaacuccgccagcuucagcaccuucaagugcuacggcguguccccuaccaagcugaacgaccugugcuucacaaacguguacgccgacagcuucgugauccggggagaugaagugcggcagauugccccuggacagacaggcaagaucgccgacuacaacuacaagcugcccgacgacuucaccggcugugugauugccuggaacagcaacaaccuggacuccaaagucggcggcaacuacaauuaccuguuccggcuguuccggaaguccaaucugaagcccuucgagcgggacaucagcaccgaaaucuaucaggccggcagcaccccuugcaacggcguggaaggcuucaacugcuacuucccacugcaguccuacggcuuucagcccacaaauggcgugggcuaucagcccuacagagugguggugcugagcuucgaacugcugcaugcuccugccacagugugcggcccuaagaaaagcaccaaucucgugaagaacaaaugcgugaacuucaacuucaacggccugaccggcaccggcgugcugacagagagcaacaagaaguuccugccauuccagcaguuuggccgggauaucgccgauaccacagacgccguuagagauccccagacacuggaaauccuggacaucaccccaugcagcuucggcggagugucugugaucaccccuggcaccaacaccagcaaucagguggcagugcuguaccagggcgugaacuguaccgaagugcccguggccauucacgccgaucagcugacaccuacauggcggguguacuccaccggcagcaauguguuucagaccagagccggcugucugaucggagccgagcacgugaacaauagcuacgagugcgacauccccaucggcgcuggcaucugugccagcuaccagacacagacaaacagccccagacgggcuagaagcguggccagccagagcgugauugccuacacaaugucucugggcgccgagaacagcguggccuacuccaacaacucuaucgcuauccccaccaacuucaccaucagcgugaccaccgagauccugccuguguccaugaccaagaccagcguggacugcaccauguacaucugcggcgauuccaccgagugcuccaaccugcugcugcaguacggcagcuucugcacccagcugaauagagcccugacagggaucgccguggaacaggacaagaacacccaagagguguucgcccaagugaagcaaaucuacaagaccccuccuaucaaggacuucggcggcuucaauuucagccagauucugcccgauccuagcaagcccagcaagcggagcuucaucgaggaccugcuguucaacaaagugacacuggccgacgccggcuucaucaagcaguauggcgauugucugggcgacauugccgccagggaucugauuugcgcccagaaguuuaacggacugacagugcugccuccucugcugaccgaugagaugaucgcccaguacacaucugcccugcuggccggcacaaucacaagcggcuggacauuuggagcuggcgccgcucugcagauccccuuugcuaugcagauggccuaccgguucaacggcaucggagugacccagaaugugcuguacgagaaccagaagcugaucgccaaccaguucaacagcgccaucggcaagauccaggacagccugagcagcacagcaagcgcccugggaaagcugcaggacguggucaaccagaaugcccaggcacugaacacccuggucaagcagcuguccuccaacuucggcgccaucagcucugugcugaacgauauccugagcagacuggacaaggucgaggccgaggugcagaucgacagacugaucacaggcagacugcagagccuccagacauacgugacccagcagcugaucagagccgccgagauuagagccucugccaaucuggccgccaccaagaugucugagugugugcugggccagagcaagagaguggacuuuugcggcaagggcuaccaccugaugagcuucccucagucugccccucacggcgugguguuucugcacgugacauaugugcccgcucaagagaagaauuucaccaccgcuccagccaucugccacgacggcaaagcccacuuuccuagagaaggcguguucguguccaacggcacccauugguucgugacacagcggaacuucuacgagccccagaucaucaccaccgacaacaccuucgugucuggcaacugcgacguugugaucggcauugugaacaauaccguguacgacccucugcagcccgagcuggacagcuucaaagaggaacuggacaaguacuuuaagaaccacacaagccccgacguggaccugggcgauaucagcggaaucaaugccagcgucgugaacauccagaaagagaucgaccggcugaacgagguggccaagaaucugaacgagagccugaucgaccugcaagaacuggggaaguacgagcaguacaucaaguggcccugguacaucuggcugggcuuuaucgccggacugauugccaucgugaucgucacaaucaugcuguguugcaugaccagcugcuguagcugccugaagggcuguuguagcuguggcagcugcugcaaguucgacgaggacgauucugagcccgugcugaagggcgugaaacugcacuacaccugaggacuagucccuguucccagagcccacuuuuuuuucuuuuuuugaaauaaaauagccugucuuucagaucucaaaggcucuuuucagagccaccaaaaaaaaaaaaaaaaaaaaaaaaaaaaaaaaaaaaaaaaaaaaaaaaaaaaaaaaaaaaaaaaaaaaaaaaaaaaaaaaaaaaaaaaaaaaaaaaaaaaa

SEQ ID NO: 23713 - RNA, 4182 nt, Artificial Sequence
  SARS-CoV-2/Wuhan/WIV05/2019__EPI_ISL_402128 spike protein mRNA gc mod (1-1273)(H69del_V70del_Y144del_N501Y_A570D_D614G_P681H_T716I_S982 A_D1118H)
aggagagggcgcuuggcuugcaaggacccugagcugcggcauugaagcacacccaacccaacucgacugaagucagccucacugaaccggaucugagaaucuucucucucugggcuugccagggcucuccgaaccuagcuagcauccucuucaauuccaacuagaaagcuuaccauguucguguuucuggugcugcugccccugguguccagccagugugugaaccugaccaccagaacacagcugccuccagccuacaccaacagcuucaccagaggcguguacuaccccgacaagguguucagauccagcgugcugcacucuacccaggaccuguuccugccuuucuucagcaacgugaccugguuccacgccaucuccggcaccaauggcaccaagagauucgacaaccccgugcugcccuucaacgacgggguguacuuugccagcaccgagaaguccaacaucaucagaggcuggaucuucggcaccacacuggacagcaagacccagagccugcugaucgugaacaacgccaccaacguggucaucaaagugugcgaguuccaguucugcaacgaccccuuccugggcgucuaccacaagaacaacaagagcuggauggaaagcgaguuccggguguacagcagcgccaacaacugcaccuucgaguacgugucccagccuuuccugauggaccuggaaggcaagcagggcaacuucaagaaccugcgcgaguucguguucaagaacaucgacggcuacuucaaaaucuacagcaagcacaccccuaucaaccucgugcgggaucugccucagggcuucucugcucuggaaccccugguggaucugcccaucggcaucaacaucacccgguuucagacacugcuggcccugcacagaagcuaccugacaccuggcgauagcagcagcggauggacagcuggugccgccgcuuacuaugugggcuaccugcagccuagaaccuuccugcugaaguacaacgagaacggcaccaucaccgacgccguggauugugcucuggauccucugagcgagacaaagugcacccugaaguccuucaccguggaaaagggcaucuaccagaccagcaacuuccgggugcagcccaccgaauccaucgugcgguuccccaauaucaccaaucugugccccuucggcgagguguucaaugccaccagauucgccucuguguacgccuggaaccggaagcggaucagcaauugcguggccgacuacuccgugcuguacaacuccgccagcuucagcaccuucaagugcuacggcguguccccuaccaagcugaacgaccugugcuucacaaacguguacgccgacagcuucgugauccggggagaugaagugcggcagauugccccuggacagacaggcaagaucgccgacuacaacuacaagcugcccgacgacuucaccggcugugugauugccuggaacagcaacaaccuggacuccaaagucggcggcaacuacaauuaccuguaccggcuguuccggaaguccaaucugaagcccuucgagcgggacaucagcaccgaaaucuaucaggccggcagcaccccuugcaacggcguggaaggcuucaacugcuacuucccacugcaguccuacggcuuucagcccacauacggcgugggcuaucagcccuacagagugguggugcugagcuucgaacugcugcaugcuccugccacagugugcggcccuaagaaaagcaccaaucucgugaagaacaaaugcgugaacuucaacuucaacggccugaccggcaccggcgugcugacagagagcaacaagaaguuccugccauuccagcaguuuggccgggauaucgacgauaccacagacgccguuagagauccccagacacuggaaauccuggacaucaccccaugcagcuucggcggagugucugugaucaccccuggcaccaacaccagcaaucagguggcagugcuguaccagggcgugaacuguaccgaagugcccguggccauucacgccgaucagcugacaccuacauggcggguguacuccaccggcagcaauguguuucagaccagagccggcugucugaucggagccgagcacgugaacaauagcuacgagugcgacauccccaucggcgcuggcaucugugccagcuaccagacacagacaaacagccacagacgggcuagaagcguggccagccagagcaucauugccuacacaaugucucugggcgccgagaacagcguggccuacuccaacaacucuaucgcuauccccaucaacuucaccaucagcgugaccaccgagauccugccuguguccaugaccaagaccagcguggacugcaccauguacaucugcggcgauuccaccgagugcuccaaccugcugcugcaguacggcagcuucugcacccagcugaauagagcccugacagggaucgccguggaacaggacaagaacacccaagagguguucgcccaagugaagcaaaucuacaagaccccuccuaucaaggacuucggcggcuucaauuucagccagauucugcccgauccuagcaagcccagcaagcggagcuucaucgaggaccugcuguucaacaaagugacacuggccgacgccggcuucaucaagcaguauggcgauugucugggcgacauugccgccagggaucugauuugcgcccagaaguuuaacggacugacagugcugccuccucugcugaccgaugagaugaucgcccaguacacaucugcccugcuggccggcacaaucacaagcggcuggacauuuggagcuggcgccgcucugcagauccccuuugcuaugcagauggccuaccgguucaacggcaucggagugacccagaaugugcuguacgagaaccagaagcugaucgccaaccaguucaacagcgccaucggcaagauccaggacagccugagcagcacagcaagcgcccugggaaagcugcaggacguggucaaccagaaugcccaggcacugaacacccuggucaagcagcuguccuccaacuucggcgccaucagcucugugcugaacgauauccuggccagacuggacaaggucgaggccgaggugcagaucgacagacugaucacaggcagacugcagagccuccagacauacgugacccagcagcugaucagagccgccgagauuagagccucugccaaucuggccgccaccaagaugucugagugugugcugggccagagcaagagaguggacuuuugcggcaagggcuaccaccugaugagcuucccucagucugccccucacggcgugguguuucugcacgugacauaugugcccgcucaagagaagaauuucaccaccgcuccagccaucugccacgacggcaaagcccacuuuccuagagaaggcguguucguguccaacggcacccauugguucgugacacagcggaacuucuacgagccccagaucaucaccacccacaacaccuucgugucuggcaacugcgacguugugaucggcauugugaacaauaccguguacgacccucugcagcccgagcuggacagcuucaaagaggaacuggacaaguacuuuaagaaccacacaagccccgacguggaccugggcgauaucagcggaaucaaugccagcgucgugaacauccagaaagagaucgaccggcugaacgagguggccaagaaucugaacgagagccugaucgaccugcaagaacuggggaaguacgagcaguacaucaaguggcccugguacaucuggcugggcuuuaucgccggacugauugccaucgugauggucacaaucaugcuguguugcaugaccagcugcuguagcugccugaagggcuguuguagcuguggcagcugcugcaaguucgacgaggacgauucugagcccgugcugaagggcgugaaacugcacuacaccugaggacuagucccuguucccagagcccacuuuuuuuucuuuuuuugaaauaaaauagccugucuuucagaucucaaaggcucuuuucagagccaccaaaaaaaaaaaaaaaaaaaaaaaaaaaaaaaaaaaaaaaaaaaaaaaaaaaaaaaaaaaaaaaaaaaaaaaaaaaaaaaaaaaaaaaaaaaaaaaaaaaaa

SEQ ID NO: 23714 - RNA, 4191 nt, Artificial Sequence
  SARS-CoV-2/Wuhan/WIV05/2019__EPI_ISL_402128 spike protein mRNA gc mod (1-1273)(K417N_E484K_N501Y_D614G)
aggagagggcgcuuggcuugcaaggacccugagcugcggcauugaagcacacccaacccaacucgacugaagucagccucacugaaccggaucugagaaucuucucucucugggcuugccagggcucuccgaaccuagcuagcauccucuucaauuccaacuagaaagcuuaccauguucguguuucuggugcugcugccccugguguccagccagugugugaaccugaccaccagaacacagcugccuccagccuacaccaacagcuucaccagaggcguguacuaccccgacaagguguucagauccagcgugcugcacucuacccaggaccuguuccugccuuucuucagcaacgugaccugguuccacgccauccacguguccggcaccaauggcaccaagagauucgacaaccccgugcugcccuucaacgacgggguguacuuugccagcaccgagaaguccaacaucaucagaggcuggaucuucggcaccacacuggacagcaagacccagagccugcugaucgugaacaacgccaccaacguggucaucaaagugugcgaguuccaguucugcaacgaccccuuccugggcgucuacuaccacaagaacaacaagagcuggauggaaagcgaguuccggguguacagcagcgccaacaacugcaccuucgaguacgugucccagccuuuccugauggaccuggaaggcaagcagggcaacuucaagaaccugcgcgaguucguguucaagaacaucgacggcuacuucaaaaucuacagcaagcacaccccuaucaaccucgugcgggaucugccucagggcuucucugcucuggaaccccugguggaucugcccaucggcaucaacaucacccgguuucagacacugcuggcccugcacagaagcuaccugacaccuggcgauagcagcagcggauggacagcuggugccgccgcuuacuaugugggcuaccugcagccuagaaccuuccugcugaaguacaacgagaacggcaccaucaccgacgccguggauugugcucuggauccucugagcgagacaaagugcacccugaaguccuucaccguggaaaagggcaucuaccagaccagcaacuuccgggugcagcccaccgaauccaucgugcgguuccccaauaucaccaaucugugccccuucggcgagguguucaaugccaccagauucgccucuguguacgccuggaaccggaagcggaucagcaauugcguggccgacuacuccgugcuguacaacuccgccagcuucagcaccuucaagugcuacggcguguccccuaccaagcugaacgaccugugcuucacaaacguguacgccgacagcuucgugauccggggagaugaagugcggcagauugccccuggacagacaggcaacaucgccgacuacaacuacaagcugcccgacgacuucaccggcugugugauugccuggaacagcaacaaccuggacuccaaagucggcggcaacuacaauuaccuguaccggcuguuccggaaguccaaucugaagcccuucgagcgggacaucagcaccgaaaucuaucaggccggcagcaccccuugcaacggcgugaagggcuucaacugcuacuucccacugcaguccuacggcuuucagcccacauacggcgugggcuaucagcccuacagagugguggugcugagcuucgaacugcugcaugcuccugccacagugugcggcccuaagaaaagcaccaaucucgugaagaacaaaugcgugaacuucaacuucaacggccugaccggcaccggcgugcugacagagagcaacaagaaguuccugccauuccagcaguuuggccgggauaucgccgauaccacagacgccguuagagauccccagacacuggaaauccuggacaucaccccaugcagcuucggcggagugucugugaucaccccuggcaccaacaccagcaaucagguggcagugcuguaccagggcgugaacuguaccgaagugcccguggccauucacgccgaucagcugacaccuacauggcggguguacuccaccggcagcaauguguuucagaccagagccggcugucugaucggagccgagcacgugaacaauagcuacgagugcgacauccccaucggcgcuggcaucugugccagcuaccagacacagacaaacagccccagacgggcuagaagcguggccagccagagcaucauugccuacacaaugucucugggcgccgagaacagcguggccuacuccaacaacucuaucgcuauccccaccaacuucaccaucagcgugaccaccgagauccugccuguguccaugaccaagaccagcguggacugcaccauguacaucugcggcgauuccaccgagugcuccaaccugcugcugcaguacggcagcuucugcacccagcugaauagagcccugacagggaucgccguggaacaggacaagaacacccaagagguguucgcccaagugaagcaaaucuacaagaccccuccuaucaaggacuucggcggcuucaauuucagccagauucugcccgauccuagcaagcccagcaagcggagcuucaucgaggaccugcuguucaacaaagugacacuggccgacgccggcuucaucaagcaguauggcgauugucugggcgacauugccgccagggaucugauuugcgcccagaaguuuaacggacugacagugcugccuccucugcugaccgaugagaugaucgcccaguacacaucugcccugcuggccggcacaaucacaagcggcuggacauuuggagcuggcgccgcucugcagauccccuuugcuaugcagauggccuaccgguucaacggcaucggagugacccagaaugugcuguacgagaaccagaagcugaucgccaaccaguucaacagcgccaucggcaagauccaggacagccugagcagcacagcaagcgcccugggaaagcugcaggacguggucaaccagaaugcccaggcacugaacacccuggucaagcagcuguccuccaacuucggcgccaucagcucugugcugaacgauauccugagcagacuggacaaggucgaggccgaggugcagaucgacagacugaucacaggcagacugcagagccuccagacauacgugacccagcagcugaucagagccgccgagauuagagccucugccaaucuggccgccaccaagaugucugagugugugcugggccagagcaagagaguggacuuuugcggcaagggcuaccaccugaugagcuucccucagucugccccucacggcgugguguuucugcacgugacauaugugcccgcucaagagaagaauuucaccaccgcuccagccaucugccacgacggcaaagcccacuuuccuagagaaggcguguucguguccaacggcacccauugguucgugacacagcggaacuucuacgagccccagaucaucaccaccgacaacaccuucgugucuggcaacugcgacguugugaucggcauugugaacaauaccguguacgacccucugcagcccgagcuggacagcuucaaagaggaacuggacaaguacuuuaagaaccacacaagccccgacguggaccugggcgauaucagcggaaucaaugccagcgucgugaacauccagaaagagaucgaccggcugaacgagguggccaagaaucugaacgagagccugaucgaccugcaagaacuggggaaguacgagcaguacaucaaguggcccugguacaucuggcugggcuuuaucgccggacugauugccaucgugauggucacaaucaugcuguguugcaugaccagcugcuguagcugccugaagggcuguuguagcuguggcagcugcugcaaguucgacgaggacgauucugagcccgugcugaagggcgugaaacugcacuacaccugaggacuagucccuguucccagagcccacuuuuuuuucuuuuuuugaaauaaaauagccugucuuucagaucucaaaggcucuuuucagagccaccaaaaaaaaaaaaaaaaaaaaaaaaaaaaaaaaaaaaaaaaaaaaaaaaaaaaaaaaaaaaaaaaaaaaaaaaaaaaaaaaaaaaaaaaaaaaaaaaaaaaa

SEQ ID NO: 23715 - RNA, 4182 nt, Artificial Sequence
  SARS-CoV-2/Wuhan/WIV05/2019__EPI_ISL_402128 spike protein mRNA gc mod (1-1273)(L18F_D80A_D215G_L242del_A243del_L244del_R246I_K417N_E484 K_N501Y_D614G_A701V)
aggagagggcgcuuggcuugcaaggacccugagcugcggcauugaagcacacccaacccaacucgacugaagucagccucacugaaccggaucugagaaucuucucucucugggcuugccagggcucuccgaaccuagcuagcauccucuucaauuccaacuagaaagcuuaccauguucguguuucuggugcugcugccccugguguccagccagugugugaacuucaccaccagaacacagcugccuccagccuacaccaacagcuucaccagaggcguguacuaccccgacaagguguucagauccagcgugcugcacucuacccaggaccuguuccugccuuucuucagcaacgugaccugguuccacgccauccacguguccggcaccaauggcaccaagagauucgccaaccccgugcugcccuucaacgacgggguguacuuugccagcaccgagaaguccaacaucaucagaggcuggaucuucggcaccacacuggacagcaagacccagagccugcugaucgugaacaacgccaccaacguggucaucaaagugugcgaguuccaguucugcaacgaccccuuccugggcgucuacuaccacaagaacaacaagagcuggauggaaagcgaguuccggguguacagcagcgccaacaacugcaccuucgaguacgugucccagccuuuccugauggaccuggaaggcaagcagggcaacuucaagaaccugcgcgaguucguguucaagaacaucgacggcuacuucaaaaucuacagcaagcacaccccuaucaaccucgugcggggccugccucagggcuucucugcucuggaaccccugguggaucugcccaucggcaucaacaucacccgguuucagacacugcacaucagcuaccugacaccuggcgauagcagcagcggauggacagcuggugccgccgcuuacuaugugggcuaccugcagccuagaaccuuccugcugaaguacaacgagaacggcaccaucaccgacgccguggauugugcucuggauccucugagcgagacaaagugcacccugaaguccuucaccguggaaaagggcaucuaccagaccagcaacuuccgggugcagcccaccgaauccaucgugcgguuccccaauaucaccaaucugugccccuucggcgagguguucaaugccaccagauucgccucuguguacgccuggaaccggaagcggaucagcaauugcguggccgacuacuccgugcuguacaacuccgccagcuucagcaccuucaagugcuacggcguguccccuaccaagcugaacgaccugugcuucacaaacguguacgccgacagcuucgugauccggggagaugaagugcggcagauugccccuggacagacaggcaacaucgccgacuacaacuacaagcugcccgacgacuucaccggcugugugauugccuggaacagcaacaaccuggacuccaaagucggcggcaacuacaauuaccuguaccggcuguuccggaaguccaaucugaagcccuucgagcgggacaucagcaccgaaaucuaucaggccggcagcaccccuugcaacggcgugaagggcuucaacugcuacuucccacugcaguccuacggcuuucagcccacauacggcgugggcuaucagcccuacagagugguggugcugagcuucgaacugcugcaugcuccugccacagugugcggcccuaagaaaagcaccaaucucgugaagaacaaaugcgugaacuucaacuucaacggccugaccggcaccggcgugcugacagagagcaacaagaaguuccugccauuccagcaguuuggccgggauaucgccgauaccacagacgccguuagagauccccagacacuggaaauccuggacaucaccccaugcagcuucggcggagugucugugaucaccccuggcaccaacaccagcaaucagguggcagugcuguaccagggcgugaacuguaccgaagugcccguggccauucacgccgaucagcugacaccuacauggcggguguacuccaccggcagcaauguguuucagaccagagccggcugucugaucggagccgagcacgugaacaauagcuacgagugcgacauccccaucggcgcuggcaucugugccagcuaccagacacagacaaacagccccagacgggcuagaagcguggccagccagagcaucauugccuacacaaugucucugggcguggagaacagcguggccuacuccaacaacucuaucgcuauccccaccaacuucaccaucagcgugaccaccgagauccugccuguguccaugaccaagaccagcguggacugcaccauguacaucugcggcgauuccaccgagugcuccaaccugcugcugcaguacggcagcuucugcacccagcugaauagagcccugacagggaucgccguggaacaggacaagaacacccaagagguguucgcccaagugaagcaaaucuacaagaccccuccuaucaaggacuucggcggcuucaauuucagccagauucugcccgauccuagcaagcccagcaagcggagcuucaucgaggaccugcuguucaacaaagugacacuggccgacgccggcuucaucaagcaguauggcgauugucugggcgacauugccgccagggaucugauuugcgcccagaaguuuaacggacugacagugcugccuccucugcugaccgaugagaugaucgcccaguacacaucugcccugcuggccggcacaaucacaagcggcuggacauuuggagcuggcgccgcucugcagauccccuuugcuaugcagauggccuaccgguucaacggcaucggagugacccagaaugugcuguacgagaaccagaagcugaucgccaaccaguucaacagcgccaucggcaagauccaggacagccugagcagcacagcaagcgcccugggaaagcugcaggacguggucaaccagaaugcccaggcacugaacacccuggucaagcagcuguccuccaacuucggcgccaucagcucugugcugaacgauauccugagcagacuggacaaggucgaggccgaggugcagaucgacagacugaucacaggcagacugcagagccuccagacauacgugacccagcagcugaucagagccgccgagauuagagccucugccaaucuggccgccaccaagaugucugagugugugcugggccagagcaagagaguggacuuuugcggcaagggcuaccaccugaugagcuucccucagucugccccucacggcgugguguuucugcacgugacauaugugcccgcucaagagaagaauuucaccaccgcuccagccaucugccacgacggcaaagcccacuuuccuagagaaggcguguucguguccaacggcacccauugguucgugacacagcggaacuucuacgagccccagaucaucaccaccgacaacaccuucgugucuggcaacugcgacguugugaucggcauugugaacaauaccguguacgacccucugcagcccgagcuggacagcuucaaagaggaacuggacaaguacuuuaagaaccacacaagccccgacguggaccugggcgauaucagcggaaucaaugccagcgucgugaacauccagaaagagaucgaccggcugaacgagguggccaagaaucugaacgagagccugaucgaccugcaagaacuggggaaguacgagcaguacaucaaguggcccugguacaucuggcugggcuuuaucgccggacugauugccaucgugauggucacaaucaugcuguguugcaugaccagcugcuguagcugccugaagggcuguuguagcuguggcagcugcugcaaguucgacgaggacgauucugagcccgugcugaagggcgugaaacugcacuacaccugaggacuagucccuguucccagagcccacuuuuuuuucuuuuuuugaaauaaaauagccugucuuucagaucucaaaggcucuuuucagagccaccaaaaaaaaaaaaaaaaaaaaaaaaaaaaaaaaaaaaaaaaaaaaaaaaaaaaaaaaaaaaaaaaaaaaaaaaaaaaaaaaaaaaaaaaaaaaaaaaaaaaa

SEQ ID NO: 23716 - RNA, 4191 nt, Artificial Sequence
  SARS-CoV-2/Wuhan/WIV05/2019__EPI_ISL_402128 spike protein mRNA gc mod (1-1273)(E484K_D614G)
aggagagggcgcuuggcuugcaaggacccugagcugcggcauugaagcacacccaacccaacucgacugaagucagccucacugaaccggaucugagaaucuucucucucugggcuugccagggcucuccgaaccuagcuagcauccucuucaauuccaacuagaaagcuuaccauguucguguuucuggugcugcugccccugguguccagccagugugugaaccugaccaccagaacacagcugccuccagccuacaccaacagcuucaccagaggcguguacuaccccgacaagguguucagauccagcgugcugcacucuacccaggaccuguuccugccuuucuucagcaacgugaccugguuccacgccauccacguguccggcaccaauggcaccaagagauucgacaaccccgugcugcccuucaacgacgggguguacuuugccagcaccgagaaguccaacaucaucagaggcuggaucuucggcaccacacuggacagcaagacccagagccugcugaucgugaacaacgccaccaacguggucaucaaagugugcgaguuccaguucugcaacgaccccuuccugggcgucuacuaccacaagaacaacaagagcuggauggaaagcgaguuccggguguacagcagcgccaacaacugcaccuucgaguacgugucccagccuuuccugauggaccuggaaggcaagcagggcaacuucaagaaccugcgcgaguucguguucaagaacaucgacggcuacuucaaaaucuacagcaagcacaccccuaucaaccucgugcgggaucugccucagggcuucucugcucuggaaccccugguggaucugcccaucggcaucaacaucacccgguuucagacacugcuggcccugcacagaagcuaccugacaccuggcgauagcagcagcggauggacagcuggugccgccgcuuacuaugugggcuaccugcagccuagaaccuuccugcugaaguacaacgagaacggcaccaucaccgacgccguggauugugcucuggauccucugagcgagacaaagugcacccugaaguccuucaccguggaaaagggcaucuaccagaccagcaacuuccgggugcagcccaccgaauccaucgugcgguuccccaauaucaccaaucugugccccuucggcgagguguucaaugccaccagauucgccucuguguacgccuggaaccggaagcggaucagcaauugcguggccgacuacuccgugcuguacaacuccgccagcuucagcaccuucaagugcuacggcguguccccuaccaagcugaacgaccugugcuucacaaacguguacgccgacagcuucgugauccggggagaugaagugcggcagauugccccuggacagacaggcaagaucgccgacuacaacuacaagcugcccgacgacuucaccggcugugugauugccuggaacagcaacaaccuggacuccaaagucggcggcaacuacaauuaccuguaccggcuguuccggaaguccaaucugaagcccuucgagcgggacaucagcaccgaaaucuaucaggccggcagcaccccuugcaacggcgugaagggcuucaacugcuacuucccacugcaguccuacggcuuucagcccacaaauggcgugggcuaucagcccuacagagugguggugcugagcuucgaacugcugcaugcuccugccacagugugcggcccuaagaaaagcaccaaucucgugaagaacaaaugcgugaacuucaacuucaacggccugaccggcaccggcgugcugacagagagcaacaagaaguuccugccauuccagcaguuuggccgggauaucgccgauaccacagacgccguuagagauccccagacacuggaaauccuggacaucaccccaugcagcuucggcggagugucugugaucaccccuggcaccaacaccagcaaucagguggcagugcuguaccagggcgugaacuguaccgaagugcccguggccauucacgccgaucagcugacaccuacauggcggguguacuccaccggcagcaauguguuucagaccagagccggcugucugaucggagccgagcacgugaacaauagcuacgagugcgacauccccaucggcgcuggcaucugugccagcuaccagacacagacaaacagccccagacgggcuagaagcguggccagccagagcaucauugccuacacaaugucucugggcgccgagaacagcguggccuacuccaacaacucuaucgcuauccccaccaacuucaccaucagcgugaccaccgagauccugccuguguccaugaccaagaccagcguggacugcaccauguacaucugcggcgauuccaccgagugcuccaaccugcugcugcaguacggcagcuucugcacccagcugaauagagcccugacagggaucgccguggaacaggacaagaacacccaagagguguucgcccaagugaagcaaaucuacaagaccccuccuaucaaggacuucggcggcuucaauuucagccagauucugcccgauccuagcaagcccagcaagcggagcuucaucgaggaccugcuguucaacaaagugacacuggccgacgccggcuucaucaagcaguauggcgauugucugggcgacauugccgccagggaucugauuugcgcccagaaguuuaacggacugacagugcugccuccucugcugaccgaugagaugaucgcccaguacacaucugcccugcuggccggcacaaucacaagcggcuggacauuuggagcuggcgccgcucugcagauccccuuugcuaugcagauggccuaccgguucaacggcaucggagugacccagaaugugcuguacgagaaccagaagcugaucgccaaccaguucaacagcgccaucggcaagauccaggacagccugagcagcacagcaagcgcccugggaaagcugcaggacguggucaaccagaaugcccaggcacugaacacccuggucaagcagcuguccuccaacuucggcgccaucagcucugugcugaacgauauccugagcagacuggacaaggucgaggccgaggugcagaucgacagacugaucacaggcagacugcagagccuccagacauacgugacccagcagcugaucagagccgccgagauuagagccucugccaaucuggccgccaccaagaugucugagugugugcugggccagagcaagagaguggacuuuugcggcaagggcuaccaccugaugagcuucccucagucugccccucacggcgugguguuucugcacgugacauaugugcccgcucaagagaagaauuucaccaccgcuccagccaucugccacgacggcaaagcccacuuuccuagagaaggcguguucguguccaacggcacccauugguucgugacacagcggaacuucuacgagccccagaucaucaccaccgacaacaccuucgugucuggcaacugcgacguugugaucggcauugugaacaauaccguguacgacccucugcagcccgagcuggacagcuucaaagaggaacuggacaaguacuuuaagaaccacacaagccccgacguggaccugggcgauaucagcggaaucaaugccagcgucgugaacauccagaaagagaucgaccggcugaacgagguggccaagaaucugaacgagagccugaucgaccugcaagaacuggggaaguacgagcaguacaucaaguggcccugguacaucuggcugggcuuuaucgccggacugauugccaucgugauggucacaaucaugcuguguugcaugaccagcugcuguagcugccugaagggcuguuguagcuguggcagcugcugcaaguucgacgaggacgauucugagcccgugcugaagggcgugaaacugcacuacaccugaggacuagucccuguucccagagcccacuuuuuuuucuuuuuuugaaauaaaauagccugucuuucagaucucaaaggcucuuuucagagccaccaaaaaaaaaaaaaaaaaaaaaaaaaaaaaaaaaaaaaaaaaaaaaaaaaaaaaaaaaaaaaaaaaaaaaaaaaaaaaaaaaaaaaaaaaaaaaaaaaaaaa

SEQ ID NO: 23717 - RNA, 4191 nt, Artificial Sequence
  SARS-CoV-2/Wuhan/WIV05/2019__EPI_ISL_402128 spike protein mRNA gc mod (1-1273)(L18F_T20N_P26S_D138Y_R190S_K417T_E484K_N501Y_D614G_H655Y _T1027I)
aggagagggcgcuuggcuugcaaggacccugagcugcggcauugaagcacacccaacccaacucgacugaagucagccucacugaaccggaucugagaaucuucucucucugggcuugccagggcucuccgaaccuagcuagcauccucuucaauuccaacuagaaagcuuaccauguucguguuucuggugcugcugccccugguguccagccagugugugaacuucaccaacagaacacagcugccuagcgccuacaccaacagcuucaccagaggcguguacuaccccgacaagguguucagauccagcgugcugcacucuacccaggaccuguuccugccuuucuucagcaacgugaccugguuccacgccauccacguguccggcaccaauggcaccaagagauucgacaaccccgugcugcccuucaacgacgggguguacuuugccagcaccgagaaguccaacaucaucagaggcuggaucuucggcaccacacuggacagcaagacccagagccugcugaucgugaacaacgccaccaacguggucaucaaagugugcgaguuccaguucugcaacuaccccuuccugggcgucuacuaccacaagaacaacaagagcuggauggaaagcgaguuccggguguacagcagcgccaacaacugcaccuucgaguacgugucccagccuuuccugauggaccuggaaggcaagcagggcaacuucaagaaccugagcgaguucguguucaagaacaucgacggcuacuucaaaaucuacagcaagcacaccccuaucaaccucgugcgggaucugccucagggcuucucugcucuggaaccccugguggaucugcccaucggcaucaacaucacccgguuucagacacugcuggcccugcacagaagcuaccugacaccuggcgauagcagcagcggauggacagcuggugccgccgcuuacuaugugggcuaccugcagccuagaaccuuccugcugaaguacaacgagaacggcaccaucaccgacgccguggauugugcucuggauccucugagcgagacaaagugcacccugaaguccuucaccguggaaaagggcaucuaccagaccagcaacuuccgggugcagcccaccgaauccaucgugcgguuccccaauaucaccaaucugugccccuucggcgagguguucaaugccaccagauucgccucuguguacgccuggaaccggaagcggaucagcaauugcguggccgacuacuccgugcuguacaacuccgccagcuucagcaccuucaagugcuacggcguguccccuaccaagcugaacgaccugugcuucacaaacguguacgccgacagcuucgugauccggggagaugaagugcggcagauugccccuggacagacaggcaccaucgccgacuacaacuacaagcugcccgacgacuucaccggcugugugauugccuggaacagcaacaaccuggacuccaaagucggcggcaacuacaauuaccuguaccggcuguuccggaaguccaaucugaagcccuucgagcgggacaucagcaccgaaaucuaucaggccggcagcaccccuugcaacggcgugaagggcuucaacugcuacuucccacugcaguccuacggcuuucagcccacauacggcgugggcuaucagcccuacagagugguggugcugagcuucgaacugcugcaugcuccugccacagugugcggcccuaagaaaagcaccaaucucgugaagaacaaaugcgugaacuucaacuucaacggccugaccggcaccggcgugcugacagagagcaacaagaaguuccugccauuccagcaguuuggccgggauaucgccgauaccacagacgccguuagagauccccagacacuggaaauccuggacaucaccccaugcagcuucggcggagugucugugaucaccccuggcaccaacaccagcaaucagguggcagugcuguaccagggcgugaacuguaccgaagugcccguggccauucacgccgaucagcugacaccuacauggcggguguacuccaccggcagcaauguguuucagaccagagccggcugucugaucggagccgaguacgugaacaauagcuacgagugcgacauccccaucggcgcuggcaucugugccagcuaccagacacagacaaacagccccagacgggcuagaagcguggccagccagagcaucauugccuacacaaugucucugggcgccgagaacagcguggccuacuccaacaacucuaucgcuauccccaccaacuucaccaucagcgugaccaccgagauccugccuguguccaugaccaagaccagcguggacugcaccauguacaucugcggcgauuccaccgagugcuccaaccugcugcugcaguacggcagcuucugcacccagcugaauagagcccugacagggaucgccguggaacaggacaagaacacccaagagguguucgcccaagugaagcaaaucuacaagaccccuccuaucaaggacuucggcggcuucaauuucagccagauucugcccgauccuagcaagcccagcaagcggagcuucaucgaggaccugcuguucaacaaagugacacuggccgacgccggcuucaucaagcaguauggcgauugucugggcgacauugccgccagggaucugauuugcgcccagaaguuuaacggacugacagugcugccuccucugcugaccgaugagaugaucgcccaguacacaucugcccugcuggccggcacaaucacaagcggcuggacauuuggagcuggcgccgcucugcagauccccuuugcuaugcagauggccuaccgguucaacggcaucggagugacccagaaugugcuguacgagaaccagaagcugaucgccaaccaguucaacagcgccaucggcaagauccaggacagccugagcagcacagcaagcgcccugggaaagcugcaggacguggucaaccagaaugcccaggcacugaacacccuggucaagcagcuguccuccaacuucggcgccaucagcucugugcugaacgauauccugagcagacuggacaaggucgaggccgaggugcagaucgacagacugaucacaggcagacugcagagccuccagacauacgugacccagcagcugaucagagccgccgagauuagagccucugccaaucuggccgccaucaagaugucugagugugugcugggccagagcaagagaguggacuuuugcggcaagggcuaccaccugaugagcuucccucagucugccccucacggcgugguguuucugcacgugacauaugugcccgcucaagagaagaauuucaccaccgcuccagccaucugccacgacggcaaagcccacuuuccuagagaaggcguguucguguccaacggcacccauugguucgugacacagcggaacuucuacgagccccagaucaucaccaccgacaacaccuucgugucuggcaacugcgacguugugaucggcauugugaacaauaccguguacgacccucugcagcccgagcuggacagcuucaaagaggaacuggacaaguacuuuaagaaccacacaagccccgacguggaccugggcgauaucagcggaaucaaugccagcgucgugaacauccagaaagagaucgaccggcugaacgagguggccaagaaucugaacgagagccugaucgaccugcaagaacuggggaaguacgagcaguacaucaaguggcccugguacaucuggcugggcuuuaucgccggacugauugccaucgugauggucacaaucaugcuguguugcaugaccagcugcuguagcugccugaagggcuguuguagcuguggcagcugcugcaaguucgacgaggacgauucugagcccgugcugaagggcgugaaacugcacuacaccugaggacuagucccuguucccagagcccacuuuuuuuucuuuuuuugaaauaaaauagccugucuuucagaucucaaaggcucuuuucagagccaccaaaaaaaaaaaaaaaaaaaaaaaaaaaaaaaaaaaaaaaaaaaaaaaaaaaaaaaaaaaaaaaaaaaaaaaaaaaaaaaaaaaaaaaaaaaaaaaaaaaaa

SEQ ID NO: 23718 - RNA, 4191 nt, Artificial Sequence
  SARS-CoV-2/Wuhan/WIV05/2019__EPI_ISL_402128 spike protein mRNA gc mod (1-1273)(S13I_W152C_L452R_D614G)
aggagagggcgcuuggcuugcaaggacccugagcugcggcauugaagcacacccaacccaacucgacugaagucagccucacugaaccggaucugagaaucuucucucucugggcuugccagggcucuccgaaccuagcuagcauccucuucaauuccaacuagaaagcuuaccauguucguguuucuggugcugcugccccugguguccauccagugugugaaccugaccaccagaacacagcugccuccagccuacaccaacagcuucaccagaggcguguacuaccccgacaagguguucagauccagcgugcugcacucuacccaggaccuguuccugccuuucuucagcaacgugaccugguuccacgccauccacguguccggcaccaauggcaccaagagauucgacaaccccgugcugcccuucaacgacgggguguacuuugccagcaccgagaaguccaacaucaucagaggcuggaucuucggcaccacacuggacagcaagacccagagccugcugaucgugaacaacgccaccaacguggucaucaaagugugcgaguuccaguucugcaacgaccccuuccugggcgucuacuaccacaagaacaacaagagcugcauggaaagcgaguuccggguguacagcagcgccaacaacugcaccuucgaguacgugucccagccuuuccugauggaccuggaaggcaagcagggcaacuucaagaaccugcgcgaguucguguucaagaacaucgacggcuacuucaaaaucuacagcaagcacaccccuaucaaccucgugcgggaucugccucagggcuucucugcucuggaaccccugguggaucugcccaucggcaucaacaucacccgguuucagacacugcuggcccugcacagaagcuaccugacaccuggcgauagcagcagcggauggacagcuggugccgccgcuuacuaugugggcuaccugcagccuagaaccuuccugcugaaguacaacgagaacggcaccaucaccgacgccguggauugugcucuggauccucugagcgagacaaagugcacccugaaguccuucaccguggaaaagggcaucuaccagaccagcaacuuccgggugcagcccaccgaauccaucgugcgguuccccaauaucaccaaucugugccccuucggcgagguguucaaugccaccagauucgccucuguguacgccuggaaccggaagcggaucagcaauugcguggccgacuacuccgugcuguacaacuccgccagcuucagcaccuucaagugcuacggcguguccccuaccaagcugaacgaccugugcuucacaaacguguacgccgacagcuucgugauccggggagaugaagugcggcagauugccccuggacagacaggcaagaucgccgacuacaacuacaagcugcccgacgacuucaccggcugugugauugccuggaacagcaacaaccuggacuccaaagucggcggcaacuacaauuaccgcuaccggcuguuccggaaguccaaucugaagcccuucgagcgggacaucagcaccgaaaucuaucaggccggcagcaccccuugcaacggcguggaaggcuucaacugcuacuucccacugcaguccuacggcuuucagcccacaaauggcgugggcuaucagcccuacagagugguggugcugagcuucgaacugcugcaugcuccugccacagugugcggcccuaagaaaagcaccaaucucgugaagaacaaaugcgugaacuucaacuucaacggccugaccggcaccggcgugcugacagagagcaacaagaaguuccugccauuccagcaguuuggccgggauaucgccgauaccacagacgccguuagagauccccagacacuggaaauccuggacaucaccccaugcagcuucggcggagugucugugaucaccccuggcaccaacaccagcaaucagguggcagugcuguaccagggcgugaacuguaccgaagugcccguggccauucacgccgaucagcugacaccuacauggcggguguacuccaccggcagcaauguguuucagaccagagccggcugucugaucggagccgagcacgugaacaauagcuacgagugcgacauccccaucggcgcuggcaucugugccagcuaccagacacagacaaacagccccagacgggcuagaagcguggccagccagagcaucauugccuacacaaugucucugggcgccgagaacagcguggccuacuccaacaacucuaucgcuauccccaccaacuucaccaucagcgugaccaccgagauccugccuguguccaugaccaagaccagcguggacugcaccauguacaucugcggcgauuccaccgagugcuccaaccugcugcugcaguacggcagcuucugcacccagcugaauagagcccugacagggaucgccguggaacaggacaagaacacccaagagguguucgcccaagugaagcaaaucuacaagaccccuccuaucaaggacuucggcggcuucaauuucagccagauucugcccgauccuagcaagcccagcaagcggagcuucaucgaggaccugcuguucaacaaagugacacuggccgacgccggcuucaucaagcaguauggcgauugucugggcgacauugccgccagggaucugauuugcgcccagaaguuuaacggacugacagugcugccuccucugcugaccgaugagaugaucgcccaguacacaucugcccugcuggccggcacaaucacaagcggcuggacauuuggagcuggcgccgcucugcagauccccuuugcuaugcagauggccuaccgguucaacggcaucggagugacccagaaugugcuguacgagaaccagaagcugaucgccaaccaguucaacagcgccaucggcaagauccaggacagccugagcagcacagcaagcgcccugggaaagcugcaggacguggucaaccagaaugcccaggcacugaacacccuggucaagcagcuguccuccaacuucggcgccaucagcucugugcugaacgauauccugagcagacuggacaaggucgaggccgaggugcagaucgacagacugaucacaggcagacugcagagccuccagacauacgugacccagcagcugaucagagccgccgagauuagagccucugccaaucuggccgccaccaagaugucugagugugugcugggccagagcaagagaguggacuuuugcggcaagggcuaccaccugaugagcuucccucagucugccccucacggcgugguguuucugcacgugacauaugugcccgcucaagagaagaauuucaccaccgcuccagccaucugccacgacggcaaagcccacuuuccuagagaaggcguguucguguccaacggcacccauugguucgugacacagcggaacuucuacgagccccagaucaucaccaccgacaacaccuucgugucuggcaacugcgacguugugaucggcauugugaacaauaccguguacgacccucugcagcccgagcuggacagcuucaaagaggaacuggacaaguacuuuaagaaccacacaagccccgacguggaccugggcgauaucagcggaaucaaugccagcgucgugaacauccagaaagagaucgaccggcugaacgagguggccaagaaucugaacgagagccugaucgaccugcaagaacuggggaaguacgagcaguacaucaaguggcccugguacaucuggcugggcuuuaucgccggacugauugccaucgugauggucacaaucaugcuguguugcaugaccagcugcuguagcugccugaagggcuguuguagcuguggcagcugcugcaaguucgacgaggacgauucugagcccgugcugaagggcgugaaacugcacuacaccugaggacuagucccuguucccagagcccacuuuuuuuucuuuuuuugaaauaaaauagccugucuuucagaucucaaaggcucuuuucagagccaccaaaaaaaaaaaaaaaaaaaaaaaaaaaaaaaaaaaaaaaaaaaaaaaaaaaaaaaaaaaaaaaaaaaaaaaaaaaaaaaaaaaaaaaaaaaaaaaaaaaaa

SEQ ID NO: 23719 - RNA, 4191 nt, Artificial Sequence
  SARS-CoV-2/Wuhan/WIV05/2019__EPI_ISL_402128 spike protein mRNA gc mod (1-1273)
aggagagggcgcuuggcuugcaaggacccugagcugcggcauugaagcacacccaacccaacucgacugaagucagccucacugaaccggaucugagaaucuucucucucugggcuugccagggcucuccgaaccuagcuagcauccucuucaauuccaacuagaaagcuuaccauguucguguuccuggugcugcugccucugguguccagccagugugugaaccugaccaccagaacacagcugccuccagccuacaccaacagcuuuaccagaggcguguacuaccccgacaagguguucagauccagcgugcugcacucuacccaggaccuguuccugccuuucuucagcaacgugaccugguuccacgccauccacguguccggcaccaauggcaccaagagauucgacaaccccgugcugcccuucaacgacgggguguacuuugccagcaccgagaaguccaacaucaucagaggcuggaucuucggcaccacacuggacagcaagacccagagccugcugaucgugaacaacgccaccaacguggucaucaaagugugcgaguuccaguucugcaacgaccccuuccugggcgucuacuaccacaagaacaacaagagcuggauggaaagcgaguuccggguguacagcagcgccaacaacugcaccuucgaguacgugucccagccuuuccugauggaccuggaaggcaagcagggcaacuucaagaaccugcgcgaguucguguuuaagaacaucgacggcuacuucaagaucuacagcaagcacaccccuaucaaccucgugcgggaucugccucagggcuucucugcucuggaaccccugguggaucugcccaucggcaucaacaucacccgguuucagacacugcuggcccugcacagaagcuaccugacaccuggcgauagcagcagcggauggacagcuggugccgccgcuuacuaugugggcuaccugcagccuagaaccuuccugcugaaguacaacgagaacggcaccaucaccgacgccguggauugugcucuggauccucugagcgagacaaagugcacccugaaguccuucaccguggaaaagggcaucuaccagaccagcaacuuccgggugcagcccaccgaauccaucgugcgguuccccaauaucaccaaucugugccccuucggcgagguguucaaugccaccagauucgccucuguguacgccuggaaccggaagcggaucagcaauugcguggccgacuacuccgugcuguacaacuccgccagcuucagcaccuucaagugcuacggcguguccccuaccaagcugaacgaccugugcuucacaaacguguacgccgacagcuucgugauccggggagaugaagugcggcagauugccccuggacagacaggcaagaucgccgacuacaacuacaagcugcccgacgacuucaccggcugugugauugccuggaacagcaacaaccuggacuccaaagucggcggcaacuacaauuaccuguaccggcuguuccggaaguccaaucugaagcccuucgagcgggacaucuccaccgagaucuaucaggccggcagcaccccuuguaacggcguggaaggcuucaacugcuacuucccacugcaguccuacggcuuucagcccacaaauggcgugggcuaucagcccuacagagugguggugcugagcuucgaacugcugcaugccccugccacagugugcggcccuaagaaaagcaccaaucucgugaagaacaaaugcgugaacuucaacuucaacggccugaccggcaccggcgugcugacagagagcaacaagaaguuccugccauuccagcaguuuggccgggauaucgccgauaccacagacgccguuagagauccccagacacuggaaauccuggacaucaccccuugcagcuucggcggagugucugugaucaccccuggcaccaacaccagcaaucagguggcagugcuguaccaggacgugaacuguaccgaagugcccguggccauucacgccgaucagcugacaccuacauggcggguguacuccaccggcagcaauguguuucagaccagagccggcugucugaucggagccgagcacgugaacaauagcuacgagugcgacauccccaucggcgcuggaaucugcgccagcuaccagacacagacaaacagcccucggagagccagaagcguggccagccagagcaucauugccuacacaaugucucugggcgccgagaacagcguggccuacuccaacaacucuaucgcuauccccaccaacuucaccaucagcgugaccacagagauccugccuguguccaugaccaagaccagcguggacugcaccauguacaucugcggcgauuccaccgagugcuccaaccugcugcugcaguacggcagcuucugcacccagcugaauagagcccugacagggaucgccguggaacaggacaagaacacccaagagguguucgcccaagugaagcagaucuacaagaccccuccuaucaaggacuucggcggcuucaauuucagccagauucugcccgauccuagcaagcccagcaagcggagcuucaucgaggaccugcuguucaacaaagugacacuggccgacgccggcuucaucaagcaguauggcgauugucugggcgacauugccgccagggaucugauuugcgcccagaaguuuaacggacugacagugcugccuccucugcugaccgaugagaugaucgcccaguacacaucugcccugcuggccggcacaaucacaagcggcuggacauuuggagcaggcgccgcucugcagauccccuuugcuaugcagauggccuaccgguucaacggcaucggagugacccagaaugugcuguacgagaaccagaagcugaucgccaaccaguucaacagcgccaucggcaagauccaggacagccugagcagcacagcaagcgcccugggaaagcugcaggacguggucaaccagaaugcccaggcacugaacacccuggucaagcagcuguccuccaacuucggcgccaucagcucugugcugaacgauauccugagcagacuggacaaggucgaggccgaggugcagaucgacagacugaucacaggcagacugcagagccuccagacauacgugacccagcagcugaucagagccgccgagauuagagccucugccaaucuggccgccaccaagaugucugagugugugcugggccagagcaagagaguggacuuuugcggcaagggcuaccaccugaugagcuucccucagucugccccucacggcgugguguuucugcacgugacauaugugcccgcucaagagaagaauuucaccaccgcuccagccaucugccacgacggcaaagcccacuuuccuagagaaggcguguucguguccaacggcacccauugguucgugacacagcggaacuucuacgagccccagaucaucaccaccgacaacaccuucgugucuggcaacugcgacgucgugaucggcauugugaacaauaccguguacgacccucugcagcccgagcuggacagcuucaaagaggaacuggacaaguacuuuaagaaccacacaagccccgacguggaccugggcgauaucagcggaaucaaugccagcgucgugaacauccagaaagagaucgaccggcugaacgagguggccaagaaucugaacgagagccugaucgaccugcaagaacuggggaaguacgagcaguacaucaaguggcccugguacaucuggcugggcuuuaucgccggacugauugccaucgugauggucacaaucaugcuguguugcaugaccagcugcuguagcugccugaagggcuguuguagcuguggcagcugcugcaaguucgacgaggacgauucugagcccgugcugaagggcgugaaacugcacuacacaugaggacuagucccuguucccagagcccacuuuuuuuucuuuuuuugaaauaaaauagccugucuuucagaucucaaaggcucuuuucagagccaccaaaaaaaaaaaaaaaaaaaaaaaaaaaaaaaaaaaaaaaaaaaaaaaaaaaaaaaaaaaaaaaaaaaaaaaaaaaaaaaaaaaaaaaaaaaaaaaaaaaaa

SEQ ID NO: 23720 - RNA, 4191 nt, Artificial Sequence
  SARS-CoV-2/Wuhan/WIV05/2019__EPI_ISL_402128 spike protein mRNA gc mod (1-1273)(D614G)
aggagagggcgcuuggcuugcaaggacccugagcugcggcauugaagcacacccaacccaacucgacugaagucagccucacugaaccggaucugagaaucuucucucucugggcuugccagggcucuccgaaccuagcuagcauccucuucaauuccaacuagaaagcuuaccauguucguguuccuggugcugcugccucugguguccagccagugugugaaccugaccaccagaacacagcugccuccagccuacaccaacagcuuuaccagaggcguguacuaccccgacaagguguucagauccagcgugcugcacucuacccaggaccuguuccugccuuucuucagcaacgugaccugguuccacgccauccacguguccggcaccaauggcaccaagagauucgacaaccccgugcugcccuucaacgacgggguguacuuugccagcaccgagaaguccaacaucaucagaggcuggaucuucggcaccacacuggacagcaagacccagagccugcugaucgugaacaacgccaccaacguggucaucaaagugugcgaguuccaguucugcaacgaccccuuccugggcgucuacuaccacaagaacaacaagagcuggauggaaagcgaguuccggguguacagcagcgccaacaacugcaccuucgaguacgugucccagccuuuccugauggaccuggaaggcaagcagggcaacuucaagaaccugcgcgaguucguguuuaagaacaucgacggcuacuucaagaucuacagcaagcacaccccuaucaaccucgugcgggaucugccucagggcuucucugcucuggaaccccugguggaucugcccaucggcaucaacaucacccgguuucagacacugcuggcccugcacagaagcuaccugacaccuggcgauagcagcagcggauggacagcuggugccgccgcuuacuaugugggcuaccugcagccuagaaccuuccugcugaaguacaacgagaacggcaccaucaccgacgccguggauugugcucuggauccucugagcgagacaaagugcacccugaaguccuucaccguggaaaagggcaucuaccagaccagcaacuuccgggugcagcccaccgaauccaucgugcgguuccccaauaucaccaaucugugccccuucggcgagguguucaaugccaccagauucgccucuguguacgccuggaaccggaagcggaucagcaauugcguggccgacuacuccgugcuguacaacuccgccagcuucagcaccuucaagugcuacggcguguccccuaccaagcugaacgaccugugcuucacaaacguguacgccgacagcuucgugauccggggagaugaagugcggcagauugccccuggacagacaggcaagaucgccgacuacaacuacaagcugcccgacgacuucaccggcugugugauugccuggaacagcaacaaccuggacuccaaagucggcggcaacuacaauuaccuguaccggcuguuccggaaguccaaucugaagcccuucgagcgggacaucuccaccgagaucuaucaggccggcagcaccccuuguaacggcguggaaggcuucaacugcuacuucccacugcaguccuacggcuuucagcccacaaauggcgugggcuaucagcccuacagagugguggugcugagcuucgaacugcugcaugccccugccacagugugcggcccuaagaaaagcaccaaucucgugaagaacaaaugcgugaacuucaacuucaacggccugaccggcaccggcgugcugacagagagcaacaagaaguuccugccauuccagcaguuuggccgggauaucgccgauaccacagacgccguuagagauccccagacacuggaaauccuggacaucaccccuugcagcuucggcggagugucugugaucaccccuggcaccaacaccagcaaucagguggcagugcuguaccagggcgugaacuguaccgaagugcccguggccauucacgccgaucagcugacaccuacauggcggguguacuccaccggcagcaauguguuucagaccagagccggcugucugaucggagccgagcacgugaacaauagcuacgagugcgacauccccaucggcgcuggaaucugcgccagcuaccagacacagacaaacagcccucggagagccagaagcguggccagccagagcaucauugccuacacaaugucucugggcgccgagaacagcguggccuacuccaacaacucuaucgcuauccccaccaacuucaccaucagcgugaccacagagauccugccuguguccaugaccaagaccagcguggacugcaccauguacaucugcggcgauuccaccgagugcuccaaccugcugcugcaguacggcagcuucugcacccagcugaauagagcccugacagggaucgccguggaacaggacaagaacacccaagagguguucgcccaagugaagcagaucuacaagaccccuccuaucaaggacuucggcggcuucaauuucagccagauucugcccgauccuagcaagcccagcaagcggagcuucaucgaggaccugcuguucaacaaagugacacuggccgacgccggcuucaucaagcaguauggcgauugucugggcgacauugccgccagggaucugauuugcgcccagaaguuuaacggacugacagugcugccuccucugcugaccgaugagaugaucgcccaguacacaucugcccugcuggccggcacaaucacaagcggcuggacauuuggagcaggcgccgcucugcagauccccuuugcuaugcagauggccuaccgguucaacggcaucggagugacccagaaugugcuguacgagaaccagaagcugaucgccaaccaguucaacagcgccaucggcaagauccaggacagccugagcagcacagcaagcgcccugggaaagcugcaggacguggucaaccagaaugcccaggcacugaacacccuggucaagcagcuguccuccaacuucggcgccaucagcucugugcugaacgauauccugagcagacuggacaaggucgaggccgaggugcagaucgacagacugaucacaggcagacugcagagccuccagacauacgugacccagcagcugaucagagccgccgagauuagagccucugccaaucuggccgccaccaagaugucugagugugugcugggccagagcaagagaguggacuuuugcggcaagggcuaccaccugaugagcuucccucagucugccccucacggcgugguguuucugcacgugacauaugugcccgcucaagagaagaauuucaccaccgcuccagccaucugccacgacggcaaagcccacuuuccuagagaaggcguguucguguccaacggcacccauugguucgugacacagcggaacuucuacgagccccagaucaucaccaccgacaacaccuucgugucuggcaacugcgacgucgugaucggcauugugaacaauaccguguacgacccucugcagcccgagcuggacagcuucaaagaggaacuggacaaguacuuuaagaaccacacaagccccgacguggaccugggcgauaucagcggaaucaaugccagcgucgugaacauccagaaagagaucgaccggcugaacgagguggccaagaaucugaacgagagccugaucgaccugcaagaacuggggaaguacgagcaguacaucaaguggcccugguacaucuggcugggcuuuaucgccggacugauugccaucgugauggucacaaucaugcuguguugcaugaccagcugcuguagcugccugaagggcuguuguagcuguggcagcugcugcaaguucgacgaggacgauucugagcccgugcugaagggcgugaaacugcacuacacaugaggacuagucccuguucccagagcccacuuuuuuuucuuuuuuugaaauaaaauagccugucuuucagaucucaaaggcucuuuucagagccaccaaaaaaaaaaaaaaaaaaaaaaaaaaaaaaaaaaaaaaaaaaaaaaaaaaaaaaaaaaaaaaaaaaaaaaaaaaaaaaaaaaaaaaaaaaaaaaaaaaaaa

SEQ ID NO: 23721 - RNA, 4191 nt, Artificial Sequence
  SARS-CoV-2/Wuhan/WIV05/2019__EPI_ISL_402128 spike protein mRNA gc mod (1-1273)(A222V_D614G)
aggagagggcgcuuggcuugcaaggacccugagcugcggcauugaagcacacccaacccaacucgacugaagucagccucacugaaccggaucugagaaucuucucucucugggcuugccagggcucuccgaaccuagcuagcauccucuucaauuccaacuagaaagcuuaccauguucguguuccuggugcugcugccucugguguccagccagugugugaaccugaccaccagaacacagcugccuccagccuacaccaacagcuuuaccagaggcguguacuaccccgacaagguguucagauccagcgugcugcacucuacccaggaccuguuccugccuuucuucagcaacgugaccugguuccacgccauccacguguccggcaccaauggcaccaagagauucgacaaccccgugcugcccuucaacgacgggguguacuuugccagcaccgagaaguccaacaucaucagaggcuggaucuucggcaccacacuggacagcaagacccagagccugcugaucgugaacaacgccaccaacguggucaucaaagugugcgaguuccaguucugcaacgaccccuuccugggcgucuacuaccacaagaacaacaagagcuggauggaaagcgaguuccggguguacagcagcgccaacaacugcaccuucgaguacgugucccagccuuuccugauggaccuggaaggcaagcagggcaacuucaagaaccugcgcgaguucguguuuaagaacaucgacggcuacuucaagaucuacagcaagcacaccccuaucaaccucgugcgggaucugccucagggcuucucugugcuggaaccccugguggaucugcccaucggcaucaacaucacccgguuucagacacugcuggcccugcacagaagcuaccugacaccuggcgauagcagcagcggauggacagcuggugccgccgcuuacuaugugggcuaccugcagccuagaaccuuccugcugaaguacaacgagaacggcaccaucaccgacgccguggauugugcucuggauccucugagcgagacaaagugcacccugaaguccuucaccguggaaaagggcaucuaccagaccagcaacuuccgggugcagcccaccgaauccaucgugcgguuccccaauaucaccaaucugugccccuucggcgagguguucaaugccaccagauucgccucuguguacgccuggaaccggaagcggaucagcaauugcguggccgacuacuccgugcuguacaacuccgccagcuucagcaccuucaagugcuacggcguguccccuaccaagcugaacgaccugugcuucacaaacguguacgccgacagcuucgugauccggggagaugaagugcggcagauugccccuggacagacaggcaagaucgccgacuacaacuacaagcugcccgacgacuucaccggcugugugauugccuggaacagcaacaaccuggacuccaaagucggcggcaacuacaauuaccuguaccggcuguuccggaaguccaaucugaagcccuucgagcgggacaucuccaccgagaucuaucaggccggcagcaccccuuguaacggcguggaaggcuucaacugcuacuucccacugcaguccuacggcuuucagcccacaaauggcgugggcuaucagcccuacagagugguggugcugagcuucgaacugcugcaugccccugccacagugugcggcccuaagaaaagcaccaaucucgugaagaacaaaugcgugaacuucaacuucaacggccugaccggcaccggcgugcugacagagagcaacaagaaguuccugccauuccagcaguuuggccgggauaucgccgauaccacagacgccguuagagauccccagacacuggaaauccuggacaucaccccuugcagcuucggcggagugucugugaucaccccuggcaccaacaccagcaaucagguggcagugcuguaccagggcgugaacuguaccgaagugcccguggccauucacgccgaucagcugacaccuacauggcggguguacuccaccggcagcaauguguuucagaccagagccggcugucugaucggagccgagcacgugaacaauagcuacgagugcgacauccccaucggcgcuggaaucugcgccagcuaccagacacagacaaacagcccucggagagccagaagcguggccagccagagcaucauugccuacacaaugucucugggcgccgagaacagcguggccuacuccaacaacucuaucgcuauccccaccaacuucaccaucagcgugaccacagagauccugccuguguccaugaccaagaccagcguggacugcaccauguacaucugcggcgauuccaccgagugcuccaaccugcugcugcaguacggcagcuucugcacccagcugaauagagcccugacagggaucgccguggaacaggacaagaacacccaagagguguucgcccaagugaagcagaucuacaagaccccuccuaucaaggacuucggcggcuucaauuucagccagauucugcccgauccuagcaagcccagcaagcggagcuucaucgaggaccugcuguucaacaaagugacacuggccgacgccggcuucaucaagcaguauggcgauugucugggcgacauugccgccagggaucugauuugcgcccagaaguuuaacggacugacagugcugccuccucugcugaccgaugagaugaucgcccaguacacaucugcccugcuggccggcacaaucacaagcggcuggacauuuggagcaggcgccgcucugcagauccccuuugcuaugcagauggccuaccgguucaacggcaucggagugacccagaaugugcuguacgagaaccagaagcugaucgccaaccaguucaacagcgccaucggcaagauccaggacagccugagcagcacagcaagcgcccugggaaagcugcaggacguggucaaccagaaugcccaggcacugaacacccuggucaagcagcuguccuccaacuucggcgccaucagcucugugcugaacgauauccugagcagacuggacaaggucgaggccgaggugcagaucgacagacugaucacaggcagacugcagagccuccagacauacgugacccagcagcugaucagagccgccgagauuagagccucugccaaucuggccgccaccaagaugucugagugugugcugggccagagcaagagaguggacuuuugcggcaagggcuaccaccugaugagcuucccucagucugccccucacggcgugguguuucugcacgugacauaugugcccgcucaagagaagaauuucaccaccgcuccagccaucugccacgacggcaaagcccacuuuccuagagaaggcguguucguguccaacggcacccauugguucgugacacagcggaacuucuacgagccccagaucaucaccaccgacaacaccuucgugucuggcaacugcgacgucgugaucggcauugugaacaauaccguguacgacccucugcagcccgagcuggacagcuucaaagaggaacuggacaaguacuuuaagaaccacacaagccccgacguggaccugggcgauaucagcggaaucaaugccagcgucgugaacauccagaaagagaucgaccggcugaacgagguggccaagaaucugaacgagagccugaucgaccugcaagaacuggggaaguacgagcaguacaucaaguggcccugguacaucuggcugggcuuuaucgccggacugauugccaucgugauggucacaaucaugcuguguugcaugaccagcugcuguagcugccugaagggcuguuguagcuguggcagcugcugcaaguucgacgaggacgauucugagcccgugcugaagggcgugaaacugcacuacacaugaggacuagucccuguucccagagcccacuuuuuuuucuuuuuuugaaauaaaauagccugucuuucagaucucaaaggcucuuuucagagccaccaaaaaaaaaaaaaaaaaaaaaaaaaaaaaaaaaaaaaaaaaaaaaaaaaaaaaaaaaaaaaaaaaaaaaaaaaaaaaaaaaaaaaaaaaaaaaaaaaaaaa

SEQ ID NO: 23722 - RNA, 4191 nt, Artificial Sequence
  SARS-CoV-2/Wuhan/WIV05/2019__EPI_ISL_402128 spike protein mRNA gc mod (1-1273)(N439K_D614G)
aggagagggcgcuuggcuugcaaggacccugagcugcggcauugaagcacacccaacccaacucgacugaagucagccucacugaaccggaucugagaaucuucucucucugggcuugccagggcucuccgaaccuagcuagcauccucuucaauuccaacuagaaagcuuaccauguucguguuccuggugcugcugccucugguguccagccagugugugaaccugaccaccagaacacagcugccuccagccuacaccaacagcuuuaccagaggcguguacuaccccgacaagguguucagauccagcgugcugcacucuacccaggaccuguuccugccuuucuucagcaacgugaccugguuccacgccauccacguguccggcaccaauggcaccaagagauucgacaaccccgugcugcccuucaacgacgggguguacuuugccagcaccgagaaguccaacaucaucagaggcuggaucuucggcaccacacuggacagcaagacccagagccugcugaucgugaacaacgccaccaacguggucaucaaagugugcgaguuccaguucugcaacgaccccuuccugggcgucuacuaccacaagaacaacaagagcuggauggaaagcgaguuccggguguacagcagcgccaacaacugcaccuucgaguacgugucccagccuuuccugauggaccuggaaggcaagcagggcaacuucaagaaccugcgcgaguucguguuuaagaacaucgacggcuacuucaagaucuacagcaagcacaccccuaucaaccucgugcgggaucugccucagggcuucucugcucuggaaccccugguggaucugcccaucggcaucaacaucacccgguuucagacacugcuggcccugcacagaagcuaccugacaccuggcgauagcagcagcggauggacagcuggugccgccgcuuacuaugugggcuaccugcagccuagaaccuuccugcugaaguacaacgagaacggcaccaucaccgacgccguggauugugcucuggauccucugagcgagacaaagugcacccugaaguccuucaccguggaaaagggcaucuaccagaccagcaacuuccgggugcagcccaccgaauccaucgugcgguuccccaauaucaccaaucugugccccuucggcgagguguucaaugccaccagauucgccucuguguacgccuggaaccggaagcggaucagcaauugcguggccgacuacuccgugcuguacaacuccgccagcuucagcaccuucaagugcuacggcguguccccuaccaagcugaacgaccugugcuucacaaacguguacgccgacagcuucgugauccggggagaugaagugcggcagauugccccuggacagacaggcaagaucgccgacuacaacuacaagcugcccgacgacuucaccggcugugugauugccuggaacagcaagaaccuggacuccaaagucggcggcaacuacaauuaccuguaccggcuguuccggaaguccaaucugaagcccuucgagcgggacaucuccaccgagaucuaucaggccggcagcaccccuuguaacggcguggaaggcuucaacugcuacuucccacugcaguccuacggcuuucagcccacaaauggcgugggcuaucagcccuacagagugguggugcugagcuucgaacugcugcaugccccugccacagugugcggcccuaagaaaagcaccaaucucgugaagaacaaaugcgugaacuucaacuucaacggccugaccggcaccggcgugcugacagagagcaacaagaaguuccugccauuccagcaguuuggccgggauaucgccgauaccacagacgccguuagagauccccagacacuggaaauccuggacaucaccccuugcagcuucggcggagugucugugaucaccccuggcaccaacaccagcaaucagguggcagugcuguaccagggcgugaacuguaccgaagugcccguggccauucacgccgaucagcugacaccuacauggcggguguacuccaccggcagcaauguguuucagaccagagccggcugucugaucggagccgagcacgugaacaauagcuacgagugcgacauccccaucggcgcuggaaucugcgccagcuaccagacacagacaaacagcccucggagagccagaagcguggccagccagagcaucauugccuacacaaugucucugggcgccgagaacagcguggccuacuccaacaacucuaucgcuauccccaccaacuucaccaucagcgugaccacagagauccugccuguguccaugaccaagaccagcguggacugcaccauguacaucugcggcgauuccaccgagugcuccaaccugcugcugcaguacggcagcuucugcacccagcugaauagagcccugacagggaucgccguggaacaggacaagaacacccaagagguguucgcccaagugaagcagaucuacaagaccccuccuaucaaggacuucggcggcuucaauuucagccagauucugcccgauccuagcaagcccagcaagcggagcuucaucgaggaccugcuguucaacaaagugacacuggccgacgccggcuucaucaagcaguauggcgauugucugggcgacauugccgccagggaucugauuugcgcccagaaguuuaacggacugacagugcugccuccucugcugaccgaugagaugaucgcccaguacacaucugcccugcuggccggcacaaucacaagcggcuggacauuuggagcaggcgccgcucugcagauccccuuugcuaugcagauggccuaccgguucaacggcaucggagugacccagaaugugcuguacgagaaccagaagcugaucgccaaccaguucaacagcgccaucggcaagauccaggacagccugagcagcacagcaagcgcccugggaaagcugcaggacguggucaaccagaaugcccaggcacugaacacccuggucaagcagcuguccuccaacuucggcgccaucagcucugugcugaacgauauccugagcagacuggacaaggucgaggccgaggugcagaucgacagacugaucacaggcagacugcagagccuccagacauacgugacccagcagcugaucagagccgccgagauuagagccucugccaaucuggccgccaccaagaugucugagugugugcugggccagagcaagagaguggacuuuugcggcaagggcuaccaccugaugagcuucccucagucugccccucacggcgugguguuucugcacgugacauaugugcccgcucaagagaagaauuucaccaccgcuccagccaucugccacgacggcaaagcccacuuuccuagagaaggcguguucguguccaacggcacccauugguucgugacacagcggaacuucuacgagccccagaucaucaccaccgacaacaccuucgugucuggcaacugcgacgucgugaucggcauugugaacaauaccguguacgacccucugcagcccgagcuggacagcuucaaagaggaacuggacaaguacuuuaagaaccacacaagccccgacguggaccugggcgauaucagcggaaucaaugccagcgucgugaacauccagaaagagaucgaccggcugaacgagguggccaagaaucugaacgagagccugaucgaccugcaagaacuggggaaguacgagcaguacaucaaguggcccugguacaucuggcugggcuuuaucgccggacugauugccaucgugauggucacaaucaugcuguguugcaugaccagcugcuguagcugccugaagggcuguuguagcuguggcagcugcugcaaguucgacgaggacgauucugagcccgugcugaagggcgugaaacugcacuacacaugaggacuagucccuguucccagagcccacuuuuuuuucuuuuuuugaaauaaaauagccugucuuucagaucucaaaggcucuuuucagagccaccaaaaaaaaaaaaaaaaaaaaaaaaaaaaaaaaaaaaaaaaaaaaaaaaaaaaaaaaaaaaaaaaaaaaaaaaaaaaaaaaaaaaaaaaaaaaaaaaaaaaa

SEQ ID NO: 23723 - RNA, 4191 nt, Artificial Sequence
  SARS-CoV-2/Wuhan/WIV05/2019__EPI_ISL_402128 spike protein mRNA gc mod (1-1273)(S477N_D614G)
aggagagggcgcuuggcuugcaaggacccugagcugcggcauugaagcacacccaacccaacucgacugaagucagccucacugaaccggaucugagaaucuucucucucugggcuugccagggcucuccgaaccuagcuagcauccucuucaauuccaacuagaaagcuuaccauguucguguuccuggugcugcugccucugguguccagccagugugugaaccugaccaccagaacacagcugccuccagccuacaccaacagcuuuaccagaggcguguacuaccccgacaagguguucagauccagcgugcugcacucuacccaggaccuguuccugccuuucuucagcaacgugaccugguuccacgccauccacguguccggcaccaauggcaccaagagauucgacaaccccgugcugcccuucaacgacgggguguacuuugccagcaccgagaaguccaacaucaucagaggcuggaucuucggcaccacacuggacagcaagacccagagccugcugaucgugaacaacgccaccaacguggucaucaaagugugcgaguuccaguucugcaacgaccccuuccugggcgucuacuaccacaagaacaacaagagcuggauggaaagcgaguuccggguguacagcagcgccaacaacugcaccuucgaguacgugucccagccuuuccugauggaccuggaaggcaagcagggcaacuucaagaaccugcgcgaguucguguuuaagaacaucgacggcuacuucaagaucuacagcaagcacaccccuaucaaccucgugcgggaucugccucagggcuucucugcucuggaaccccugguggaucugcccaucggcaucaacaucacccgguuucagacacugcuggcccugcacagaagcuaccugacaccuggcgauagcagcagcggauggacagcuggugccgccgcuuacuaugugggcuaccugcagccuagaaccuuccugcugaaguacaacgagaacggcaccaucaccgacgccguggauugugcucuggauccucugagcgagacaaagugcacccugaaguccuucaccguggaaaagggcaucuaccagaccagcaacuuccgggugcagcccaccgaauccaucgugcgguuccccaauaucaccaaucugugccccuucggcgagguguucaaugccaccagauucgccucuguguacgccuggaaccggaagcggaucagcaauugcguggccgacuacuccgugcuguacaacuccgccagcuucagcaccuucaagugcuacggcguguccccuaccaagcugaacgaccugugcuucacaaacguguacgccgacagcuucgugauccggggagaugaagugcggcagauugccccuggacagacaggcaagaucgccgacuacaacuacaagcugcccgacgacuucaccggcugugugauugccuggaacagcaacaaccuggacuccaaagucggcggcaacuacaauuaccuguaccggcuguuccggaaguccaaucugaagcccuucgagcgggacaucuccaccgagaucuaucaggccggcaacaccccuuguaacggcguggaaggcuucaacugcuacuucccacugcaguccuacggcuuucagcccacaaauggcgugggcuaucagcccuacagagugguggugcugagcuucgaacugcugcaugccccugccacagugugcggcccuaagaaaagcaccaaucucgugaagaacaaaugcgugaacuucaacuucaacggccugaccggcaccggcgugcugacagagagcaacaagaaguuccugccauuccagcaguuuggccgggauaucgccgauaccacagacgccguuagagauccccagacacuggaaauccuggacaucaccccuugcagcuucggcggagugucugugaucaccccuggcaccaacaccagcaaucagguggcagugcuguaccagggcgugaacuguaccgaagugcccguggccauucacgccgaucagcugacaccuacauggcggguguacuccaccggcagcaauguguuucagaccagagccggcugucugaucggagccgagcacgugaacaauagcuacgagugcgacauccccaucggcgcuggaaucugcgccagcuaccagacacagacaaacagcccucggagagccagaagcguggccagccagagcaucauugccuacacaaugucucugggcgccgagaacagcguggccuacuccaacaacucuaucgcuauccccaccaacuucaccaucagcgugaccacagagauccugccuguguccaugaccaagaccagcguggacugcaccauguacaucugcggcgauuccaccgagugcuccaaccugcugcugcaguacggcagcuucugcacccagcugaauagagcccugacagggaucgccguggaacaggacaagaacacccaagagguguucgcccaagugaagcagaucuacaagaccccuccuaucaaggacuucggcggcuucaauuucagccagauucugcccgauccuagcaagcccagcaagcggagcuucaucgaggaccugcuguucaacaaagugacacuggccgacgccggcuucaucaagcaguauggcgauugucugggcgacauugccgccagggaucugauuugcgcccagaaguuuaacggacugacagugcugccuccucugcugaccgaugagaugaucgcccaguacacaucugcccugcuggccggcacaaucacaagcggcuggacauuuggagcaggcgccgcucugcagauccccuuugcuaugcagauggccuaccgguucaacggcaucggagugacccagaaugugcuguacgagaaccagaagcugaucgccaaccaguucaacagcgccaucggcaagauccaggacagccugagcagcacagcaagcgcccugggaaagcugcaggacguggucaaccagaaugcccaggcacugaacacccuggucaagcagcuguccuccaacuucggcgccaucagcucugugcugaacgauauccugagcagacuggacaaggucgaggccgaggugcagaucgacagacugaucacaggcagacugcagagccuccagacauacgugacccagcagcugaucagagccgccgagauuagagccucugccaaucuggccgccaccaagaugucugagugugugcugggccagagcaagagaguggacuuuugcggcaagggcuaccaccugaugagcuucccucagucugccccucacggcgugguguuucugcacgugacauaugugcccgcucaagagaagaauuucaccaccgcuccagccaucugccacgacggcaaagcccacuuuccuagagaaggcguguucguguccaacggcacccauugguucgugacacagcggaacuucuacgagccccagaucaucaccaccgacaacaccuucgugucuggcaacugcgacgucgugaucggcauugugaacaauaccguguacgacccucugcagcccgagcuggacagcuucaaagaggaacuggacaaguacuuuaagaaccacacaagccccgacguggaccugggcgauaucagcggaaucaaugccagcgucgugaacauccagaaagagaucgaccggcugaacgagguggccaagaaucugaacgagagccugaucgaccugcaagaacuggggaaguacgagcaguacaucaaguggcccugguacaucuggcugggcuuuaucgccggacugauugccaucgugauggucacaaucaugcuguguugcaugaccagcugcuguagcugccugaagggcuguuguagcuguggcagcugcugcaaguucgacgaggacgauucugagcccgugcugaagggcgugaaacugcacuacacaugaggacuagucccuguucccagagcccacuuuuuuuucuuuuuuugaaauaaaauagccugucuuucagaucucaaaggcucuuuucagagccaccaaaaaaaaaaaaaaaaaaaaaaaaaaaaaaaaaaaaaaaaaaaaaaaaaaaaaaaaaaaaaaaaaaaaaaaaaaaaaaaaaaaaaaaaaaaaaaaaaaaaa

SEQ ID NO: 23724 - RNA, 4191 nt, Artificial Sequence
  SARS-CoV-2/Wuhan/WIV05/2019__EPI_ISL_402128 spike protein mRNA gc mod (1-1273)(N501Y_D614G)
aggagagggcgcuuggcuugcaaggacccugagcugcggcauugaagcacacccaacccaacucgacugaagucagccucacugaaccggaucugagaaucuucucucucugggcuugccagggcucuccgaaccuagcuagcauccucuucaauuccaacuagaaagcuuaccauguucguguuccuggugcugcugccucugguguccagccagugugugaaccugaccaccagaacacagcugccuccagccuacaccaacagcuuuaccagaggcguguacuaccccgacaagguguucagauccagcgugcugcacucuacccaggaccuguuccugccuuucuucagcaacgugaccugguuccacgccauccacguguccggcaccaauggcaccaagagauucgacaaccccgugcugcccuucaacgacgggguguacuuugccagcaccgagaaguccaacaucaucagaggcuggaucuucggcaccacacuggacagcaagacccagagccugcugaucgugaacaacgccaccaacguggucaucaaagugugcgaguuccaguucugcaacgaccccuuccugggcgucuacuaccacaagaacaacaagagcuggauggaaagcgaguuccggguguacagcagcgccaacaacugcaccuucgaguacgugucccagccuuuccugauggaccuggaaggcaagcagggcaacuucaagaaccugcgcgaguucguguuuaagaacaucgacggcuacuucaagaucuacagcaagcacaccccuaucaaccucgugcgggaucugccucagggcuucucugcucuggaaccccugguggaucugcccaucggcaucaacaucacccgguuucagacacugcuggcccugcacagaagcuaccugacaccuggcgauagcagcagcggauggacagcuggugccgccgcuuacuaugugggcuaccugcagccuagaaccuuccugcugaaguacaacgagaacggcaccaucaccgacgccguggauugugcucuggauccucugagcgagacaaagugcacccugaaguccuucaccguggaaaagggcaucuaccagaccagcaacuuccgggugcagcccaccgaauccaucgugcgguuccccaauaucaccaaucugugccccuucggcgagguguucaaugccaccagauucgccucuguguacgccuggaaccggaagcggaucagcaauugcguggccgacuacuccgugcuguacaacuccgccagcuucagcaccuucaagugcuacggcguguccccuaccaagcugaacgaccugugcuucacaaacguguacgccgacagcuucgugauccggggagaugaagugcggcagauugccccuggacagacaggcaagaucgccgacuacaacuacaagcugcccgacgacuucaccggcugugugauugccuggaacagcaacaaccuggacuccaaagucggcggcaacuacaauuaccuguaccggcuguuccggaaguccaaucugaagcccuucgagcgggacaucuccaccgagaucuaucaggccggcagcaccccuuguaacggcguggaaggcuucaacugcuacuucccacugcaguccuacggcuuucagcccacauacggcgugggcuaucagcccuacagagugguggugcugagcuucgaacugcugcaugccccugccacagugugcggcccuaagaaaagcaccaaucucgugaagaacaaaugcgugaacuucaacuucaacggccugaccggcaccggcgugcugacagagagcaacaagaaguuccugccauuccagcaguuuggccgggauaucgccgauaccacagacgccguuagagauccccagacacuggaaauccuggacaucaccccuugcagcuucggcggagugucugugaucaccccuggcaccaacaccagcaaucagguggcagugcuguaccagggcgugaacuguaccgaagugcccguggccauucacgccgaucagcugacaccuacauggcggguguacuccaccggcagcaauguguuucagaccagagccggcugucugaucggagccgagcacgugaacaauagcuacgagugcgacauccccaucggcgcuggaaucugcgccagcuaccagacacagacaaacagcccucggagagccagaagcguggccagccagagcaucauugccuacacaaugucucugggcgccgagaacagcguggccuacuccaacaacucuaucgcuauccccaccaacuucaccaucagcgugaccacagagauccugccuguguccaugaccaagaccagcguggacugcaccauguacaucugcggcgauuccaccgagugcuccaaccugcugcugcaguacggcagcuucugcacccagcugaauagagcccugacagggaucgccguggaacaggacaagaacacccaagagguguucgcccaagugaagcagaucuacaagaccccuccuaucaaggacuucggcggcuucaauuucagccagauucugcccgauccuagcaagcccagcaagcggagcuucaucgaggaccugcuguucaacaaagugacacuggccgacgccggcuucaucaagcaguauggcgauugucugggcgacauugccgccagggaucugauuugcgcccagaaguuuaacggacugacagugcugccuccucugcugaccgaugagaugaucgcccaguacacaucugcccugcuggccggcacaaucacaagcggcuggacauuuggagcaggcgccgcucugcagauccccuuugcuaugcagauggccuaccgguucaacggcaucggagugacccagaaugugcuguacgagaaccagaagcugaucgccaaccaguucaacagcgccaucggcaagauccaggacagccugagcagcacagcaagcgcccugggaaagcugcaggacguggucaaccagaaugcccaggcacugaacacccuggucaagcagcuguccuccaacuucggcgccaucagcucugugcugaacgauauccugagcagacuggacaaggucgaggccgaggugcagaucgacagacugaucacaggcagacugcagagccuccagacauacgugacccagcagcugaucagagccgccgagauuagagccucugccaaucuggccgccaccaagaugucugagugugugcugggccagagcaagagaguggacuuuugcggcaagggcuaccaccugaugagcuucccucagucugccccucacggcgugguguuucugcacgugacauaugugcccgcucaagagaagaauuucaccaccgcuccagccaucugccacgacggcaaagcccacuuuccuagagaaggcguguucguguccaacggcacccauugguucgugacacagcggaacuucuacgagccccagaucaucaccaccgacaacaccuucgugucuggcaacugcgacgucgugaucggcauugugaacaauaccguguacgacccucugcagcccgagcuggacagcuucaaagaggaacuggacaaguacuuuaagaaccacacaagccccgacguggaccugggcgauaucagcggaaucaaugccagcgucgugaacauccagaaagagaucgaccggcugaacgagguggccaagaaucugaacgagagccugaucgaccugcaagaacuggggaaguacgagcaguacaucaaguggcccugguacaucuggcugggcuuuaucgccggacugauugccaucgugauggucacaaucaugcuguguugcaugaccagcugcuguagcugccugaagggcuguuguagcuguggcagcugcugcaaguucgacgaggacgauucugagcccgugcugaagggcgugaaacugcacuacacaugaggacuagucccuguucccagagcccacuuuuuuuucuuuuuuugaaauaaaauagccugucuuucagaucucaaaggcucuuuucagagccaccaaaaaaaaaaaaaaaaaaaaaaaaaaaaaaaaaaaaaaaaaaaaaaaaaaaaaaaaaaaaaaaaaaaaaaaaaaaaaaaaaaaaaaaaaaaaaaaaaaaaa

SEQ ID NO: 23725 - RNA, 4185 nt, Artificial Sequence
  SARS-CoV-2/Wuhan/WIV05/2019__EPI_ISL_402128 spike protein mRNA gc mod (1-1273)(H69del_V70del_D614G)
aggagagggcgcuuggcuugcaaggacccugagcugcggcauugaagcacacccaacccaacucgacugaagucagccucacugaaccggaucugagaaucuucucucucugggcuugccagggcucuccgaaccuagcuagcauccucuucaauuccaacuagaaagcuuaccauguucguguuccuggugcugcugccucugguguccagccagugugugaaccugaccaccagaacacagcugccuccagccuacaccaacagcuuuaccagaggcguguacuaccccgacaagguguucagauccagcgugcugcacucuacccaggaccuguuccugccuuucuucagcaacgugaccugguuccacgccaucuccggcaccaauggcaccaagagauucgacaaccccgugcugcccuucaacgacgggguguacuuugccagcaccgagaaguccaacaucaucagaggcuggaucuucggcaccacacuggacagcaagacccagagccugcugaucgugaacaacgccaccaacguggucaucaaagugugcgaguuccaguucugcaacgaccccuuccugggcgucuacuaccacaagaacaacaagagcuggauggaaagcgaguuccggguguacagcagcgccaacaacugcaccuucgaguacgugucccagccuuuccugauggaccuggaaggcaagcagggcaacuucaagaaccugcgcgaguucguguuuaagaacaucgacggcuacuucaagaucuacagcaagcacaccccuaucaaccucgugcgggaucugccucagggcuucucugcucuggaaccccugguggaucugcccaucggcaucaacaucacccgguuucagacacugcuggcccugcacagaagcuaccugacaccuggcgauagcagcagcggauggacagcuggugccgccgcuuacuaugugggcuaccugcagccuagaaccuuccugcugaaguacaacgagaacggcaccaucaccgacgccguggauugugcucuggauccucugagcgagacaaagugcacccugaaguccuucaccguggaaaagggcaucuaccagaccagcaacuuccgggugcagcccaccgaauccaucgugcgguuccccaauaucaccaaucugugccccuucggcgagguguucaaugccaccagauucgccucuguguacgccuggaaccggaagcggaucagcaauugcguggccgacuacuccgugcuguacaacuccgccagcuucagcaccuucaagugcuacggcguguccccuaccaagcugaacgaccugugcuucacaaacguguacgccgacagcuucgugauccggggagaugaagugcggcagauugccccuggacagacaggcaagaucgccgacuacaacuacaagcugcccgacgacuucaccggcugugugauugccuggaacagcaacaaccuggacuccaaagucggcggcaacuacaauuaccuguaccggcuguuccggaaguccaaucugaagcccuucgagcgggacaucuccaccgagaucuaucaggccggcagcaccccuuguaacggcguggaaggcuucaacugcuacuucccacugcaguccuacggcuuucagcccacaaauggcgugggcuaucagcccuacagagugguggugcugagcuucgaacugcugcaugccccugccacagugugcggcccuaagaaaagcaccaaucucgugaagaacaaaugcgugaacuucaacuucaacggccugaccggcaccggcgugcugacagagagcaacaagaaguuccugccauuccagcaguuuggccgggauaucgccgauaccacagacgccguuagagauccccagacacuggaaauccuggacaucaccccuugcagcuucggcggagugucugugaucaccccuggcaccaacaccagcaaucagguggcagugcuguaccagggcgugaacuguaccgaagugcccguggccauucacgccgaucagcugacaccuacauggcggguguacuccaccggcagcaauguguuucagaccagagccggcugucugaucggagccgagcacgugaacaauagcuacgagugcgacauccccaucggcgcuggaaucugcgccagcuaccagacacagacaaacagcccucggagagccagaagcguggccagccagagcaucauugccuacacaaugucucugggcgccgagaacagcguggccuacuccaacaacucuaucgcuauccccaccaacuucaccaucagcgugaccacagagauccugccuguguccaugaccaagaccagcguggacugcaccauguacaucugcggcgauuccaccgagugcuccaaccugcugcugcaguacggcagcuucugcacccagcugaauagagcccugacagggaucgccguggaacaggacaagaacacccaagagguguucgcccaagugaagcagaucuacaagaccccuccuaucaaggacuucggcggcuucaauuucagccagauucugcccgauccuagcaagcccagcaagcggagcuucaucgaggaccugcuguucaacaaagugacacuggccgacgccggcuucaucaagcaguauggcgauugucugggcgacauugccgccagggaucugauuugcgcccagaaguuuaacggacugacagugcugccuccucugcugaccgaugagaugaucgcccaguacacaucugcccugcuggccggcacaaucacaagcggcuggacauuuggagcaggcgccgcucugcagauccccuuugcuaugcagauggccuaccgguucaacggcaucggagugacccagaaugugcuguacgagaaccagaagcugaucgccaaccaguucaacagcgccaucggcaagauccaggacagccugagcagcacagcaagcgcccugggaaagcugcaggacguggucaaccagaaugcccaggcacugaacacccuggucaagcagcuguccuccaacuucggcgccaucagcucugugcugaacgauauccugagcagacuggacaaggucgaggccgaggugcagaucgacagacugaucacaggcagacugcagagccuccagacauacgugacccagcagcugaucagagccgccgagauuagagccucugccaaucuggccgccaccaagaugucugagugugugcugggccagagcaagagaguggacuuuugcggcaagggcuaccaccugaugagcuucccucagucugccccucacggcgugguguuucugcacgugacauaugugcccgcucaagagaagaauuucaccaccgcuccagccaucugccacgacggcaaagcccacuuuccuagagaaggcguguucguguccaacggcacccauugguucgugacacagcggaacuucuacgagccccagaucaucaccaccgacaacaccuucgugucuggcaacugcgacgucgugaucggcauugugaacaauaccguguacgacccucugcagcccgagcuggacagcuucaaagaggaacuggacaaguacuuuaagaaccacacaagccccgacguggaccugggcgauaucagcggaaucaaugccagcgucgugaacauccagaaagagaucgaccggcugaacgagguggccaagaaucugaacgagagccugaucgaccugcaagaacuggggaaguacgagcaguacaucaaguggcccugguacaucuggcugggcuuuaucgccggacugauugccaucgugauggucacaaucaugcuguguugcaugaccagcugcuguagcugccugaagggcuguuguagcuguggcagcugcugcaaguucgacgaggacgauucugagcccgugcugaagggcgugaaacugcacuacacaugaggacuagucccuguucccagagcccacuuuuuuuucuuuuuuugaaauaaaauagccugucuuucagaucucaaaggcucuuuucagagccaccaaaaaaaaaaaaaaaaaaaaaaaaaaaaaaaaaaaaaaaaaaaaaaaaaaaaaaaaaaaaaaaaaaaaaaaaaaaaaaaaaaaaaaaaaaaaaaaaaaaaa

SEQ ID NO: 23726 - RNA, 4191 nt, Artificial Sequence
  SARS-CoV-2/Wuhan/WIV05/2019__EPI_ISL_402128 spike protein mRNA gc mod (1-1273)(Y453F_D614G)
aggagagggcgcuuggcuugcaaggacccugagcugcggcauugaagcacacccaacccaacucgacugaagucagccucacugaaccggaucugagaaucuucucucucugggcuugccagggcucuccgaaccuagcuagcauccucuucaauuccaacuagaaagcuuaccauguucguguuccuggugcugcugccucugguguccagccagugugugaaccugaccaccagaacacagcugccuccagccuacaccaacagcuuuaccagaggcguguacuaccccgacaagguguucagauccagcgugcugcacucuacccaggaccuguuccugccuuucuucagcaacgugaccugguuccacgccauccacguguccggcaccaauggcaccaagagauucgacaaccccgugcugcccuucaacgacgggguguacuuugccagcaccgagaaguccaacaucaucagaggcuggaucuucggcaccacacuggacagcaagacccagagccugcugaucgugaacaacgccaccaacguggucaucaaagugugcgaguuccaguucugcaacgaccccuuccugggcgucuacuaccacaagaacaacaagagcuggauggaaagcgaguuccggguguacagcagcgccaacaacugcaccuucgaguacgugucccagccuuuccugauggaccuggaaggcaagcagggcaacuucaagaaccugcgcgaguucguguuuaagaacaucgacggcuacuucaagaucuacagcaagcacaccccuaucaaccucgugcgggaucugccucagggcuucucugcucuggaaccccugguggaucugcccaucggcaucaacaucacccgguuucagacacugcuggcccugcacagaagcuaccugacaccuggcgauagcagcagcggauggacagcuggugccgccgcuuacuaugugggcuaccugcagccuagaaccuuccugcugaaguacaacgagaacggcaccaucaccgacgccguggauugugcucuggauccucugagcgagacaaagugcacccugaaguccuucaccguggaaaagggcaucuaccagaccagcaacuuccgggugcagcccaccgaauccaucgugcgguuccccaauaucaccaaucugugccccuucggcgagguguucaaugccaccagauucgccucuguguacgccuggaaccggaagcggaucagcaauugcguggccgacuacuccgugcuguacaacuccgccagcuucagcaccuucaagugcuacggcguguccccuaccaagcugaacgaccugugcuucacaaacguguacgccgacagcuucgugauccggggagaugaagugcggcagauugccccuggacagacaggcaagaucgccgacuacaacuacaagcugcccgacgacuucaccggcugugugauugccuggaacagcaacaaccuggacuccaaagucggcggcaacuacaauuaccuguuccggcuguuccggaaguccaaucugaagcccuucgagcgggacaucuccaccgagaucuaucaggccggcagcaccccuuguaacggcguggaaggcuucaacugcuacuucccacugcaguccuacggcuuucagcccacaaauggcgugggcuaucagcccuacagagugguggugcugagcuucgaacugcugcaugccccugccacagugugcggcccuaagaaaagcaccaaucucgugaagaacaaaugcgugaacuucaacuucaacggccugaccggcaccggcgugcugacagagagcaacaagaaguuccugccauuccagcaguuuggccgggauaucgccgauaccacagacgccguuagagauccccagacacuggaaauccuggacaucaccccuugcagcuucggcggagugucugugaucaccccuggcaccaacaccagcaaucagguggcagugcuguaccagggcgugaacuguaccgaagugcccguggccauucacgccgaucagcugacaccuacauggcggguguacuccaccggcagcaauguguuucagaccagagccggcugucugaucggagccgagcacgugaacaauagcuacgagugcgacauccccaucggcgcuggaaucugcgccagcuaccagacacagacaaacagcccucggagagccagaagcguggccagccagagcaucauugccuacacaaugucucugggcgccgagaacagcguggccuacuccaacaacucuaucgcuauccccaccaacuucaccaucagcgugaccacagagauccugccuguguccaugaccaagaccagcguggacugcaccauguacaucugcggcgauuccaccgagugcuccaaccugcugcugcaguacggcagcuucugcacccagcugaauagagcccugacagggaucgccguggaacaggacaagaacacccaagagguguucgcccaagugaagcagaucuacaagaccccuccuaucaaggacuucggcggcuucaauuucagccagauucugcccgauccuagcaagcccagcaagcggagcuucaucgaggaccugcuguucaacaaagugacacuggccgacgccggcuucaucaagcaguauggcgauugucugggcgacauugccgccagggaucugauuugcgcccagaaguuuaacggacugacagugcugccuccucugcugaccgaugagaugaucgcccaguacacaucugcccugcuggccggcacaaucacaagcggcuggacauuuggagcaggcgccgcucugcagauccccuuugcuaugcagauggccuaccgguucaacggcaucggagugacccagaaugugcuguacgagaaccagaagcugaucgccaaccaguucaacagcgccaucggcaagauccaggacagccugagcagcacagcaagcgcccugggaaagcugcaggacguggucaaccagaaugcccaggcacugaacacccuggucaagcagcuguccuccaacuucggcgccaucagcucugugcugaacgauauccugagcagacuggacaaggucgaggccgaggugcagaucgacagacugaucacaggcagacugcagagccuccagacauacgugacccagcagcugaucagagccgccgagauuagagccucugccaaucuggccgccaccaagaugucugagugugugcugggccagagcaagagaguggacuuuugcggcaagggcuaccaccugaugagcuucccucagucugccccucacggcgugguguuucugcacgugacauaugugcccgcucaagagaagaauuucaccaccgcuccagccaucugccacgacggcaaagcccacuuuccuagagaaggcguguucguguccaacggcacccauugguucgugacacagcggaacuucuacgagccccagaucaucaccaccgacaacaccuucgugucuggcaacugcgacgucgugaucggcauugugaacaauaccguguacgacccucugcagcccgagcuggacagcuucaaagaggaacuggacaaguacuuuaagaaccacacaagccccgacguggaccugggcgauaucagcggaaucaaugccagcgucgugaacauccagaaagagaucgaccggcugaacgagguggccaagaaucugaacgagagccugaucgaccugcaagaacuggggaaguacgagcaguacaucaaguggcccugguacaucuggcugggcuuuaucgccggacugauugccaucgugauggucacaaucaugcuguguugcaugaccagcugcuguagcugccugaagggcuguuguagcuguggcagcugcugcaaguucgacgaggacgauucugagcccgugcugaagggcgugaaacugcacuacacaugaggacuagucccuguucccagagcccacuuuuuuuucuuuuuuugaaauaaaauagccugucuuucagaucucaaaggcucuuuucagagccaccaaaaaaaaaaaaaaaaaaaaaaaaaaaaaaaaaaaaaaaaaaaaaaaaaaaaaaaaaaaaaaaaaaaaaaaaaaaaaaaaaaaaaaaaaaaaaaaaaaaaa

SEQ ID NO: 23727 - RNA, 4191 nt, Artificial Sequence
  SARS-CoV-2/Wuhan/WIV05/2019__EPI_ISL_402128 spike protein mRNA gc mod (1-1273)(D614G_I692V)
aggagagggcgcuuggcuugcaaggacccugagcugcggcauugaagcacacccaacccaacucgacugaagucagccucacugaaccggaucugagaaucuucucucucugggcuugccagggcucuccgaaccuagcuagcauccucuucaauuccaacuagaaagcuuaccauguucguguuccuggugcugcugccucugguguccagccagugugugaaccugaccaccagaacacagcugccuccagccuacaccaacagcuuuaccagaggcguguacuaccccgacaagguguucagauccagcgugcugcacucuacccaggaccuguuccugccuuucuucagcaacgugaccugguuccacgccauccacguguccggcaccaauggcaccaagagauucgacaaccccgugcugcccuucaacgacgggguguacuuugccagcaccgagaaguccaacaucaucagaggcuggaucuucggcaccacacuggacagcaagacccagagccugcugaucgugaacaacgccaccaacguggucaucaaagugugcgaguuccaguucugcaacgaccccuuccugggcgucuacuaccacaagaacaacaagagcuggauggaaagcgaguuccggguguacagcagcgccaacaacugcaccuucgaguacgugucccagccuuuccugauggaccuggaaggcaagcagggcaacuucaagaaccugcgcgaguucguguuuaagaacaucgacggcuacuucaagaucuacagcaagcacaccccuaucaaccucgugcgggaucugccucagggcuucucugcucuggaaccccugguggaucugcccaucggcaucaacaucacccgguuucagacacugcuggcccugcacagaagcuaccugacaccuggcgauagcagcagcggauggacagcuggugccgccgcuuacuaugugggcuaccugcagccuagaaccuuccugcugaaguacaacgagaacggcaccaucaccgacgccguggauugugcucuggauccucugagcgagacaaagugcacccugaaguccuucaccguggaaaagggcaucuaccagaccagcaacuuccgggugcagcccaccgaauccaucgugcgguuccccaauaucaccaaucugugccccuucggcgagguguucaaugccaccagauucgccucuguguacgccuggaaccggaagcggaucagcaauugcguggccgacuacuccgugcuguacaacuccgccagcuucagcaccuucaagugcuacggcguguccccuaccaagcugaacgaccugugcuucacaaacguguacgccgacagcuucgugauccggggagaugaagugcggcagauugccccuggacagacaggcaagaucgccgacuacaacuacaagcugcccgacgacuucaccggcugugugauugccuggaacagcaacaaccuggacuccaaagucggcggcaacuacaauuaccuguaccggcuguuccggaaguccaaucugaagcccuucgagcgggacaucuccaccgagaucuaucaggccggcagcaccccuuguaacggcguggaaggcuucaacugcuacuucccacugcaguccuacggcuuucagcccacaaauggcgugggcuaucagcccuacagagugguggugcugagcuucgaacugcugcaugccccugccacagugugcggcccuaagaaaagcaccaaucucgugaagaacaaaugcgugaacuucaacuucaacggccugaccggcaccggcgugcugacagagagcaacaagaaguuccugccauuccagcaguuuggccgggauaucgccgauaccacagacgccguuagagauccccagacacuggaaauccuggacaucaccccuugcagcuucggcggagugucugugaucaccccuggcaccaacaccagcaaucagguggcagugcuguaccagggcgugaacuguaccgaagugcccguggccauucacgccgaucagcugacaccuacauggcggguguacuccaccggcagcaauguguuucagaccagagccggcugucugaucggagccgagcacgugaacaauagcuacgagugcgacauccccaucggcgcuggaaucugcgccagcuaccagacacagacaaacagcccucggagagccagaagcguggccagccagagcgugauugccuacacaaugucucugggcgccgagaacagcguggccuacuccaacaacucuaucgcuauccccaccaacuucaccaucagcgugaccacagagauccugccuguguccaugaccaagaccagcguggacugcaccauguacaucugcggcgauuccaccgagugcuccaaccugcugcugcaguacggcagcuucugcacccagcugaauagagcccugacagggaucgccguggaacaggacaagaacacccaagagguguucgcccaagugaagcagaucuacaagaccccuccuaucaaggacuucggcggcuucaauuucagccagauucugcccgauccuagcaagcccagcaagcggagcuucaucgaggaccugcuguucaacaaagugacacuggccgacgccggcuucaucaagcaguauggcgauugucugggcgacauugccgccagggaucugauuugcgcccagaaguuuaacggacugacagugcugccuccucugcugaccgaugagaugaucgcccaguacacaucugcccugcuggccggcacaaucacaagcggcuggacauuuggagcaggcgccgcucugcagauccccuuugcuaugcagauggccuaccgguucaacggcaucggagugacccagaaugugcuguacgagaaccagaagcugaucgccaaccaguucaacagcgccaucggcaagauccaggacagccugagcagcacagcaagcgcccugggaaagcugcaggacguggucaaccagaaugcccaggcacugaacacccuggucaagcagcuguccuccaacuucggcgccaucagcucugugcugaacgauauccugagcagacuggacaaggucgaggccgaggugcagaucgacagacugaucacaggcagacugcagagccuccagacauacgugacccagcagcugaucagagccgccgagauuagagccucugccaaucuggccgccaccaagaugucugagugugugcugggccagagcaagagaguggacuuuugcggcaagggcuaccaccugaugagcuucccucagucugccccucacggcgugguguuucugcacgugacauaugugcccgcucaagagaagaauuucaccaccgcuccagccaucugccacgacggcaaagcccacuuuccuagagaaggcguguucguguccaacggcacccauugguucgugacacagcggaacuucuacgagccccagaucaucaccaccgacaacaccuucgugucuggcaacugcgacgucgugaucggcauugugaacaauaccguguacgacccucugcagcccgagcuggacagcuucaaagaggaacuggacaaguacuuuaagaaccacacaagccccgacguggaccugggcgauaucagcggaaucaaugccagcgucgugaacauccagaaagagaucgaccggcugaacgagguggccaagaaucugaacgagagccugaucgaccugcaagaacuggggaaguacgagcaguacaucaaguggcccugguacaucuggcugggcuuuaucgccggacugauugccaucgugauggucacaaucaugcuguguugcaugaccagcugcuguagcugccugaagggcuguuguagcuguggcagcugcugcaaguucgacgaggacgauucugagcccgugcugaagggcgugaaacugcacuacacaugaggacuagucccuguucccagagcccacuuuuuuuucuuuuuuugaaauaaaauagccugucuuucagaucucaaaggcucuuuucagagccaccaaaaaaaaaaaaaaaaaaaaaaaaaaaaaaaaaaaaaaaaaaaaaaaaaaaaaaaaaaaaaaaaaaaaaaaaaaaaaaaaaaaaaaaaaaaaaaaaaaaaa

SEQ ID NO: 23728 - RNA, 4191 nt, Artificial Sequence
  SARS-CoV-2/Wuhan/WIV05/2019__EPI_ISL_402128 spike protein mRNA gc mod (1-1273)(D614G_M1229I)
aggagagggcgcuuggcuugcaaggacccugagcugcggcauugaagcacacccaacccaacucgacugaagucagccucacugaaccggaucugagaaucuucucucucugggcuugccagggcucuccgaaccuagcuagcauccucuucaauuccaacuagaaagcuuaccauguucguguuccuggugcugcugccucugguguccagccagugugugaaccugaccaccagaacacagcugccuccagccuacaccaacagcuuuaccagaggcguguacuaccccgacaagguguucagauccagcgugcugcacucuacccaggaccuguuccugccuuucuucagcaacgugaccugguuccacgccauccacguguccggcaccaauggcaccaagagauucgacaaccccgugcugcccuucaacgacgggguguacuuugccagcaccgagaaguccaacaucaucagaggcuggaucuucggcaccacacuggacagcaagacccagagccugcugaucgugaacaacgccaccaacguggucaucaaagugugcgaguuccaguucugcaacgaccccuuccugggcgucuacuaccacaagaacaacaagagcuggauggaaagcgaguuccggguguacagcagcgccaacaacugcaccuucgaguacgugucccagccuuuccugauggaccuggaaggcaagcagggcaacuucaagaaccugcgcgaguucguguuuaagaacaucgacggcuacuucaagaucuacagcaagcacaccccuaucaaccucgugcgggaucugccucagggcuucucugcucuggaaccccugguggaucugcccaucggcaucaacaucacccgguuucagacacugcuggcccugcacagaagcuaccugacaccuggcgauagcagcagcggauggacagcuggugccgccgcuuacuaugugggcuaccugcagccuagaaccuuccugcugaaguacaacgagaacggcaccaucaccgacgccguggauugugcucuggauccucugagcgagacaaagugcacccugaaguccuucaccguggaaaagggcaucuaccagaccagcaacuuccgggugcagcccaccgaauccaucgugcgguuccccaauaucaccaaucugugccccuucggcgagguguucaaugccaccagauucgccucuguguacgccuggaaccggaagcggaucagcaauugcguggccgacuacuccgugcuguacaacuccgccagcuucagcaccuucaagugcuacggcguguccccuaccaagcugaacgaccugugcuucacaaacguguacgccgacagcuucgugauccggggagaugaagugcggcagauugccccuggacagacaggcaagaucgccgacuacaacuacaagcugcccgacgacuucaccggcugugugauugccuggaacagcaacaaccuggacuccaaagucggcggcaacuacaauuaccuguaccggcuguuccggaaguccaaucugaagcccuucgagcgggacaucuccaccgagaucuaucaggccggcagcaccccuuguaacggcguggaaggcuucaacugcuacuucccacugcaguccuacggcuuucagcccacaaauggcgugggcuaucagcccuacagagugguggugcugagcuucgaacugcugcaugccccugccacagugugcggcccuaagaaaagcaccaaucucgugaagaacaaaugcgugaacuucaacuucaacggccugaccggcaccggcgugcugacagagagcaacaagaaguuccugccauuccagcaguuuggccgggauaucgccgauaccacagacgccguuagagauccccagacacuggaaauccuggacaucaccccuugcagcuucggcggagugucugugaucaccccuggcaccaacaccagcaaucagguggcagugcuguaccagggcgugaacuguaccgaagugcccguggccauucacgccgaucagcugacaccuacauggcggguguacuccaccggcagcaauguguuucagaccagagccggcugucugaucggagccgagcacgugaacaauagcuacgagugcgacauccccaucggcgcuggaaucugcgccagcuaccagacacagacaaacagcccucggagagccagaagcguggccagccagagcaucauugccuacacaaugucucugggcgccgagaacagcguggccuacuccaacaacucuaucgcuauccccaccaacuucaccaucagcgugaccacagagauccugccuguguccaugaccaagaccagcguggacugcaccauguacaucugcggcgauuccaccgagugcuccaaccugcugcugcaguacggcagcuucugcacccagcugaauagagcccugacagggaucgccguggaacaggacaagaacacccaagagguguucgcccaagugaagcagaucuacaagaccccuccuaucaaggacuucggcggcuucaauuucagccagauucugcccgauccuagcaagcccagcaagcggagcuucaucgaggaccugcuguucaacaaagugacacuggccgacgccggcuucaucaagcaguauggcgauugucugggcgacauugccgccagggaucugauuugcgcccagaaguuuaacggacugacagugcugccuccucugcugaccgaugagaugaucgcccaguacacaucugcccugcuggccggcacaaucacaagcggcuggacauuuggagcaggcgccgcucugcagauccccuuugcuaugcagauggccuaccgguucaacggcaucggagugacccagaaugugcuguacgagaaccagaagcugaucgccaaccaguucaacagcgccaucggcaagauccaggacagccugagcagcacagcaagcgcccugggaaagcugcaggacguggucaaccagaaugcccaggcacugaacacccuggucaagcagcuguccuccaacuucggcgccaucagcucugugcugaacgauauccugagcagacuggacaaggucgaggccgaggugcagaucgacagacugaucacaggcagacugcagagccuccagacauacgugacccagcagcugaucagagccgccgagauuagagccucugccaaucuggccgccaccaagaugucugagugugugcugggccagagcaagagaguggacuuuugcggcaagggcuaccaccugaugagcuucccucagucugccccucacggcgugguguuucugcacgugacauaugugcccgcucaagagaagaauuucaccaccgcuccagccaucugccacgacggcaaagcccacuuuccuagagaaggcguguucguguccaacggcacccauugguucgugacacagcggaacuucuacgagccccagaucaucaccaccgacaacaccuucgugucuggcaacugcgacgucgugaucggcauugugaacaauaccguguacgacccucugcagcccgagcuggacagcuucaaagaggaacuggacaaguacuuuaagaaccacacaagccccgacguggaccugggcgauaucagcggaaucaaugccagcgucgugaacauccagaaagagaucgaccggcugaacgagguggccaagaaucugaacgagagccugaucgaccugcaagaacuggggaaguacgagcaguacaucaaguggcccugguacaucuggcugggcuuuaucgccggacugauugccaucgugaucgucacaaucaugcuguguugcaugaccagcugcuguagcugccugaagggcuguuguagcuguggcagcugcugcaaguucgacgaggacgauucugagcccgugcugaagggcgugaaacugcacuacacaugaggacuagucccuguucccagagcccacuuuuuuuucuuuuuuugaaauaaaauagccugucuuucagaucucaaaggcucuuuucagagccaccaaaaaaaaaaaaaaaaaaaaaaaaaaaaaaaaaaaaaaaaaaaaaaaaaaaaaaaaaaaaaaaaaaaaaaaaaaaaaaaaaaaaaaaaaaaaaaaaaaaaa

SEQ ID NO: 23729 - RNA, 4185 nt, Artificial Sequence
  SARS-CoV-2/Wuhan/WIV05/2019__EPI_ISL_402128 spike protein mRNA gc mod (1-1273)(H69del_V70del_A222V_Y453F_S477N_D614G_I692V)
aggagagggcgcuuggcuugcaaggacccugagcugcggcauugaagcacacccaacccaacucgacugaagucagccucacugaaccggaucugagaaucuucucucucugggcuugccagggcucuccgaaccuagcuagcauccucuucaauuccaacuagaaagcuuaccauguucguguuccuggugcugcugccucugguguccagccagugugugaaccugaccaccagaacacagcugccuccagccuacaccaacagcuuuaccagaggcguguacuaccccgacaagguguucagauccagcgugcugcacucuacccaggaccuguuccugccuuucuucagcaacgugaccugguuccacgccaucuccggcaccaauggcaccaagagauucgacaaccccgugcugcccuucaacgacgggguguacuuugccagcaccgagaaguccaacaucaucagaggcuggaucuucggcaccacacuggacagcaagacccagagccugcugaucgugaacaacgccaccaacguggucaucaaagugugcgaguuccaguucugcaacgaccccuuccugggcgucuacuaccacaagaacaacaagagcuggauggaaagcgaguuccggguguacagcagcgccaacaacugcaccuucgaguacgugucccagccuuuccugauggaccuggaaggcaagcagggcaacuucaagaaccugcgcgaguucguguuuaagaacaucgacggcuacuucaagaucuacagcaagcacaccccuaucaaccucgugcgggaucugccucagggcuucucugugcuggaaccccugguggaucugcccaucggcaucaacaucacccgguuucagacacugcuggcccugcacagaagcuaccugacaccuggcgauagcagcagcggauggacagcuggugccgccgcuuacuaugugggcuaccugcagccuagaaccuuccugcugaaguacaacgagaacggcaccaucaccgacgccguggauugugcucuggauccucugagcgagacaaagugcacccugaaguccuucaccguggaaaagggcaucuaccagaccagcaacuuccgggugcagcccaccgaauccaucgugcgguuccccaauaucaccaaucugugccccuucggcgagguguucaaugccaccagauucgccucuguguacgccuggaaccggaagcggaucagcaauugcguggccgacuacuccgugcuguacaacuccgccagcuucagcaccuucaagugcuacggcguguccccuaccaagcugaacgaccugugcuucacaaacguguacgccgacagcuucgugauccggggagaugaagugcggcagauugccccuggacagacaggcaagaucgccgacuacaacuacaagcugcccgacgacuucaccggcugugugauugccuggaacagcaacaaccuggacuccaaagucggcggcaacuacaauuaccuguuccggcuguuccggaaguccaaucugaagcccuucgagcgggacaucuccaccgagaucuaucaggccggcaacaccccuuguaacggcguggaaggcuucaacugcuacuucccacugcaguccuacggcuuucagcccacaaauggcgugggcuaucagcccuacagagugguggugcugagcuucgaacugcugcaugccccugccacagugugcggcccuaagaaaagcaccaaucucgugaagaacaaaugcgugaacuucaacuucaacggccugaccggcaccggcgugcugacagagagcaacaagaaguuccugccauuccagcaguuuggccgggauaucgccgauaccacagacgccguuagagauccccagacacuggaaauccuggacaucaccccuugcagcuucggcggagugucugugaucaccccuggcaccaacaccagcaaucagguggcagugcuguaccagggcgugaacuguaccgaagugcccguggccauucacgccgaucagcugacaccuacauggcggguguacuccaccggcagcaauguguuucagaccagagccggcugucugaucggagccgagcacgugaacaauagcuacgagugcgacauccccaucggcgcuggaaucugcgccagcuaccagacacagacaaacagcccucggagagccagaagcguggccagccagagcgugauugccuacacaaugucucugggcgccgagaacagcguggccuacuccaacaacucuaucgcuauccccaccaacuucaccaucagcgugaccacagagauccugccuguguccaugaccaagaccagcguggacugcaccauguacaucugcggcgauuccaccgagugcuccaaccugcugcugcaguacggcagcuucugcacccagcugaauagagcccugacagggaucgccguggaacaggacaagaacacccaagagguguucgcccaagugaagcagaucuacaagaccccuccuaucaaggacuucggcggcuucaauuucagccagauucugcccgauccuagcaagcccagcaagcggagcuucaucgaggaccugcuguucaacaaagugacacuggccgacgccggcuucaucaagcaguauggcgauugucugggcgacauugccgccagggaucugauuugcgcccagaaguuuaacggacugacagugcugccuccucugcugaccgaugagaugaucgcccaguacacaucugcccugcuggccggcacaaucacaagcggcuggacauuuggagcaggcgccgcucugcagauccccuuugcuaugcagauggccuaccgguucaacggcaucggagugacccagaaugugcuguacgagaaccagaagcugaucgccaaccaguucaacagcgccaucggcaagauccaggacagccugagcagcacagcaagcgcccugggaaagcugcaggacguggucaaccagaaugcccaggcacugaacacccuggucaagcagcuguccuccaacuucggcgccaucagcucugugcugaacgauauccugagcagacuggacaaggucgaggccgaggugcagaucgacagacugaucacaggcagacugcagagccuccagacauacgugacccagcagcugaucagagccgccgagauuagagccucugccaaucuggccgccaccaagaugucugagugugugcugggccagagcaagagaguggacuuuugcggcaagggcuaccaccugaugagcuucccucagucugccccucacggcgugguguuucugcacgugacauaugugcccgcucaagagaagaauuucaccaccgcuccagccaucugccacgacggcaaagcccacuuuccuagagaaggcguguucguguccaacggcacccauugguucgugacacagcggaacuucuacgagccccagaucaucaccaccgacaacaccuucgugucuggcaacugcgacgucgugaucggcauugugaacaauaccguguacgacccucugcagcccgagcuggacagcuucaaagaggaacuggacaaguacuuuaagaaccacacaagccccgacguggaccugggcgauaucagcggaaucaaugccagcgucgugaacauccagaaagagaucgaccggcugaacgagguggccaagaaucugaacgagagccugaucgaccugcaagaacuggggaaguacgagcaguacaucaaguggcccugguacaucuggcugggcuuuaucgccggacugauugccaucgugauggucacaaucaugcuguguugcaugaccagcugcuguagcugccugaagggcuguuguagcuguggcagcugcugcaaguucgacgaggacgauucugagcccgugcugaagggcgugaaacugcacuacacaugaggacuagucccuguucccagagcccacuuuuuuuucuuuuuuugaaauaaaauagccugucuuucagaucucaaaggcucuuuucagagccaccaaaaaaaaaaaaaaaaaaaaaaaaaaaaaaaaaaaaaaaaaaaaaaaaaaaaaaaaaaaaaaaaaaaaaaaaaaaaaaaaaaaaaaaaaaaaaaaaaaaaa

SEQ ID NO: 23730 - RNA, 4185 nt, Artificial Sequence
  SARS-CoV-2/Wuhan/WIV05/2019__EPI_ISL_402128 spike protein mRNA gc mod (1-1273)(H69del_V70del_Y453F_D614G_I692V_M1229I)
aggagagggcgcuuggcuugcaaggacccugagcugcggcauugaagcacacccaacccaacucgacugaagucagccucacugaaccggaucugagaaucuucucucucugggcuugccagggcucuccgaaccuagcuagcauccucuucaauuccaacuagaaagcuuaccauguucguguuccuggugcugcugccucugguguccagccagugugugaaccugaccaccagaacacagcugccuccagccuacaccaacagcuuuaccagaggcguguacuaccccgacaagguguucagauccagcgugcugcacucuacccaggaccuguuccugccuuucuucagcaacgugaccugguuccacgccaucuccggcaccaauggcaccaagagauucgacaaccccgugcugcccuucaacgacgggguguacuuugccagcaccgagaaguccaacaucaucagaggcuggaucuucggcaccacacuggacagcaagacccagagccugcugaucgugaacaacgccaccaacguggucaucaaagugugcgaguuccaguucugcaacgaccccuuccugggcgucuacuaccacaagaacaacaagagcuggauggaaagcgaguuccggguguacagcagcgccaacaacugcaccuucgaguacgugucccagccuuuccugauggaccuggaaggcaagcagggcaacuucaagaaccugcgcgaguucguguuuaagaacaucgacggcuacuucaagaucuacagcaagcacaccccuaucaaccucgugcgggaucugccucagggcuucucugcucuggaaccccugguggaucugcccaucggcaucaacaucacccgguuucagacacugcuggcccugcacagaagcuaccugacaccuggcgauagcagcagcggauggacagcuggugccgccgcuuacuaugugggcuaccugcagccuagaaccuuccugcugaaguacaacgagaacggcaccaucaccgacgccguggauugugcucuggauccucugagcgagacaaagugcacccugaaguccuucaccguggaaaagggcaucuaccagaccagcaacuuccgggugcagcccaccgaauccaucgugcgguuccccaauaucaccaaucugugccccuucggcgagguguucaaugccaccagauucgccucuguguacgccuggaaccggaagcggaucagcaauugcguggccgacuacuccgugcuguacaacuccgccagcuucagcaccuucaagugcuacggcguguccccuaccaagcugaacgaccugugcuucacaaacguguacgccgacagcuucgugauccggggagaugaagugcggcagauugccccuggacagacaggcaagaucgccgacuacaacuacaagcugcccgacgacuucaccggcugugugauugccuggaacagcaacaaccuggacuccaaagucggcggcaacuacaauuaccuguuccggcuguuccggaaguccaaucugaagcccuucgagcgggacaucuccaccgagaucuaucaggccggcagcaccccuuguaacggcguggaaggcuucaacugcuacuucccacugcaguccuacggcuuucagcccacaaauggcgugggcuaucagcccuacagagugguggugcugagcuucgaacugcugcaugccccugccacagugugcggcccuaagaaaagcaccaaucucgugaagaacaaaugcgugaacuucaacuucaacggccugaccggcaccggcgugcugacagagagcaacaagaaguuccugccauuccagcaguuuggccgggauaucgccgauaccacagacgccguuagagauccccagacacuggaaauccuggacaucaccccuugcagcuucggcggagugucugugaucaccccuggcaccaacaccagcaaucagguggcagugcuguaccagggcgugaacuguaccgaagugcccguggccauucacgccgaucagcugacaccuacauggcggguguacuccaccggcagcaauguguuucagaccagagccggcugucugaucggagccgagcacgugaacaauagcuacgagugcgacauccccaucggcgcuggaaucugcgccagcuaccagacacagacaaacagcccucggagagccagaagcguggccagccagagcgugauugccuacacaaugucucugggcgccgagaacagcguggccuacuccaacaacucuaucgcuauccccaccaacuucaccaucagcgugaccacagagauccugccuguguccaugaccaagaccagcguggacugcaccauguacaucugcggcgauuccaccgagugcuccaaccugcugcugcaguacggcagcuucugcacccagcugaauagagcccugacagggaucgccguggaacaggacaagaacacccaagagguguucgcccaagugaagcagaucuacaagaccccuccuaucaaggacuucggcggcuucaauuucagccagauucugcccgauccuagcaagcccagcaagcggagcuucaucgaggaccugcuguucaacaaagugacacuggccgacgccggcuucaucaagcaguauggcgauugucugggcgacauugccgccagggaucugauuugcgcccagaaguuuaacggacugacagugcugccuccucugcugaccgaugagaugaucgcccaguacacaucugcccugcuggccggcacaaucacaagcggcuggacauuuggagcaggcgccgcucugcagauccccuuugcuaugcagauggccuaccgguucaacggcaucggagugacccagaaugugcuguacgagaaccagaagcugaucgccaaccaguucaacagcgccaucggcaagauccaggacagccugagcagcacagcaagcgcccugggaaagcugcaggacguggucaaccagaaugcccaggcacugaacacccuggucaagcagcuguccuccaacuucggcgccaucagcucugugcugaacgauauccugagcagacuggacaaggucgaggccgaggugcagaucgacagacugaucacaggcagacugcagagccuccagacauacgugacccagcagcugaucagagccgccgagauuagagccucugccaaucuggccgccaccaagaugucugagugugugcugggccagagcaagagaguggacuuuugcggcaagggcuaccaccugaugagcuucccucagucugccccucacggcgugguguuucugcacgugacauaugugcccgcucaagagaagaauuucaccaccgcuccagccaucugccacgacggcaaagcccacuuuccuagagaaggcguguucguguccaacggcacccauugguucgugacacagcggaacuucuacgagccccagaucaucaccaccgacaacaccuucgugucuggcaacugcgacgucgugaucggcauugugaacaauaccguguacgacccucugcagcccgagcuggacagcuucaaagaggaacuggacaaguacuuuaagaaccacacaagccccgacguggaccugggcgauaucagcggaaucaaugccagcgucgugaacauccagaaagagaucgaccggcugaacgagguggccaagaaucugaacgagagccugaucgaccugcaagaacuggggaaguacgagcaguacaucaaguggcccugguacaucuggcugggcuuuaucgccggacugauugccaucgugaucgucacaaucaugcuguguugcaugaccagcugcuguagcugccugaagggcuguuguagcuguggcagcugcugcaaguucgacgaggacgauucugagcccgugcugaagggcgugaaacugcacuacacaugaggacuagucccuguucccagagcccacuuuuuuuucuuuuuuugaaauaaaauagccugucuuucagaucucaaaggcucuuuucagagccaccaaaaaaaaaaaaaaaaaaaaaaaaaaaaaaaaaaaaaaaaaaaaaaaaaaaaaaaaaaaaaaaaaaaaaaaaaaaaaaaaaaaaaaaaaaaaaaaaaaaaa

SEQ ID NO: 23731 - RNA, 4182 nt, Artificial Sequence
  SARS-CoV-2/Wuhan/WIV05/2019__EPI_ISL_402128 spike protein mRNA gc mod (1-1273)(H69del_V70del_Y144del_N501Y_A570D_D614G_P681H_T716I_S982 A_D1118H)
aggagagggcgcuuggcuugcaaggacccugagcugcggcauugaagcacacccaacccaacucgacugaagucagccucacugaaccggaucugagaaucuucucucucugggcuugccagggcucuccgaaccuagcuagcauccucuucaauuccaacuagaaagcuuaccauguucguguuccuggugcugcugccucugguguccagccagugugugaaccugaccaccagaacacagcugccuccagccuacaccaacagcuuuaccagaggcguguacuaccccgacaagguguucagauccagcgugcugcacucuacccaggaccuguuccugccuuucuucagcaacgugaccugguuccacgccaucuccggcaccaauggcaccaagagauucgacaaccccgugcugcccuucaacgacgggguguacuuugccagcaccgagaaguccaacaucaucagaggcuggaucuucggcaccacacuggacagcaagacccagagccugcugaucgugaacaacgccaccaacguggucaucaaagugugcgaguuccaguucugcaacgaccccuuccugggcgucuaccacaagaacaacaagagcuggauggaaagcgaguuccggguguacagcagcgccaacaacugcaccuucgaguacgugucccagccuuuccugauggaccuggaaggcaagcagggcaacuucaagaaccugcgcgaguucguguuuaagaacaucgacggcuacuucaagaucuacagcaagcacaccccuaucaaccucgugcgggaucugccucagggcuucucugcucuggaaccccugguggaucugcccaucggcaucaacaucacccgguuucagacacugcuggcccugcacagaagcuaccugacaccuggcgauagcagcagcggauggacagcuggugccgccgcuuacuaugugggcuaccugcagccuagaaccuuccugcugaaguacaacgagaacggcaccaucaccgacgccguggauugugcucuggauccucugagcgagacaaagugcacccugaaguccuucaccguggaaaagggcaucuaccagaccagcaacuuccgggugcagcccaccgaauccaucgugcgguuccccaauaucaccaaucugugccccuucggcgagguguucaaugccaccagauucgccucuguguacgccuggaaccggaagcggaucagcaauugcguggccgacuacuccgugcuguacaacuccgccagcuucagcaccuucaagugcuacggcguguccccuaccaagcugaacgaccugugcuucacaaacguguacgccgacagcuucgugauccggggagaugaagugcggcagauugccccuggacagacaggcaagaucgccgacuacaacuacaagcugcccgacgacuucaccggcugugugauugccuggaacagcaacaaccuggacuccaaagucggcggcaacuacaauuaccuguaccggcuguuccggaaguccaaucugaagcccuucgagcgggacaucuccaccgagaucuaucaggccggcagcaccccuuguaacggcguggaaggcuucaacugcuacuucccacugcaguccuacggcuuucagcccacauacggcgugggcuaucagcccuacagagugguggugcugagcuucgaacugcugcaugccccugccacagugugcggcccuaagaaaagcaccaaucucgugaagaacaaaugcgugaacuucaacuucaacggccugaccggcaccggcgugcugacagagagcaacaagaaguuccugccauuccagcaguuuggccgggauaucgacgauaccacagacgccguuagagauccccagacacuggaaauccuggacaucaccccuugcagcuucggcggagugucugugaucaccccuggcaccaacaccagcaaucagguggcagugcuguaccagggcgugaacuguaccgaagugcccguggccauucacgccgaucagcugacaccuacauggcggguguacuccaccggcagcaauguguuucagaccagagccggcugucugaucggagccgagcacgugaacaauagcuacgagugcgacauccccaucggcgcuggaaucugcgccagcuaccagacacagacaaacagccaccggagagccagaagcguggccagccagagcaucauugccuacacaaugucucugggcgccgagaacagcguggccuacuccaacaacucuaucgcuauccccaucaacuucaccaucagcgugaccacagagauccugccuguguccaugaccaagaccagcguggacugcaccauguacaucugcggcgauuccaccgagugcuccaaccugcugcugcaguacggcagcuucugcacccagcugaauagagcccugacagggaucgccguggaacaggacaagaacacccaagagguguucgcccaagugaagcagaucuacaagaccccuccuaucaaggacuucggcggcuucaauuucagccagauucugcccgauccuagcaagcccagcaagcggagcuucaucgaggaccugcuguucaacaaagugacacuggccgacgccggcuucaucaagcaguauggcgauugucugggcgacauugccgccagggaucugauuugcgcccagaaguuuaacggacugacagugcugccuccucugcugaccgaugagaugaucgcccaguacacaucugcccugcuggccggcacaaucacaagcggcuggacauuuggagcaggcgccgcucugcagauccccuuugcuaugcagauggccuaccgguucaacggcaucggagugacccagaaugugcuguacgagaaccagaagcugaucgccaaccaguucaacagcgccaucggcaagauccaggacagccugagcagcacagcaagcgcccugggaaagcugcaggacguggucaaccagaaugcccaggcacugaacacccuggucaagcagcuguccuccaacuucggcgccaucagcucugugcugaacgauauccuggccagacuggacaaggucgaggccgaggugcagaucgacagacugaucacaggcagacugcagagccuccagacauacgugacccagcagcugaucagagccgccgagauuagagccucugccaaucuggccgccaccaagaugucugagugugugcugggccagagcaagagaguggacuuuugcggcaagggcuaccaccugaugagcuucccucagucugccccucacggcgugguguuucugcacgugacauaugugcccgcucaagagaagaauuucaccaccgcuccagccaucugccacgacggcaaagcccacuuuccuagagaaggcguguucguguccaacggcacccauugguucgugacacagcggaacuucuacgagccccagaucaucaccacccacaacaccuucgugucuggcaacugcgacgucgugaucggcauugugaacaauaccguguacgacccucugcagcccgagcuggacagcuucaaagaggaacuggacaaguacuuuaagaaccacacaagccccgacguggaccugggcgauaucagcggaaucaaugccagcgucgugaacauccagaaagagaucgaccggcugaacgagguggccaagaaucugaacgagagccugaucgaccugcaagaacuggggaaguacgagcaguacaucaaguggcccugguacaucuggcugggcuuuaucgccggacugauugccaucgugauggucacaaucaugcuguguugcaugaccagcugcuguagcugccugaagggcuguuguagcuguggcagcugcugcaaguucgacgaggacgauucugagcccgugcugaagggcgugaaacugcacuacacaugaggacuagucccuguucccagagcccacuuuuuuuucuuuuuuugaaauaaaauagccugucuuucagaucucaaaggcucuuuucagagccaccaaaaaaaaaaaaaaaaaaaaaaaaaaaaaaaaaaaaaaaaaaaaaaaaaaaaaaaaaaaaaaaaaaaaaaaaaaaaaaaaaaaaaaaaaaaaaaaaaaaaa

SEQ ID NO: 23732 - RNA, 4191 nt, Artificial Sequence
  SARS-CoV-2/Wuhan/WIV05/2019__EPI_ISL_402128 spike protein mRNA gc mod (1-1273)(K417N_E484K_N501Y_D614G)
aggagagggcgcuuggcuugcaaggacccugagcugcggcauugaagcacacccaacccaacucgacugaagucagccucacugaaccggaucugagaaucuucucucucugggcuugccagggcucuccgaaccuagcuagcauccucuucaauuccaacuagaaagcuuaccauguucguguuccuggugcugcugccucugguguccagccagugugugaaccugaccaccagaacacagcugccuccagccuacaccaacagcuuuaccagaggcguguacuaccccgacaagguguucagauccagcgugcugcacucuacccaggaccuguuccugccuuucuucagcaacgugaccugguuccacgccauccacguguccggcaccaauggcaccaagagauucgacaaccccgugcugcccuucaacgacgggguguacuuugccagcaccgagaaguccaacaucaucagaggcuggaucuucggcaccacacuggacagcaagacccagagccugcugaucgugaacaacgccaccaacguggucaucaaagugugcgaguuccaguucugcaacgaccccuuccugggcgucuacuaccacaagaacaacaagagcuggauggaaagcgaguuccggguguacagcagcgccaacaacugcaccuucgaguacgugucccagccuuuccugauggaccuggaaggcaagcagggcaacuucaagaaccugcgcgaguucguguuuaagaacaucgacggcuacuucaagaucuacagcaagcacaccccuaucaaccucgugcgggaucugccucagggcuucucugcucuggaaccccugguggaucugcccaucggcaucaacaucacccgguuucagacacugcuggcccugcacagaagcuaccugacaccuggcgauagcagcagcggauggacagcuggugccgccgcuuacuaugugggcuaccugcagccuagaaccuuccugcugaaguacaacgagaacggcaccaucaccgacgccguggauugugcucuggauccucugagcgagacaaagugcacccugaaguccuucaccguggaaaagggcaucuaccagaccagcaacuuccgggugcagcccaccgaauccaucgugcgguuccccaauaucaccaaucugugccccuucggcgagguguucaaugccaccagauucgccucuguguacgccuggaaccggaagcggaucagcaauugcguggccgacuacuccgugcuguacaacuccgccagcuucagcaccuucaagugcuacggcguguccccuaccaagcugaacgaccugugcuucacaaacguguacgccgacagcuucgugauccggggagaugaagugcggcagauugccccuggacagacaggcaacaucgccgacuacaacuacaagcugcccgacgacuucaccggcugugugauugccuggaacagcaacaaccuggacuccaaagucggcggcaacuacaauuaccuguaccggcuguuccggaaguccaaucugaagcccuucgagcgggacaucuccaccgagaucuaucaggccggcagcaccccuuguaacggcgugaagggcuucaacugcuacuucccacugcaguccuacggcuuucagcccacauacggcgugggcuaucagcccuacagagugguggugcugagcuucgaacugcugcaugccccugccacagugugcggcccuaagaaaagcaccaaucucgugaagaacaaaugcgugaacuucaacuucaacggccugaccggcaccggcgugcugacagagagcaacaagaaguuccugccauuccagcaguuuggccgggauaucgccgauaccacagacgccguuagagauccccagacacuggaaauccuggacaucaccccuugcagcuucggcggagugucugugaucaccccuggcaccaacaccagcaaucagguggcagugcuguaccagggcgugaacuguaccgaagugcccguggccauucacgccgaucagcugacaccuacauggcggguguacuccaccggcagcaauguguuucagaccagagccggcugucugaucggagccgagcacgugaacaauagcuacgagugcgacauccccaucggcgcuggaaucugcgccagcuaccagacacagacaaacagcccucggagagccagaagcguggccagccagagcaucauugccuacacaaugucucugggcgccgagaacagcguggccuacuccaacaacucuaucgcuauccccaccaacuucaccaucagcgugaccacagagauccugccuguguccaugaccaagaccagcguggacugcaccauguacaucugcggcgauuccaccgagugcuccaaccugcugcugcaguacggcagcuucugcacccagcugaauagagcccugacagggaucgccguggaacaggacaagaacacccaagagguguucgcccaagugaagcagaucuacaagaccccuccuaucaaggacuucggcggcuucaauuucagccagauucugcccgauccuagcaagcccagcaagcggagcuucaucgaggaccugcuguucaacaaagugacacuggccgacgccggcuucaucaagcaguauggcgauugucugggcgacauugccgccagggaucugauuugcgcccagaaguuuaacggacugacagugcugccuccucugcugaccgaugagaugaucgcccaguacacaucugcccugcuggccggcacaaucacaagcggcuggacauuuggagcaggcgccgcucugcagauccccuuugcuaugcagauggccuaccgguucaacggcaucggagugacccagaaugugcuguacgagaaccagaagcugaucgccaaccaguucaacagcgccaucggcaagauccaggacagccugagcagcacagcaagcgcccugggaaagcugcaggacguggucaaccagaaugcccaggcacugaacacccuggucaagcagcuguccuccaacuucggcgccaucagcucugugcugaacgauauccugagcagacuggacaaggucgaggccgaggugcagaucgacagacugaucacaggcagacugcagagccuccagacauacgugacccagcagcugaucagagccgccgagauuagagccucugccaaucuggccgccaccaagaugucugagugugugcugggccagagcaagagaguggacuuuugcggcaagggcuaccaccugaugagcuucccucagucugccccucacggcgugguguuucugcacgugacauaugugcccgcucaagagaagaauuucaccaccgcuccagccaucugccacgacggcaaagcccacuuuccuagagaaggcguguucguguccaacggcacccauugguucgugacacagcggaacuucuacgagccccagaucaucaccaccgacaacaccuucgugucuggcaacugcgacgucgugaucggcauugugaacaauaccguguacgacccucugcagcccgagcuggacagcuucaaagaggaacuggacaaguacuuuaagaaccacacaagccccgacguggaccugggcgauaucagcggaaucaaugccagcgucgugaacauccagaaagagaucgaccggcugaacgagguggccaagaaucugaacgagagccugaucgaccugcaagaacuggggaaguacgagcaguacaucaaguggcccugguacaucuggcugggcuuuaucgccggacugauugccaucgugauggucacaaucaugcuguguugcaugaccagcugcuguagcugccugaagggcuguuguagcuguggcagcugcugcaaguucgacgaggacgauucugagcccgugcugaagggcgugaaacugcacuacacaugaggacuagucccuguucccagagcccacuuuuuuuucuuuuuuugaaauaaaauagccugucuuucagaucucaaaggcucuuuucagagccaccaaaaaaaaaaaaaaaaaaaaaaaaaaaaaaaaaaaaaaaaaaaaaaaaaaaaaaaaaaaaaaaaaaaaaaaaaaaaaaaaaaaaaaaaaaaaaaaaaaaaa

SEQ ID NO: 23733 - RNA, 4182 nt, Artificial Sequence
  SARS-CoV-2/Wuhan/WIV05/2019__EPI_ISL_402128 spike protein mRNA gc mod (1-1273)(L18F_D80A_D215G_L242del_A243del_L244del_R246I_K417N_E484 K_N501Y_D614G_A701V)
aggagagggcgcuuggcuugcaaggacccugagcugcggcauugaagcacacccaacccaacucgacugaagucagccucacugaaccggaucugagaaucuucucucucugggcuugccagggcucuccgaaccuagcuagcauccucuucaauuccaacuagaaagcuuaccauguucguguuccuggugcugcugccucugguguccagccagugugugaacuucaccaccagaacacagcugccuccagccuacaccaacagcuuuaccagaggcguguacuaccccgacaagguguucagauccagcgugcugcacucuacccaggaccuguuccugccuuucuucagcaacgugaccugguuccacgccauccacguguccggcaccaauggcaccaagagauucgccaaccccgugcugcccuucaacgacgggguguacuuugccagcaccgagaaguccaacaucaucagaggcuggaucuucggcaccacacuggacagcaagacccagagccugcugaucgugaacaacgccaccaacguggucaucaaagugugcgaguuccaguucugcaacgaccccuuccugggcgucuacuaccacaagaacaacaagagcuggauggaaagcgaguuccggguguacagcagcgccaacaacugcaccuucgaguacgugucccagccuuuccugauggaccuggaaggcaagcagggcaacuucaagaaccugcgcgaguucguguuuaagaacaucgacggcuacuucaagaucuacagcaagcacaccccuaucaaccucgugcggggccugccucagggcuucucugcucuggaaccccugguggaucugcccaucggcaucaacaucacccgguuucagacacugcacaucagcuaccugacaccuggcgauagcagcagcggauggacagcuggugccgccgcuuacuaugugggcuaccugcagccuagaaccuuccugcugaaguacaacgagaacggcaccaucaccgacgccguggauugugcucuggauccucugagcgagacaaagugcacccugaaguccuucaccguggaaaagggcaucuaccagaccagcaacuuccgggugcagcccaccgaauccaucgugcgguuccccaauaucaccaaucugugccccuucggcgagguguucaaugccaccagauucgccucuguguacgccuggaaccggaagcggaucagcaauugcguggccgacuacuccgugcuguacaacuccgccagcuucagcaccuucaagugcuacggcguguccccuaccaagcugaacgaccugugcuucacaaacguguacgccgacagcuucgugauccggggagaugaagugcggcagauugccccuggacagacaggcaacaucgccgacuacaacuacaagcugcccgacgacuucaccggcugugugauugccuggaacagcaacaaccuggacuccaaagucggcggcaacuacaauuaccuguaccggcuguuccggaaguccaaucugaagcccuucgagcgggacaucuccaccgagaucuaucaggccggcagcaccccuuguaacggcgugaagggcuucaacugcuacuucccacugcaguccuacggcuuucagcccacauacggcgugggcuaucagcccuacagagugguggugcugagcuucgaacugcugcaugccccugccacagugugcggcccuaagaaaagcaccaaucucgugaagaacaaaugcgugaacuucaacuucaacggccugaccggcaccggcgugcugacagagagcaacaagaaguuccugccauuccagcaguuuggccgggauaucgccgauaccacagacgccguuagagauccccagacacuggaaauccuggacaucaccccuugcagcuucggcggagugucugugaucaccccuggcaccaacaccagcaaucagguggcagugcuguaccagggcgugaacuguaccgaagugcccguggccauucacgccgaucagcugacaccuacauggcggguguacuccaccggcagcaauguguuucagaccagagccggcugucugaucggagccgagcacgugaacaauagcuacgagugcgacauccccaucggcgcuggaaucugcgccagcuaccagacacagacaaacagcccucggagagccagaagcguggccagccagagcaucauugccuacacaaugucucugggcguggagaacagcguggccuacuccaacaacucuaucgcuauccccaccaacuucaccaucagcgugaccacagagauccugccuguguccaugaccaagaccagcguggacugcaccauguacaucugcggcgauuccaccgagugcuccaaccugcugcugcaguacggcagcuucugcacccagcugaauagagcccugacagggaucgccguggaacaggacaagaacacccaagagguguucgcccaagugaagcagaucuacaagaccccuccuaucaaggacuucggcggcuucaauuucagccagauucugcccgauccuagcaagcccagcaagcggagcuucaucgaggaccugcuguucaacaaagugacacuggccgacgccggcuucaucaagcaguauggcgauugucugggcgacauugccgccagggaucugauuugcgcccagaaguuuaacggacugacagugcugccuccucugcugaccgaugagaugaucgcccaguacacaucugcccugcuggccggcacaaucacaagcggcuggacauuuggagcaggcgccgcucugcagauccccuuugcuaugcagauggccuaccgguucaacggcaucggagugacccagaaugugcuguacgagaaccagaagcugaucgccaaccaguucaacagcgccaucggcaagauccaggacagccugagcagcacagcaagcgcccugggaaagcugcaggacguggucaaccagaaugcccaggcacugaacacccuggucaagcagcuguccuccaacuucggcgccaucagcucugugcugaacgauauccugagcagacuggacaaggucgaggccgaggugcagaucgacagacugaucacaggcagacugcagagccuccagacauacgugacccagcagcugaucagagccgccgagauuagagccucugccaaucuggccgccaccaagaugucugagugugugcugggccagagcaagagaguggacuuuugcggcaagggcuaccaccugaugagcuucccucagucugccccucacggcgugguguuucugcacgugacauaugugcccgcucaagagaagaauuucaccaccgcuccagccaucugccacgacggcaaagcccacuuuccuagagaaggcguguucguguccaacggcacccauugguucgugacacagcggaacuucuacgagccccagaucaucaccaccgacaacaccuucgugucuggcaacugcgacgucgugaucggcauugugaacaauaccguguacgacccucugcagcccgagcuggacagcuucaaagaggaacuggacaaguacuuuaagaaccacacaagccccgacguggaccugggcgauaucagcggaaucaaugccagcgucgugaacauccagaaagagaucgaccggcugaacgagguggccaagaaucugaacgagagccugaucgaccugcaagaacuggggaaguacgagcaguacaucaaguggcccugguacaucuggcugggcuuuaucgccggacugauugccaucgugauggucacaaucaugcuguguugcaugaccagcugcuguagcugccugaagggcuguuguagcuguggcagcugcugcaaguucgacgaggacgauucugagcccgugcugaagggcgugaaacugcacuacacaugaggacuagucccuguucccagagcccacuuuuuuuucuuuuuuugaaauaaaauagccugucuuucagaucucaaaggcucuuuucagagccaccaaaaaaaaaaaaaaaaaaaaaaaaaaaaaaaaaaaaaaaaaaaaaaaaaaaaaaaaaaaaaaaaaaaaaaaaaaaaaaaaaaaaaaaaaaaaaaaaaaaaa

SEQ ID NO: 23734 - RNA, 4191 nt, Artificial Sequence
  SARS-CoV-2/Wuhan/WIV05/2019__EPI_ISL_402128 spike protein mRNA gc mod (1-1273)(E484K_D614G)
aggagagggcgcuuggcuugcaaggacccugagcugcggcauugaagcacacccaacccaacucgacugaagucagccucacugaaccggaucugagaaucuucucucucugggcuugccagggcucuccgaaccuagcuagcauccucuucaauuccaacuagaaagcuuaccauguucguguuccuggugcugcugccucugguguccagccagugugugaaccugaccaccagaacacagcugccuccagccuacaccaacagcuuuaccagaggcguguacuaccccgacaagguguucagauccagcgugcugcacucuacccaggaccuguuccugccuuucuucagcaacgugaccugguuccacgccauccacguguccggcaccaauggcaccaagagauucgacaaccccgugcugcccuucaacgacgggguguacuuugccagcaccgagaaguccaacaucaucagaggcuggaucuucggcaccacacuggacagcaagacccagagccugcugaucgugaacaacgccaccaacguggucaucaaagugugcgaguuccaguucugcaacgaccccuuccugggcgucuacuaccacaagaacaacaagagcuggauggaaagcgaguuccggguguacagcagcgccaacaacugcaccuucgaguacgugucccagccuuuccugauggaccuggaaggcaagcagggcaacuucaagaaccugcgcgaguucguguuuaagaacaucgacggcuacuucaagaucuacagcaagcacaccccuaucaaccucgugcgggaucugccucagggcuucucugcucuggaaccccugguggaucugcccaucggcaucaacaucacccgguuucagacacugcuggcccugcacagaagcuaccugacaccuggcgauagcagcagcggauggacagcuggugccgccgcuuacuaugugggcuaccugcagccuagaaccuuccugcugaaguacaacgagaacggcaccaucaccgacgccguggauugugcucuggauccucugagcgagacaaagugcacccugaaguccuucaccguggaaaagggcaucuaccagaccagcaacuuccgggugcagcccaccgaauccaucgugcgguuccccaauaucaccaaucugugccccuucggcgagguguucaaugccaccagauucgccucuguguacgccuggaaccggaagcggaucagcaauugcguggccgacuacuccgugcuguacaacuccgccagcuucagcaccuucaagugcuacggcguguccccuaccaagcugaacgaccugugcuucacaaacguguacgccgacagcuucgugauccggggagaugaagugcggcagauugccccuggacagacaggcaagaucgccgacuacaacuacaagcugcccgacgacuucaccggcugugugauugccuggaacagcaacaaccuggacuccaaagucggcggcaacuacaauuaccuguaccggcuguuccggaaguccaaucugaagcccuucgagcgggacaucuccaccgagaucuaucaggccggcagcaccccuuguaacggcgugaagggcuucaacugcuacuucccacugcaguccuacggcuuucagcccacaaauggcgugggcuaucagcccuacagagugguggugcugagcuucgaacugcugcaugccccugccacagugugcggcccuaagaaaagcaccaaucucgugaagaacaaaugcgugaacuucaacuucaacggccugaccggcaccggcgugcugacagagagcaacaagaaguuccugccauuccagcaguuuggccgggauaucgccgauaccacagacgccguuagagauccccagacacuggaaauccuggacaucaccccuugcagcuucggcggagugucugugaucaccccuggcaccaacaccagcaaucagguggcagugcuguaccagggcgugaacuguaccgaagugcccguggccauucacgccgaucagcugacaccuacauggcggguguacuccaccggcagcaauguguuucagaccagagccggcugucugaucggagccgagcacgugaacaauagcuacgagugcgacauccccaucggcgcuggaaucugcgccagcuaccagacacagacaaacagcccucggagagccagaagcguggccagccagagcaucauugccuacacaaugucucugggcgccgagaacagcguggccuacuccaacaacucuaucgcuauccccaccaacuucaccaucagcgugaccacagagauccugccuguguccaugaccaagaccagcguggacugcaccauguacaucugcggcgauuccaccgagugcuccaaccugcugcugcaguacggcagcuucugcacccagcugaauagagcccugacagggaucgccguggaacaggacaagaacacccaagagguguucgcccaagugaagcagaucuacaagaccccuccuaucaaggacuucggcggcuucaauuucagccagauucugcccgauccuagcaagcccagcaagcggagcuucaucgaggaccugcuguucaacaaagugacacuggccgacgccggcuucaucaagcaguauggcgauugucugggcgacauugccgccagggaucugauuugcgcccagaaguuuaacggacugacagugcugccuccucugcugaccgaugagaugaucgcccaguacacaucugcccugcuggccggcacaaucacaagcggcuggacauuuggagcaggcgccgcucugcagauccccuuugcuaugcagauggccuaccgguucaacggcaucggagugacccagaaugugcuguacgagaaccagaagcugaucgccaaccaguucaacagcgccaucggcaagauccaggacagccugagcagcacagcaagcgcccugggaaagcugcaggacguggucaaccagaaugcccaggcacugaacacccuggucaagcagcuguccuccaacuucggcgccaucagcucugugcugaacgauauccugagcagacuggacaaggucgaggccgaggugcagaucgacagacugaucacaggcagacugcagagccuccagacauacgugacccagcagcugaucagagccgccgagauuagagccucugccaaucuggccgccaccaagaugucugagugugugcugggccagagcaagagaguggacuuuugcggcaagggcuaccaccugaugagcuucccucagucugccccucacggcgugguguuucugcacgugacauaugugcccgcucaagagaagaauuucaccaccgcuccagccaucugccacgacggcaaagcccacuuuccuagagaaggcguguucguguccaacggcacccauugguucgugacacagcggaacuucuacgagccccagaucaucaccaccgacaacaccuucgugucuggcaacugcgacgucgugaucggcauugugaacaauaccguguacgacccucugcagcccgagcuggacagcuucaaagaggaacuggacaaguacuuuaagaaccacacaagccccgacguggaccugggcgauaucagcggaaucaaugccagcgucgugaacauccagaaagagaucgaccggcugaacgagguggccaagaaucugaacgagagccugaucgaccugcaagaacuggggaaguacgagcaguacaucaaguggcccugguacaucuggcugggcuuuaucgccggacugauugccaucgugauggucacaaucaugcuguguugcaugaccagcugcuguagcugccugaagggcuguuguagcuguggcagcugcugcaaguucgacgaggacgauucugagcccgugcugaagggcgugaaacugcacuacacaugaggacuagucccuguucccagagcccacuuuuuuuucuuuuuuugaaauaaaauagccugucuuucagaucucaaaggcucuuuucagagccaccaaaaaaaaaaaaaaaaaaaaaaaaaaaaaaaaaaaaaaaaaaaaaaaaaaaaaaaaaaaaaaaaaaaaaaaaaaaaaaaaaaaaaaaaaaaaaaaaaaaaa

SEQ ID NO: 23735 - RNA, 4191 nt, Artificial Sequence
  SARS-CoV-2/Wuhan/WIV05/2019__EPI_ISL_402128 spike protein mRNA gc mod (1-1273)(L18F_T20N_P26S_D138Y_R190S_K417T_E484K_N501Y_D614G_H655Y _T1027I)
aggagagggcgcuuggcuugcaaggacccugagcugcggcauugaagcacacccaacccaacucgacugaagucagccucacugaaccggaucugagaaucuucucucucugggcuugccagggcucuccgaaccuagcuagcauccucuucaauuccaacuagaaagcuuaccauguucguguuccuggugcugcugccucugguguccagccagugugugaacuucaccaacagaacacagcugccuagcgccuacaccaacagcuuuaccagaggcguguacuaccccgacaagguguucagauccagcgugcugcacucuacccaggaccuguuccugccuuucuucagcaacgugaccugguuccacgccauccacguguccggcaccaauggcaccaagagauucgacaaccccgugcugcccuucaacgacgggguguacuuugccagcaccgagaaguccaacaucaucagaggcuggaucuucggcaccacacuggacagcaagacccagagccugcugaucgugaacaacgccaccaacguggucaucaaagugugcgaguuccaguucugcaacuaccccuuccugggcgucuacuaccacaagaacaacaagagcuggauggaaagcgaguuccggguguacagcagcgccaacaacugcaccuucgaguacgugucccagccuuuccugauggaccuggaaggcaagcagggcaacuucaagaaccugagcgaguucguguuuaagaacaucgacggcuacuucaagaucuacagcaagcacaccccuaucaaccucgugcgggaucugccucagggcuucucugcucuggaaccccugguggaucugcccaucggcaucaacaucacccgguuucagacacugcuggcccugcacagaagcuaccugacaccuggcgauagcagcagcggauggacagcuggugccgccgcuuacuaugugggcuaccugcagccuagaaccuuccugcugaaguacaacgagaacggcaccaucaccgacgccguggauugugcucuggauccucugagcgagacaaagugcacccugaaguccuucaccguggaaaagggcaucuaccagaccagcaacuuccgggugcagcccaccgaauccaucgugcgguuccccaauaucaccaaucugugccccuucggcgagguguucaaugccaccagauucgccucuguguacgccuggaaccggaagcggaucagcaauugcguggccgacuacuccgugcuguacaacuccgccagcuucagcaccuucaagugcuacggcguguccccuaccaagcugaacgaccugugcuucacaaacguguacgccgacagcuucgugauccggggagaugaagugcggcagauugccccuggacagacaggcaccaucgccgacuacaacuacaagcugcccgacgacuucaccggcugugugauugccuggaacagcaacaaccuggacuccaaagucggcggcaacuacaauuaccuguaccggcuguuccggaaguccaaucugaagcccuucgagcgggacaucuccaccgagaucuaucaggccggcagcaccccuuguaacggcgugaagggcuucaacugcuacuucccacugcaguccuacggcuuucagcccacauacggcgugggcuaucagcccuacagagugguggugcugagcuucgaacugcugcaugccccugccacagugugcggcccuaagaaaagcaccaaucucgugaagaacaaaugcgugaacuucaacuucaacggccugaccggcaccggcgugcugacagagagcaacaagaaguuccugccauuccagcaguuuggccgggauaucgccgauaccacagacgccguuagagauccccagacacuggaaauccuggacaucaccccuugcagcuucggcggagugucugugaucaccccuggcaccaacaccagcaaucagguggcagugcuguaccagggcgugaacuguaccgaagugcccguggccauucacgccgaucagcugacaccuacauggcggguguacuccaccggcagcaauguguuucagaccagagccggcugucugaucggagccgaguacgugaacaauagcuacgagugcgacauccccaucggcgcuggaaucugcgccagcuaccagacacagacaaacagcccucggagagccagaagcguggccagccagagcaucauugccuacacaaugucucugggcgccgagaacagcguggccuacuccaacaacucuaucgcuauccccaccaacuucaccaucagcgugaccacagagauccugccuguguccaugaccaagaccagcguggacugcaccauguacaucugcggcgauuccaccgagugcuccaaccugcugcugcaguacggcagcuucugcacccagcugaauagagcccugacagggaucgccguggaacaggacaagaacacccaagagguguucgcccaagugaagcagaucuacaagaccccuccuaucaaggacuucggcggcuucaauuucagccagauucugcccgauccuagcaagcccagcaagcggagcuucaucgaggaccugcuguucaacaaagugacacuggccgacgccggcuucaucaagcaguauggcgauugucugggcgacauugccgccagggaucugauuugcgcccagaaguuuaacggacugacagugcugccuccucugcugaccgaugagaugaucgcccaguacacaucugcccugcuggccggcacaaucacaagcggcuggacauuuggagcaggcgccgcucugcagauccccuuugcuaugcagauggccuaccgguucaacggcaucggagugacccagaaugugcuguacgagaaccagaagcugaucgccaaccaguucaacagcgccaucggcaagauccaggacagccugagcagcacagcaagcgcccugggaaagcugcaggacguggucaaccagaaugcccaggcacugaacacccuggucaagcagcuguccuccaacuucggcgccaucagcucugugcugaacgauauccugagcagacuggacaaggucgaggccgaggugcagaucgacagacugaucacaggcagacugcagagccuccagacauacgugacccagcagcugaucagagccgccgagauuagagccucugccaaucuggccgccaucaagaugucugagugugugcugggccagagcaagagaguggacuuuugcggcaagggcuaccaccugaugagcuucccucagucugccccucacggcgugguguuucugcacgugacauaugugcccgcucaagagaagaauuucaccaccgcuccagccaucugccacgacggcaaagcccacuuuccuagagaaggcguguucguguccaacggcacccauugguucgugacacagcggaacuucuacgagccccagaucaucaccaccgacaacaccuucgugucuggcaacugcgacgucgugaucggcauugugaacaauaccguguacgacccucugcagcccgagcuggacagcuucaaagaggaacuggacaaguacuuuaagaaccacacaagccccgacguggaccugggcgauaucagcggaaucaaugccagcgucgugaacauccagaaagagaucgaccggcugaacgagguggccaagaaucugaacgagagccugaucgaccugcaagaacuggggaaguacgagcaguacaucaaguggcccugguacaucuggcugggcuuuaucgccggacugauugccaucgugauggucacaaucaugcuguguugcaugaccagcugcuguagcugccugaagggcuguuguagcuguggcagcugcugcaaguucgacgaggacgauucugagcccgugcugaagggcgugaaacugcacuacacaugaggacuagucccuguucccagagcccacuuuuuuuucuuuuuuugaaauaaaauagccugucuuucagaucucaaaggcucuuuucagagccaccaaaaaaaaaaaaaaaaaaaaaaaaaaaaaaaaaaaaaaaaaaaaaaaaaaaaaaaaaaaaaaaaaaaaaaaaaaaaaaaaaaaaaaaaaaaaaaaaaaaaa

SEQ ID NO: 23736 - RNA, 4191 nt, Artificial Sequence
  SARS-CoV-2/Wuhan/WIV05/2019__EPI_ISL_402128 spike protein mRNA gc mod (1-1273)(S13I_W152C_L452R_D614G)
aggagagggcgcuuggcuugcaaggacccugagcugcggcauugaagcacacccaacccaacucgacugaagucagccucacugaaccggaucugagaaucuucucucucugggcuugccagggcucuccgaaccuagcuagcauccucuucaauuccaacuagaaagcuuaccauguucguguuccuggugcugcugccucugguguccauccagugugugaaccugaccaccagaacacagcugccuccagccuacaccaacagcuuuaccagaggcguguacuaccccgacaagguguucagauccagcgugcugcacucuacccaggaccuguuccugccuuucuucagcaacgugaccugguuccacgccauccacguguccggcaccaauggcaccaagagauucgacaaccccgugcugcccuucaacgacgggguguacuuugccagcaccgagaaguccaacaucaucagaggcuggaucuucggcaccacacuggacagcaagacccagagccugcugaucgugaacaacgccaccaacguggucaucaaagugugcgaguuccaguucugcaacgaccccuuccugggcgucuacuaccacaagaacaacaagagcugcauggaaagcgaguuccggguguacagcagcgccaacaacugcaccuucgaguacgugucccagccuuuccugauggaccuggaaggcaagcagggcaacuucaagaaccugcgcgaguucguguuuaagaacaucgacggcuacuucaagaucuacagcaagcacaccccuaucaaccucgugcgggaucugccucagggcuucucugcucuggaaccccugguggaucugcccaucggcaucaacaucacccgguuucagacacugcuggcccugcacagaagcuaccugacaccuggcgauagcagcagcggauggacagcuggugccgccgcuuacuaugugggcuaccugcagccuagaaccuuccugcugaaguacaacgagaacggcaccaucaccgacgccguggauugugcucuggauccucugagcgagacaaagugcacccugaaguccuucaccguggaaaagggcaucuaccagaccagcaacuuccgggugcagcccaccgaauccaucgugcgguuccccaauaucaccaaucugugccccuucggcgagguguucaaugccaccagauucgccucuguguacgccuggaaccggaagcggaucagcaauugcguggccgacuacuccgugcuguacaacuccgccagcuucagcaccuucaagugcuacggcguguccccuaccaagcugaacgaccugugcuucacaaacguguacgccgacagcuucgugauccggggagaugaagugcggcagauugccccuggacagacaggcaagaucgccgacuacaacuacaagcugcccgacgacuucaccggcugugugauugccuggaacagcaacaaccuggacuccaaagucggcggcaacuacaauuaccgcuaccggcuguuccggaaguccaaucugaagcccuucgagcgggacaucuccaccgagaucuaucaggccggcagcaccccuuguaacggcguggaaggcuucaacugcuacuucccacugcaguccuacggcuuucagcccacaaauggcgugggcuaucagcccuacagagugguggugcugagcuucgaacugcugcaugccccugccacagugugcggcccuaagaaaagcaccaaucucgugaagaacaaaugcgugaacuucaacuucaacggccugaccggcaccggcgugcugacagagagcaacaagaaguuccugccauuccagcaguuuggccgggauaucgccgauaccacagacgccguuagagauccccagacacuggaaauccuggacaucaccccuugcagcuucggcggagugucugugaucaccccuggcaccaacaccagcaaucagguggcagugcuguaccagggcgugaacuguaccgaagugcccguggccauucacgccgaucagcugacaccuacauggcggguguacuccaccggcagcaauguguuucagaccagagccggcugucugaucggagccgagcacgugaacaauagcuacgagugcgacauccccaucggcgcuggaaucugcgccagcuaccagacacagacaaacagcccucggagagccagaagcguggccagccagagcaucauugccuacacaaugucucugggcgccgagaacagcguggccuacuccaacaacucuaucgcuauccccaccaacuucaccaucagcgugaccacagagauccugccuguguccaugaccaagaccagcguggacugcaccauguacaucugcggcgauuccaccgagugcuccaaccugcugcugcaguacggcagcuucugcacccagcugaauagagcccugacagggaucgccguggaacaggacaagaacacccaagagguguucgcccaagugaagcagaucuacaagaccccuccuaucaaggacuucggcggcuucaauuucagccagauucugcccgauccuagcaagcccagcaagcggagcuucaucgaggaccugcuguucaacaaagugacacuggccgacgccggcuucaucaagcaguauggcgauugucugggcgacauugccgccagggaucugauuugcgcccagaaguuuaacggacugacagugcugccuccucugcugaccgaugagaugaucgcccaguacacaucugcccugcuggccggcacaaucacaagcggcuggacauuuggagcaggcgccgcucugcagauccccuuugcuaugcagauggccuaccgguucaacggcaucggagugacccagaaugugcuguacgagaaccagaagcugaucgccaaccaguucaacagcgccaucggcaagauccaggacagccugagcagcacagcaagcgcccugggaaagcugcaggacguggucaaccagaaugcccaggcacugaacacccuggucaagcagcuguccuccaacuucggcgccaucagcucugugcugaacgauauccugagcagacuggacaaggucgaggccgaggugcagaucgacagacugaucacaggcagacugcagagccuccagacauacgugacccagcagcugaucagagccgccgagauuagagccucugccaaucuggccgccaccaagaugucugagugugugcugggccagagcaagagaguggacuuuugcggcaagggcuaccaccugaugagcuucccucagucugccccucacggcgugguguuucugcacgugacauaugugcccgcucaagagaagaauuucaccaccgcuccagccaucugccacgacggcaaagcccacuuuccuagagaaggcguguucguguccaacggcacccauugguucgugacacagcggaacuucuacgagccccagaucaucaccaccgacaacaccuucgugucuggcaacugcgacgucgugaucggcauugugaacaauaccguguacgacccucugcagcccgagcuggacagcuucaaagaggaacuggacaaguacuuuaagaaccacacaagccccgacguggaccugggcgauaucagcggaaucaaugccagcgucgugaacauccagaaagagaucgaccggcugaacgagguggccaagaaucugaacgagagccugaucgaccugcaagaacuggggaaguacgagcaguacaucaaguggcccugguacaucuggcugggcuuuaucgccggacugauugccaucgugauggucacaaucaugcuguguugcaugaccagcugcuguagcugccugaagggcuguuguagcuguggcagcugcugcaaguucgacgaggacgauucugagcccgugcugaagggcgugaaacugcacuacacaugaggacuagucccuguucccagagcccacuuuuuuuucuuuuuuugaaauaaaauagccugucuuucagaucucaaaggcucuuuucagagccaccaaaaaaaaaaaaaaaaaaaaaaaaaaaaaaaaaaaaaaaaaaaaaaaaaaaaaaaaaaaaaaaaaaaaaaaaaaaaaaaaaaaaaaaaaaaaaaaaaaaaa

SEQ ID NO: 23737 - RNA, 4191 nt, Artificial Sequence
  SARS-CoV-2/Wuhan/WIV05/2019__EPI_ISL_402128 spike protein mRNA gc (1-1273)(K986P_V987P) R10183
aggagagggcgcuuggcuugcaaggacccugagcugcggcauugaagcacacccaacccaacucgacugaagucagccucacugaaccggaucugagaaucuucucucucugggcuugccagggcucuccgaaccuagcuagcauccucuucaauuccaacuagaaagcuuaccauguucguguuccugguccuccugccccuggugagcucccagugcgugaaccucaccacccgcacgcagcugccgcccgccuacaccaacagcuucacccggggcgucuacuaccccgacaagguguuccgcuccagcgugcugcacuccacccaggaccucuuccugcccuucuucagcaacgucacgugguuccacgccauccacguguccgggaccaacggcaccaagcgguucgacaacccggugcugcccuucaacgacggggucuacuucgcgagcaccgagaaguccaacaucauccgcggcuggaucuucgggacgacccucgacagcaagacccagucccugcugaucgugaacaacgccaccaacguggucaucaaggugugcgaguuccaguucugcaacgaccccuuccucggcguguacuaccacaagaacaacaagagcuggauggaguccgaguuccgggucuacagcuccgccaacaacugcacguucgaguacgugagccagcccuuccugauggaccuggagggcaagcaggggaacuucaagaaccuccgcgaguucguguucaagaacaucgacggcuacuucaagaucuacuccaagcacaccccgaucaaccugguccgggaccugccccagggguucagcgcccucgagccccugguggaccugcccaucggcaucaacaucacccgcuuccagacccuccuggcccugcaccgguccuaccucacgccgggggacagcagcuccggcuggaccgcgggcgccgccgccuacuacgugggguaccugcagccccgcaccuuccugcucaaguacaacgagaacggcaccaucacggacgcggucgacugcgcccuggacccccugagcgagaccaagugcacccucaaguccuucaccguggagaaggggaucuaccagacgagcaacuuccgggugcagcccaccgaguccaucguccgcuucccgaacaucaccaaccugugccccuucggcgagguguucaacgccacccgguucgccagcgucuacgccuggaaccgcaagcggaucuccaacugcguggcggacuacagcgugcuguacaacuccgccagcuucuccacguucaagugcuacggcgucagccccaccaagcucaacgaccugugcuucaccaacguguacgccgacuccuucgugauccgcggggacgagguccggcagaucgcccccggccagaccgggaagaucgccgacuacaacuacaagcugccggacgacuucacgggcugcgugaucgcguggaacagcaacaaccucgacuccaaggucgggggcaacuacaacuaccuguaccgccuguuccgcaagagcaaccucaagcccuucgagcgggacaucuccaccgagaucuaccaggccggcagcacccccugcaacgggguggagggcuucaacugcuacuucccccugcaguccuacggguuccagccgaccaacggcgugggguaccagcccuaccggguggucgugcugagcuucgagcuccugcacgcccccgccacggugugcggccccaagaaguccaccaaccuggucaagaacaagugcgugaacuucaacuucaacggccucaccgggaccggcgugcugaccgagagcaacaagaaguuccugccguuccagcaguucgggcgcgacaucgccgacacgaccgacgcgguccgcgacccccagacccuggagauccucgacaucacccccugcagcuucggcgggguguccgugaucacgccgggcaccaacaccagcaaccaggucgccgugcuguaccaggacgugaacugcaccgagguccccguggccauccacgccgaccagcugacgcccaccuggcggguguacuccaccggcagcaacgucuuccagacccgcgccgggugccucaucggcgcggagcacgugaacaacuccuacgagugcgacauccccaucggggccggcaucugcgccagcuaccagacgcagaccaacuccccgcggcgcgcccggagcguggcgucccagagcaucaucgccuacaccaugucccugggcgccgagaacagcgucgccuacuccaacaacagcaucgccauccccaccaacuucacgaucuccgugaccaccgagauccugcccgugagcaugaccaagacgagcgucgacugcaccauguacaucugcggggacuccaccgagugcagcaaccuccugcugcaguacggcuccuucugcacccagcucaaccgcgcgcugacggggaucgccguggagcaggacaagaacacccaggagguguucgcccaggucaagcagaucuacaagacgcccccgaucaaggacuucggcggguucaacuucagccagauccugcccgaccccuccaagcccagcaagcgguccuucaucgaggaccuccuguucaacaaggugacccuggccgacgccggcuucaucaagcaguacggcgacugccucggggacaucgcggcccgcgaccugaucugcgcccagaaguucaacggccugaccgugcucccgccccugcugaccgacgagaugaucgcccaguacaccagcgcccuccuggcggggaccaucacguccggcuggaccuucggggccggcgccgcccugcagauccccuucgcgaugcagauggccuaccgguucaacggcaucggggucacccagaacgugcucuacgagaaccagaagcugaucgccaaccaguucaacagcgccaucggcaagauccaggacucccugagcuccaccgccagcgcgcucgggaagcugcaggacguggucaaccagaacgcccaggcccugaacacgcucgugaagcagcuguccagcaacuucggcgccaucuccagcgugcugaacgacauccucucccgccuggacccgcccgaggccgaggugcagaucgaccggcugaucaccgggcgccuccagagccugcagaccuacgugacccagcagcugauccgggcggccgagauccgcgccagcgccaaccucgccgcgaccaagauguccgagugcguccugggccagagcaagcggguggacuucugcggcaagggguaccaccugauguccuucccccagagcgccccgcacggcguggucuuccuccacgugacguacguccccgcccaggagaagaacuucaccaccgcccccgcgaucugccacgacgggaaggcccacuucccccgcgagggcguguucguguccaacgggacccacugguucgucacgcagcggaacuucuacgagccgcagaucaucaccaccgacaacaccuucgugagcggcaacugcgacguggucaucggcaucgugaacaacacgguguacgacccccugcagcccgagcuggacuccuucaaggaggagcucgacaaguacuucaagaaccacaccagccccgacgucgaccugggggacaucuccggcaucaacgccagcguggugaacauccagaaggagaucgaccgccugaacgaggucgccaagaaccucaacgagucccugaucgaccugcaggagcucgggaaguacgagcaguacaucaaguggccgugguacaucuggcugggcuucaucgccggccugaucgcgaucgugauggugaccaucaugcucugcugcaugaccagcugcugcuccugccugaaggggugcugcagcugcggcuccugcugcaaguucgacgaggacgacagcgagcccguccugaagggggugaagcuccacuacacgugaggacuagucccuguucccagagcccacuuuuuuuucuuuuuuugaaauaaaauagccugucuuucagaucucaaaggcucuuuucagagccaccaaaaaaaaaaaaaaaaaaaaaaaaaaaaaaaaaaaaaaaaaaaaaaaaaaaaaaaaaaaaaaaaaaaaaaaaaaaaaaaaaaaaaaaaaaaaaaaaaaaaa

SEQ ID NO: 23738 - RNA, 4191 nt, Artificial Sequence
  SARS-CoV-2/Wuhan/WIV05/2019__EPI_ISL_402128 spike protein mRNA gc (1-1273)(K986P_V987P_ D614G)
aggagagggcgcuuggcuugcaaggacccugagcugcggcauugaagcacacccaacccaacucgacugaagucagccucacugaaccggaucugagaaucuucucucucugggcuugccagggcucuccgaaccuagcuagcauccucuucaauuccaacuagaaagcuuaccauguucguguuccugguccuccugccccuggugagcucccagugcgugaaccucaccacccgcacgcagcugccgcccgccuacaccaacagcuucacccggggcgucuacuaccccgacaagguguuccgcuccagcgugcugcacuccacccaggaccucuuccugcccuucuucagcaacgucacgugguuccacgccauccacguguccgggaccaacggcaccaagcgguucgacaacccggugcugcccuucaacgacggggucuacuucgcgagcaccgagaaguccaacaucauccgcggcuggaucuucgggacgacccucgacagcaagacccagucccugcugaucgugaacaacgccaccaacguggucaucaaggugugcgaguuccaguucugcaacgaccccuuccucggcguguacuaccacaagaacaacaagagcuggauggaguccgaguuccgggucuacagcuccgccaacaacugcacguucgaguacgugagccagcccuuccugauggaccuggagggcaagcaggggaacuucaagaaccuccgcgaguucguguucaagaacaucgacggcuacuucaagaucuacuccaagcacaccccgaucaaccugguccgggaccugccccagggguucagcgcccucgagccccugguggaccugcccaucggcaucaacaucacccgcuuccagacccuccuggcccugcaccgguccuaccucacgccgggggacagcagcuccggcuggaccgcgggcgccgccgccuacuacgugggguaccugcagccccgcaccuuccugcucaaguacaacgagaacggcaccaucacggacgcggucgacugcgcccuggacccccugagcgagaccaagugcacccucaaguccuucaccguggagaaggggaucuaccagacgagcaacuuccgggugcagcccaccgaguccaucguccgcuucccgaacaucaccaaccugugccccuucggcgagguguucaacgccacccgguucgccagcgucuacgccuggaaccgcaagcggaucuccaacugcguggcggacuacagcgugcuguacaacuccgccagcuucuccacguucaagugcuacggcgucagccccaccaagcucaacgaccugugcuucaccaacguguacgccgacuccuucgugauccgcggggacgagguccggcagaucgcccccggccagaccgggaagaucgccgacuacaacuacaagcugccggacgacuucacgggcugcgugaucgcguggaacagcaacaaccucgacuccaaggucgggggcaacuacaacuaccuguaccgccuguuccgcaagagcaaccucaagcccuucgagcgggacaucuccaccgagaucuaccaggccggcagcacccccugcaacgggguggagggcuucaacugcuacuucccccugcaguccuacggguuccagccgaccaacggcgugggguaccagcccuaccggguggucgugcugagcuucgagcuccugcacgcccccgccacggugugcggccccaagaaguccaccaaccuggucaagaacaagugcgugaacuucaacuucaacggccucaccgggaccggcgugcugaccgagagcaacaagaaguuccugccguuccagcaguucgggcgcgacaucgccgacacgaccgacgcgguccgcgacccccagacccuggagauccucgacaucacccccugcagcuucggcgggguguccgugaucacgccgggcaccaacaccagcaaccaggucgccgugcuguaccagggcgugaacugcaccgagguccccguggccauccacgccgaccagcugacgcccaccuggcggguguacuccaccggcagcaacgucuuccagacccgcgccgggugccucaucggcgcggagcacgugaacaacuccuacgagugcgacauccccaucggggccggcaucugcgccagcuaccagacgcagaccaacuccccgcggcgcgcccggagcguggcgucccagagcaucaucgccuacaccaugucccugggcgccgagaacagcgucgccuacuccaacaacagcaucgccauccccaccaacuucacgaucuccgugaccaccgagauccugcccgugagcaugaccaagacgagcgucgacugcaccauguacaucugcggggacuccaccgagugcagcaaccuccugcugcaguacggcuccuucugcacccagcucaaccgcgcgcugacggggaucgccguggagcaggacaagaacacccaggagguguucgcccaggucaagcagaucuacaagacgcccccgaucaaggacuucggcggguucaacuucagccagauccugcccgaccccuccaagcccagcaagcgguccuucaucgaggaccuccuguucaacaaggugacccuggccgacgccggcuucaucaagcaguacggcgacugccucggggacaucgcggcccgcgaccugaucugcgcccagaaguucaacggccugaccgugcucccgccccugcugaccgacgagaugaucgcccaguacaccagcgcccuccuggcggggaccaucacguccggcuggaccuucggggccggcgccgcccugcagauccccuucgcgaugcagauggccuaccgguucaacggcaucggggucacccagaacgugcucuacgagaaccagaagcugaucgccaaccaguucaacagcgccaucggcaagauccaggacucccugagcuccaccgccagcgcgcucgggaagcugcaggacguggucaaccagaacgcccaggcccugaacacgcucgugaagcagcuguccagcaacuucggcgccaucuccagcgugcugaacgacauccucucccgccuggacccgcccgaggccgaggugcagaucgaccggcugaucaccgggcgccuccagagccugcagaccuacgugacccagcagcugauccgggcggccgagauccgcgccagcgccaaccucgccgcgaccaagauguccgagugcguccugggccagagcaagcggguggacuucugcggcaagggguaccaccugauguccuucccccagagcgccccgcacggcguggucuuccuccacgugacguacguccccgcccaggagaagaacuucaccaccgcccccgcgaucugccacgacgggaaggcccacuucccccgcgagggcguguucguguccaacgggacccacugguucgucacgcagcggaacuucuacgagccgcagaucaucaccaccgacaacaccuucgugagcggcaacugcgacguggucaucggcaucgugaacaacacgguguacgacccccugcagcccgagcuggacuccuucaaggaggagcucgacaaguacuucaagaaccacaccagccccgacgucgaccugggggacaucuccggcaucaacgccagcguggugaacauccagaaggagaucgaccgccugaacgaggucgccaagaaccucaacgagucccugaucgaccugcaggagcucgggaaguacgagcaguacaucaaguggccgugguacaucuggcugggcuucaucgccggccugaucgcgaucgugauggugaccaucaugcucugcugcaugaccagcugcugcuccugccugaaggggugcugcagcugcggcuccugcugcaaguucgacgaggacgacagcgagcccguccugaagggggugaagcuccacuacacgugaggacuagucccuguucccagagcccacuuuuuuuucuuuuuuugaaauaaaauagccugucuuucagaucucaaaggcucuuuucagagccaccaaaaaaaaaaaaaaaaaaaaaaaaaaaaaaaaaaaaaaaaaaaaaaaaaaaaaaaaaaaaaaaaaaaaaaaaaaaaaaaaaaaaaaaaaaaaaaaaaaaaa

SEQ ID NO: 23739 - RNA, 4191 nt, Artificial Sequence
  SARS-CoV-2/Wuhan/WIV05/2019__EPI_ISL_402128 spike protein mRNA gc (1-1273)(K986P_V987P_A222V_D614G)
aggagagggcgcuuggcuugcaaggacccugagcugcggcauugaagcacacccaacccaacucgacugaagucagccucacugaaccggaucugagaaucuucucucucugggcuugccagggcucuccgaaccuagcuagcauccucuucaauuccaacuagaaagcuuaccauguucguguuccugguccuccugccccuggugagcucccagugcgugaaccucaccacccgcacgcagcugccgcccgccuacaccaacagcuucacccggggcgucuacuaccccgacaagguguuccgcuccagcgugcugcacuccacccaggaccucuuccugcccuucuucagcaacgucacgugguuccacgccauccacguguccgggaccaacggcaccaagcgguucgacaacccggugcugcccuucaacgacggggucuacuucgcgagcaccgagaaguccaacaucauccgcggcuggaucuucgggacgacccucgacagcaagacccagucccugcugaucgugaacaacgccaccaacguggucaucaaggugugcgaguuccaguucugcaacgaccccuuccucggcguguacuaccacaagaacaacaagagcuggauggaguccgaguuccgggucuacagcuccgccaacaacugcacguucgaguacgugagccagcccuuccugauggaccuggagggcaagcaggggaacuucaagaaccuccgcgaguucguguucaagaacaucgacggcuacuucaagaucuacuccaagcacaccccgaucaaccugguccgggaccugccccagggguucagcguccucgagccccugguggaccugcccaucggcaucaacaucacccgcuuccagacccuccuggcccugcaccgguccuaccucacgccgggggacagcagcuccggcuggaccgcgggcgccgccgccuacuacgugggguaccugcagccccgcaccuuccugcucaaguacaacgagaacggcaccaucacggacgcggucgacugcgcccuggacccccugagcgagaccaagugcacccucaaguccuucaccguggagaaggggaucuaccagacgagcaacuuccgggugcagcccaccgaguccaucguccgcuucccgaacaucaccaaccugugccccuucggcgagguguucaacgccacccgguucgccagcgucuacgccuggaaccgcaagcggaucuccaacugcguggcggacuacagcgugcuguacaacuccgccagcuucuccacguucaagugcuacggcgucagccccaccaagcucaacgaccugugcuucaccaacguguacgccgacuccuucgugauccgcggggacgagguccggcagaucgcccccggccagaccgggaagaucgccgacuacaacuacaagcugccggacgacuucacgggcugcgugaucgcguggaacagcaacaaccucgacuccaaggucgggggcaacuacaacuaccuguaccgccuguuccgcaagagcaaccucaagcccuucgagcgggacaucuccaccgagaucuaccaggccggcagcacccccugcaacgggguggagggcuucaacugcuacuucccccugcaguccuacggguuccagccgaccaacggcgugggguaccagcccuaccggguggucgugcugagcuucgagcuccugcacgcccccgccacggugugcggccccaagaaguccaccaaccuggucaagaacaagugcgugaacuucaacuucaacggccucaccgggaccggcgugcugaccgagagcaacaagaaguuccugccguuccagcaguucgggcgcgacaucgccgacacgaccgacgcgguccgcgacccccagacccuggagauccucgacaucacccccugcagcuucggcgggguguccgugaucacgccgggcaccaacaccagcaaccaggucgccgugcuguaccagggcgugaacugcaccgagguccccguggccauccacgccgaccagcugacgcccaccuggcggguguacuccaccggcagcaacgucuuccagacccgcgccgggugccucaucggcgcggagcacgugaacaacuccuacgagugcgacauccccaucggggccggcaucugcgccagcuaccagacgcagaccaacuccccgcggcgcgcccggagcguggcgucccagagcaucaucgccuacaccaugucccugggcgccgagaacagcgucgccuacuccaacaacagcaucgccauccccaccaacuucacgaucuccgugaccaccgagauccugcccgugagcaugaccaagacgagcgucgacugcaccauguacaucugcggggacuccaccgagugcagcaaccuccugcugcaguacggcuccuucugcacccagcucaaccgcgcgcugacggggaucgccguggagcaggacaagaacacccaggagguguucgcccaggucaagcagaucuacaagacgcccccgaucaaggacuucggcggguucaacuucagccagauccugcccgaccccuccaagcccagcaagcgguccuucaucgaggaccuccuguucaacaaggugacccuggccgacgccggcuucaucaagcaguacggcgacugccucggggacaucgcggcccgcgaccugaucugcgcccagaaguucaacggccugaccgugcucccgccccugcugaccgacgagaugaucgcccaguacaccagcgcccuccuggcggggaccaucacguccggcuggaccuucggggccggcgccgcccugcagauccccuucgcgaugcagauggccuaccgguucaacggcaucggggucacccagaacgugcucuacgagaaccagaagcugaucgccaaccaguucaacagcgccaucggcaagauccaggacucccugagcuccaccgccagcgcgcucgggaagcugcaggacguggucaaccagaacgcccaggcccugaacacgcucgugaagcagcuguccagcaacuucggcgccaucuccagcgugcugaacgacauccucucccgccuggacccgcccgaggccgaggugcagaucgaccggcugaucaccgggcgccuccagagccugcagaccuacgugacccagcagcugauccgggcggccgagauccgcgccagcgccaaccucgccgcgaccaagauguccgagugcguccugggccagagcaagcggguggacuucugcggcaagggguaccaccugauguccuucccccagagcgccccgcacggcguggucuuccuccacgugacguacguccccgcccaggagaagaacuucaccaccgcccccgcgaucugccacgacgggaaggcccacuucccccgcgagggcguguucguguccaacgggacccacugguucgucacgcagcggaacuucuacgagccgcagaucaucaccaccgacaacaccuucgugagcggcaacugcgacguggucaucggcaucgugaacaacacgguguacgacccccugcagcccgagcuggacuccuucaaggaggagcucgacaaguacuucaagaaccacaccagccccgacgucgaccugggggacaucuccggcaucaacgccagcguggugaacauccagaaggagaucgaccgccugaacgaggucgccaagaaccucaacgagucccugaucgaccugcaggagcucgggaaguacgagcaguacaucaaguggccgugguacaucuggcugggcuucaucgccggccugaucgcgaucgugauggugaccaucaugcucugcugcaugaccagcugcugcuccugccugaaggggugcugcagcugcggcuccugcugcaaguucgacgaggacgacagcgagcccguccugaagggggugaagcuccacuacacgugaggacuagucccuguucccagagcccacuuuuuuuucuuuuuuugaaauaaaauagccugucuuucagaucucaaaggcucuuuucagagccaccaaaaaaaaaaaaaaaaaaaaaaaaaaaaaaaaaaaaaaaaaaaaaaaaaaaaaaaaaaaaaaaaaaaaaaaaaaaaaaaaaaaaaaaaaaaaaaaaaaaaa

SEQ ID NO: 23740 - RNA, 4191 nt, Artificial Sequence
  SARS-CoV-2/Wuhan/WIV05/2019__EPI_ISL_402128 spike protein mRNA gc (1-1273)(K986P_V987P_N439K_D614G)
aggagagggcgcuuggcuugcaaggacccugagcugcggcauugaagcacacccaacccaacucgacugaagucagccucacugaaccggaucugagaaucuucucucucugggcuugccagggcucuccgaaccuagcuagcauccucuucaauuccaacuagaaagcuuaccauguucguguuccugguccuccugccccuggugagcucccagugcgugaaccucaccacccgcacgcagcugccgcccgccuacaccaacagcuucacccggggcgucuacuaccccgacaagguguuccgcuccagcgugcugcacuccacccaggaccucuuccugcccuucuucagcaacgucacgugguuccacgccauccacguguccgggaccaacggcaccaagcgguucgacaacccggugcugcccuucaacgacggggucuacuucgcgagcaccgagaaguccaacaucauccgcggcuggaucuucgggacgacccucgacagcaagacccagucccugcugaucgugaacaacgccaccaacguggucaucaaggugugcgaguuccaguucugcaacgaccccuuccucggcguguacuaccacaagaacaacaagagcuggauggaguccgaguuccgggucuacagcuccgccaacaacugcacguucgaguacgugagccagcccuuccugauggaccuggagggcaagcaggggaacuucaagaaccuccgcgaguucguguucaagaacaucgacggcuacuucaagaucuacuccaagcacaccccgaucaaccugguccgggaccugccccagggguucagcgcccucgagccccugguggaccugcccaucggcaucaacaucacccgcuuccagacccuccuggcccugcaccgguccuaccucacgccgggggacagcagcuccggcuggaccgcgggcgccgccgccuacuacgugggguaccugcagccccgcaccuuccugcucaaguacaacgagaacggcaccaucacggacgcggucgacugcgcccuggacccccugagcgagaccaagugcacccucaaguccuucaccguggagaaggggaucuaccagacgagcaacuuccgggugcagcccaccgaguccaucguccgcuucccgaacaucaccaaccugugccccuucggcgagguguucaacgccacccgguucgccagcgucuacgccuggaaccgcaagcggaucuccaacugcguggcggacuacagcgugcuguacaacuccgccagcuucuccacguucaagugcuacggcgucagccccaccaagcucaacgaccugugcuucaccaacguguacgccgacuccuucgugauccgcggggacgagguccggcagaucgcccccggccagaccgggaagaucgccgacuacaacuacaagcugccggacgacuucacgggcugcgugaucgcguggaacagcaagaaccucgacuccaaggucgggggcaacuacaacuaccuguaccgccuguuccgcaagagcaaccucaagcccuucgagcgggacaucuccaccgagaucuaccaggccggcagcacccccugcaacgggguggagggcuucaacugcuacuucccccugcaguccuacggguuccagccgaccaacggcgugggguaccagcccuaccggguggucgugcugagcuucgagcuccugcacgcccccgccacggugugcggccccaagaaguccaccaaccuggucaagaacaagugcgugaacuucaacuucaacggccucaccgggaccggcgugcugaccgagagcaacaagaaguuccugccguuccagcaguucgggcgcgacaucgccgacacgaccgacgcgguccgcgacccccagacccuggagauccucgacaucacccccugcagcuucggcgggguguccgugaucacgccgggcaccaacaccagcaaccaggucgccgugcuguaccagggcgugaacugcaccgagguccccguggccauccacgccgaccagcugacgcccaccuggcggguguacuccaccggcagcaacgucuuccagacccgcgccgggugccucaucggcgcggagcacgugaacaacuccuacgagugcgacauccccaucggggccggcaucugcgccagcuaccagacgcagaccaacuccccgcggcgcgcccggagcguggcgucccagagcaucaucgccuacaccaugucccugggcgccgagaacagcgucgccuacuccaacaacagcaucgccauccccaccaacuucacgaucuccgugaccaccgagauccugcccgugagcaugaccaagacgagcgucgacugcaccauguacaucugcggggacuccaccgagugcagcaaccuccugcugcaguacggcuccuucugcacccagcucaaccgcgcgcugacggggaucgccguggagcaggacaagaacacccaggagguguucgcccaggucaagcagaucuacaagacgcccccgaucaaggacuucggcggguucaacuucagccagauccugcccgaccccuccaagcccagcaagcgguccuucaucgaggaccuccuguucaacaaggugacccuggccgacgccggcuucaucaagcaguacggcgacugccucggggacaucgcggcccgcgaccugaucugcgcccagaaguucaacggccugaccgugcucccgccccugcugaccgacgagaugaucgcccaguacaccagcgcccuccuggcggggaccaucacguccggcuggaccuucggggccggcgccgcccugcagauccccuucgcgaugcagauggccuaccgguucaacggcaucggggucacccagaacgugcucuacgagaaccagaagcugaucgccaaccaguucaacagcgccaucggcaagauccaggacucccugagcuccaccgccagcgcgcucgggaagcugcaggacguggucaaccagaacgcccaggcccugaacacgcucgugaagcagcuguccagcaacuucggcgccaucuccagcgugcugaacgacauccucucccgccuggacccgcccgaggccgaggugcagaucgaccggcugaucaccgggcgccuccagagccugcagaccuacgugacccagcagcugauccgggcggccgagauccgcgccagcgccaaccucgccgcgaccaagauguccgagugcguccugggccagagcaagcggguggacuucugcggcaagggguaccaccugauguccuucccccagagcgccccgcacggcguggucuuccuccacgugacguacguccccgcccaggagaagaacuucaccaccgcccccgcgaucugccacgacgggaaggcccacuucccccgcgagggcguguucguguccaacgggacccacugguucgucacgcagcggaacuucuacgagccgcagaucaucaccaccgacaacaccuucgugagcggcaacugcgacguggucaucggcaucgugaacaacacgguguacgacccccugcagcccgagcuggacuccuucaaggaggagcucgacaaguacuucaagaaccacaccagccccgacgucgaccugggggacaucuccggcaucaacgccagcguggugaacauccagaaggagaucgaccgccugaacgaggucgccaagaaccucaacgagucccugaucgaccugcaggagcucgggaaguacgagcaguacaucaaguggccgugguacaucuggcugggcuucaucgccggccugaucgcgaucgugauggugaccaucaugcucugcugcaugaccagcugcugcuccugccugaaggggugcugcagcugcggcuccugcugcaaguucgacgaggacgacagcgagcccguccugaagggggugaagcuccacuacacgugaggacuagucccuguucccagagcccacuuuuuuuucuuuuuuugaaauaaaauagccugucuuucagaucucaaaggcucuuuucagagccaccaaaaaaaaaaaaaaaaaaaaaaaaaaaaaaaaaaaaaaaaaaaaaaaaaaaaaaaaaaaaaaaaaaaaaaaaaaaaaaaaaaaaaaaaaaaaaaaaaaaaa

SEQ ID NO: 23741 - RNA, 4191 nt, Artificial Sequence
  SARS-CoV-2/Wuhan/WIV05/2019__EPI_ISL_402128 spike protein mRNA gc (1-1273)(K986P_V987P_S477N_D614G)
aggagagggcgcuuggcuugcaaggacccugagcugcggcauugaagcacacccaacccaacucgacugaagucagccucacugaaccggaucugagaaucuucucucucugggcuugccagggcucuccgaaccuagcuagcauccucuucaauuccaacuagaaagcuuaccauguucguguuccugguccuccugccccuggugagcucccagugcgugaaccucaccacccgcacgcagcugccgcccgccuacaccaacagcuucacccggggcgucuacuaccccgacaagguguuccgcuccagcgugcugcacuccacccaggaccucuuccugcccuucuucagcaacgucacgugguuccacgccauccacguguccgggaccaacggcaccaagcgguucgacaacccggugcugcccuucaacgacggggucuacuucgcgagcaccgagaaguccaacaucauccgcggcuggaucuucgggacgacccucgacagcaagacccagucccugcugaucgugaacaacgccaccaacguggucaucaaggugugcgaguuccaguucugcaacgaccccuuccucggcguguacuaccacaagaacaacaagagcuggauggaguccgaguuccgggucuacagcuccgccaacaacugcacguucgaguacgugagccagcccuuccugauggaccuggagggcaagcaggggaacuucaagaaccuccgcgaguucguguucaagaacaucgacggcuacuucaagaucuacuccaagcacaccccgaucaaccugguccgggaccugccccagggguucagcgcccucgagccccugguggaccugcccaucggcaucaacaucacccgcuuccagacccuccuggcccugcaccgguccuaccucacgccgggggacagcagcuccggcuggaccgcgggcgccgccgccuacuacgugggguaccugcagccccgcaccuuccugcucaaguacaacgagaacggcaccaucacggacgcggucgacugcgcccuggacccccugagcgagaccaagugcacccucaaguccuucaccguggagaaggggaucuaccagacgagcaacuuccgggugcagcccaccgaguccaucguccgcuucccgaacaucaccaaccugugccccuucggcgagguguucaacgccacccgguucgccagcgucuacgccuggaaccgcaagcggaucuccaacugcguggcggacuacagcgugcuguacaacuccgccagcuucuccacguucaagugcuacggcgucagccccaccaagcucaacgaccugugcuucaccaacguguacgccgacuccuucgugauccgcggggacgagguccggcagaucgcccccggccagaccgggaagaucgccgacuacaacuacaagcugccggacgacuucacgggcugcgugaucgcguggaacagcaacaaccucgacuccaaggucgggggcaacuacaacuaccuguaccgccuguuccgcaagagcaaccucaagcccuucgagcgggacaucuccaccgagaucuaccaggccggcaacacccccugcaacgggguggagggcuucaacugcuacuucccccugcaguccuacggguuccagccgaccaacggcgugggguaccagcccuaccggguggucgugcugagcuucgagcuccugcacgcccccgccacggugugcggccccaagaaguccaccaaccuggucaagaacaagugcgugaacuucaacuucaacggccucaccgggaccggcgugcugaccgagagcaacaagaaguuccugccguuccagcaguucgggcgcgacaucgccgacacgaccgacgcgguccgcgacccccagacccuggagauccucgacaucacccccugcagcuucggcgggguguccgugaucacgccgggcaccaacaccagcaaccaggucgccgugcuguaccagggcgugaacugcaccgagguccccguggccauccacgccgaccagcugacgcccaccuggcggguguacuccaccggcagcaacgucuuccagacccgcgccgggugccucaucggcgcggagcacgugaacaacuccuacgagugcgacauccccaucggggccggcaucugcgccagcuaccagacgcagaccaacuccccgcggcgcgcccggagcguggcgucccagagcaucaucgccuacaccaugucccugggcgccgagaacagcgucgccuacuccaacaacagcaucgccauccccaccaacuucacgaucuccgugaccaccgagauccugcccgugagcaugaccaagacgagcgucgacugcaccauguacaucugcggggacuccaccgagugcagcaaccuccugcugcaguacggcuccuucugcacccagcucaaccgcgcgcugacggggaucgccguggagcaggacaagaacacccaggagguguucgcccaggucaagcagaucuacaagacgcccccgaucaaggacuucggcggguucaacuucagccagauccugcccgaccccuccaagcccagcaagcgguccuucaucgaggaccuccuguucaacaaggugacccuggccgacgccggcuucaucaagcaguacggcgacugccucggggacaucgcggcccgcgaccugaucugcgcccagaaguucaacggccugaccgugcucccgccccugcugaccgacgagaugaucgcccaguacaccagcgcccuccuggcggggaccaucacguccggcuggaccuucggggccggcgccgcccugcagauccccuucgcgaugcagauggccuaccgguucaacggcaucggggucacccagaacgugcucuacgagaaccagaagcugaucgccaaccaguucaacagcgccaucggcaagauccaggacucccugagcuccaccgccagcgcgcucgggaagcugcaggacguggucaaccagaacgcccaggcccugaacacgcucgugaagcagcuguccagcaacuucggcgccaucuccagcgugcugaacgacauccucucccgccuggacccgcccgaggccgaggugcagaucgaccggcugaucaccgggcgccuccagagccugcagaccuacgugacccagcagcugauccgggcggccgagauccgcgccagcgccaaccucgccgcgaccaagauguccgagugcguccugggccagagcaagcggguggacuucugcggcaagggguaccaccugauguccuucccccagagcgccccgcacggcguggucuuccuccacgugacguacguccccgcccaggagaagaacuucaccaccgcccccgcgaucugccacgacgggaaggcccacuucccccgcgagggcguguucguguccaacgggacccacugguucgucacgcagcggaacuucuacgagccgcagaucaucaccaccgacaacaccuucgugagcggcaacugcgacguggucaucggcaucgugaacaacacgguguacgacccccugcagcccgagcuggacuccuucaaggaggagcucgacaaguacuucaagaaccacaccagccccgacgucgaccugggggacaucuccggcaucaacgccagcguggugaacauccagaaggagaucgaccgccugaacgaggucgccaagaaccucaacgagucccugaucgaccugcaggagcucgggaaguacgagcaguacaucaaguggccgugguacaucuggcugggcuucaucgccggccugaucgcgaucgugauggugaccaucaugcucugcugcaugaccagcugcugcuccugccugaaggggugcugcagcugcggcuccugcugcaaguucgacgaggacgacagcgagcccguccugaagggggugaagcuccacuacacgugaggacuagucccuguucccagagcccacuuuuuuuucuuuuuuugaaauaaaauagccugucuuucagaucucaaaggcucuuuucagagccaccaaaaaaaaaaaaaaaaaaaaaaaaaaaaaaaaaaaaaaaaaaaaaaaaaaaaaaaaaaaaaaaaaaaaaaaaaaaaaaaaaaaaaaaaaaaaaaaaaaaaa

SEQ ID NO: 23742 - RNA, 4191 nt, Artificial Sequence
  SARS-CoV-2/Wuhan/WIV05/2019__EPI_ISL_402128 spike protein mRNA gc (1-1273)(K986P_V987P_N501Y_D614G)
aggagagggcgcuuggcuugcaaggacccugagcugcggcauugaagcacacccaacccaacucgacugaagucagccucacugaaccggaucugagaaucuucucucucugggcuugccagggcucuccgaaccuagcuagcauccucuucaauuccaacuagaaagcuuaccauguucguguuccugguccuccugccccuggugagcucccagugcgugaaccucaccacccgcacgcagcugccgcccgccuacaccaacagcuucacccggggcgucuacuaccccgacaagguguuccgcuccagcgugcugcacuccacccaggaccucuuccugcccuucuucagcaacgucacgugguuccacgccauccacguguccgggaccaacggcaccaagcgguucgacaacccggugcugcccuucaacgacggggucuacuucgcgagcaccgagaaguccaacaucauccgcggcuggaucuucgggacgacccucgacagcaagacccagucccugcugaucgugaacaacgccaccaacguggucaucaaggugugcgaguuccaguucugcaacgaccccuuccucggcguguacuaccacaagaacaacaagagcuggauggaguccgaguuccgggucuacagcuccgccaacaacugcacguucgaguacgugagccagcccuuccugauggaccuggagggcaagcaggggaacuucaagaaccuccgcgaguucguguucaagaacaucgacggcuacuucaagaucuacuccaagcacaccccgaucaaccugguccgggaccugccccagggguucagcgcccucgagccccugguggaccugcccaucggcaucaacaucacccgcuuccagacccuccuggcccugcaccgguccuaccucacgccgggggacagcagcuccggcuggaccgcgggcgccgccgccuacuacgugggguaccugcagccccgcaccuuccugcucaaguacaacgagaacggcaccaucacggacgcggucgacugcgcccuggacccccugagcgagaccaagugcacccucaaguccuucaccguggagaaggggaucuaccagacgagcaacuuccgggugcagcccaccgaguccaucguccgcuucccgaacaucaccaaccugugccccuucggcgagguguucaacgccacccgguucgccagcgucuacgccuggaaccgcaagcggaucuccaacugcguggcggacuacagcgugcuguacaacuccgccagcuucuccacguucaagugcuacggcgucagccccaccaagcucaacgaccugugcuucaccaacguguacgccgacuccuucgugauccgcggggacgagguccggcagaucgcccccggccagaccgggaagaucgccgacuacaacuacaagcugccggacgacuucacgggcugcgugaucgcguggaacagcaacaaccucgacuccaaggucgggggcaacuacaacuaccuguaccgccuguuccgcaagagcaaccucaagcccuucgagcgggacaucuccaccgagaucuaccaggccggcagcacccccugcaacgggguggagggcuucaacugcuacuucccccugcaguccuacggguuccagccgaccuacggcgugggguaccagcccuaccggguggucgugcugagcuucgagcuccugcacgcccccgccacggugugcggccccaagaaguccaccaaccuggucaagaacaagugcgugaacuucaacuucaacggccucaccgggaccggcgugcugaccgagagcaacaagaaguuccugccguuccagcaguucgggcgcgacaucgccgacacgaccgacgcgguccgcgacccccagacccuggagauccucgacaucacccccugcagcuucggcgggguguccgugaucacgccgggcaccaacaccagcaaccaggucgccgugcuguaccagggcgugaacugcaccgagguccccguggccauccacgccgaccagcugacgcccaccuggcggguguacuccaccggcagcaacgucuuccagacccgcgccgggugccucaucggcgcggagcacgugaacaacuccuacgagugcgacauccccaucggggccggcaucugcgccagcuaccagacgcagaccaacuccccgcggcgcgcccggagcguggcgucccagagcaucaucgccuacaccaugucccugggcgccgagaacagcgucgccuacuccaacaacagcaucgccauccccaccaacuucacgaucuccgugaccaccgagauccugcccgugagcaugaccaagacgagcgucgacugcaccauguacaucugcggggacuccaccgagugcagcaaccuccugcugcaguacggcuccuucugcacccagcucaaccgcgcgcugacggggaucgccguggagcaggacaagaacacccaggagguguucgcccaggucaagcagaucuacaagacgcccccgaucaaggacuucggcggguucaacuucagccagauccugcccgaccccuccaagcccagcaagcgguccuucaucgaggaccuccuguucaacaaggugacccuggccgacgccggcuucaucaagcaguacggcgacugccucggggacaucgcggcccgcgaccugaucugcgcccagaaguucaacggccugaccgugcucccgccccugcugaccgacgagaugaucgcccaguacaccagcgcccuccuggcggggaccaucacguccggcuggaccuucggggccggcgccgcccugcagauccccuucgcgaugcagauggccuaccgguucaacggcaucggggucacccagaacgugcucuacgagaaccagaagcugaucgccaaccaguucaacagcgccaucggcaagauccaggacucccugagcuccaccgccagcgcgcucgggaagcugcaggacguggucaaccagaacgcccaggcccugaacacgcucgugaagcagcuguccagcaacuucggcgccaucuccagcgugcugaacgacauccucucccgccuggacccgcccgaggccgaggugcagaucgaccggcugaucaccgggcgccuccagagccugcagaccuacgugacccagcagcugauccgggcggccgagauccgcgccagcgccaaccucgccgcgaccaagauguccgagugcguccugggccagagcaagcggguggacuucugcggcaagggguaccaccugauguccuucccccagagcgccccgcacggcguggucuuccuccacgugacguacguccccgcccaggagaagaacuucaccaccgcccccgcgaucugccacgacgggaaggcccacuucccccgcgagggcguguucguguccaacgggacccacugguucgucacgcagcggaacuucuacgagccgcagaucaucaccaccgacaacaccuucgugagcggcaacugcgacguggucaucggcaucgugaacaacacgguguacgacccccugcagcccgagcuggacuccuucaaggaggagcucgacaaguacuucaagaaccacaccagccccgacgucgaccugggggacaucuccggcaucaacgccagcguggugaacauccagaaggagaucgaccgccugaacgaggucgccaagaaccucaacgagucccugaucgaccugcaggagcucgggaaguacgagcaguacaucaaguggccgugguacaucuggcugggcuucaucgccggccugaucgcgaucgugauggugaccaucaugcucugcugcaugaccagcugcugcuccugccugaaggggugcugcagcugcggcuccugcugcaaguucgacgaggacgacagcgagcccguccugaagggggugaagcuccacuacacgugaggacuagucccuguucccagagcccacuuuuuuuucuuuuuuugaaauaaaauagccugucuuucagaucucaaaggcucuuuucagagccaccaaaaaaaaaaaaaaaaaaaaaaaaaaaaaaaaaaaaaaaaaaaaaaaaaaaaaaaaaaaaaaaaaaaaaaaaaaaaaaaaaaaaaaaaaaaaaaaaaaaaa

SEQ ID NO: 23743 - RNA, 4185 nt, Artificial Sequence
  SARS-CoV-2/Wuhan/WIV05/2019__EPI_ISL_402128 spike protein mRNA gc (1-1273)(K986P_V987P_H69del_V70del_D614G)
aggagagggcgcuuggcuugcaaggacccugagcugcggcauugaagcacacccaacccaacucgacugaagucagccucacugaaccggaucugagaaucuucucucucugggcuugccagggcucuccgaaccuagcuagcauccucuucaauuccaacuagaaagcuuaccauguucguguuccugguccuccugccccuggugagcucccagugcgugaaccucaccacccgcacgcagcugccgcccgccuacaccaacagcuucacccggggcgucuacuaccccgacaagguguuccgcuccagcgugcugcacuccacccaggaccucuuccugcccuucuucagcaacgucacgugguuccacgccaucuccgggaccaacggcaccaagcgguucgacaacccggugcugcccuucaacgacggggucuacuucgcgagcaccgagaaguccaacaucauccgcggcuggaucuucgggacgacccucgacagcaagacccagucccugcugaucgugaacaacgccaccaacguggucaucaaggugugcgaguuccaguucugcaacgaccccuuccucggcguguacuaccacaagaacaacaagagcuggauggaguccgaguuccgggucuacagcuccgccaacaacugcacguucgaguacgugagccagcccuuccugauggaccuggagggcaagcaggggaacuucaagaaccuccgcgaguucguguucaagaacaucgacggcuacuucaagaucuacuccaagcacaccccgaucaaccugguccgggaccugccccagggguucagcgcccucgagccccugguggaccugcccaucggcaucaacaucacccgcuuccagacccuccuggcccugcaccgguccuaccucacgccgggggacagcagcuccggcuggaccgcgggcgccgccgccuacuacgugggguaccugcagccccgcaccuuccugcucaaguacaacgagaacggcaccaucacggacgcggucgacugcgcccuggacccccugagcgagaccaagugcacccucaaguccuucaccguggagaaggggaucuaccagacgagcaacuuccgggugcagcccaccgaguccaucguccgcuucccgaacaucaccaaccugugccccuucggcgagguguucaacgccacccgguucgccagcgucuacgccuggaaccgcaagcggaucuccaacugcguggcggacuacagcgugcuguacaacuccgccagcuucuccacguucaagugcuacggcgucagccccaccaagcucaacgaccugugcuucaccaacguguacgccgacuccuucgugauccgcggggacgagguccggcagaucgcccccggccagaccgggaagaucgccgacuacaacuacaagcugccggacgacuucacgggcugcgugaucgcguggaacagcaacaaccucgacuccaaggucgggggcaacuacaacuaccuguaccgccuguuccgcaagagcaaccucaagcccuucgagcgggacaucuccaccgagaucuaccaggccggcagcacccccugcaacgggguggagggcuucaacugcuacuucccccugcaguccuacggguuccagccgaccaacggcgugggguaccagcccuaccggguggucgugcugagcuucgagcuccugcacgcccccgccacggugugcggccccaagaaguccaccaaccuggucaagaacaagugcgugaacuucaacuucaacggccucaccgggaccggcgugcugaccgagagcaacaagaaguuccugccguuccagcaguucgggcgcgacaucgccgacacgaccgacgcgguccgcgacccccagacccuggagauccucgacaucacccccugcagcuucggcgggguguccgugaucacgccgggcaccaacaccagcaaccaggucgccgugcuguaccagggcgugaacugcaccgagguccccguggccauccacgccgaccagcugacgcccaccuggcggguguacuccaccggcagcaacgucuuccagacccgcgccgggugccucaucggcgcggagcacgugaacaacuccuacgagugcgacauccccaucggggccggcaucugcgccagcuaccagacgcagaccaacuccccgcggcgcgcccggagcguggcgucccagagcaucaucgccuacaccaugucccugggcgccgagaacagcgucgccuacuccaacaacagcaucgccauccccaccaacuucacgaucuccgugaccaccgagauccugcccgugagcaugaccaagacgagcgucgacugcaccauguacaucugcggggacuccaccgagugcagcaaccuccugcugcaguacggcuccuucugcacccagcucaaccgcgcgcugacggggaucgccguggagcaggacaagaacacccaggagguguucgcccaggucaagcagaucuacaagacgcccccgaucaaggacuucggcggguucaacuucagccagauccugcccgaccccuccaagcccagcaagcgguccuucaucgaggaccuccuguucaacaaggugacccuggccgacgccggcuucaucaagcaguacggcgacugccucggggacaucgcggcccgcgaccugaucugcgcccagaaguucaacggccugaccgugcucccgccccugcugaccgacgagaugaucgcccaguacaccagcgcccuccuggcggggaccaucacguccggcuggaccuucggggccggcgccgcccugcagauccccuucgcgaugcagauggccuaccgguucaacggcaucggggucacccagaacgugcucuacgagaaccagaagcugaucgccaaccaguucaacagcgccaucggcaagauccaggacucccugagcuccaccgccagcgcgcucgggaagcugcaggacguggucaaccagaacgcccaggcccugaacacgcucgugaagcagcuguccagcaacuucggcgccaucuccagcgugcugaacgacauccucucccgccuggacccgcccgaggccgaggugcagaucgaccggcugaucaccgggcgccuccagagccugcagaccuacgugacccagcagcugauccgggcggccgagauccgcgccagcgccaaccucgccgcgaccaagauguccgagugcguccugggccagagcaagcggguggacuucugcggcaagggguaccaccugauguccuucccccagagcgccccgcacggcguggucuuccuccacgugacguacguccccgcccaggagaagaacuucaccaccgcccccgcgaucugccacgacgggaaggcccacuucccccgcgagggcguguucguguccaacgggacccacugguucgucacgcagcggaacuucuacgagccgcagaucaucaccaccgacaacaccuucgugagcggcaacugcgacguggucaucggcaucgugaacaacacgguguacgacccccugcagcccgagcuggacuccuucaaggaggagcucgacaaguacuucaagaaccacaccagccccgacgucgaccugggggacaucuccggcaucaacgccagcguggugaacauccagaaggagaucgaccgccugaacgaggucgccaagaaccucaacgagucccugaucgaccugcaggagcucgggaaguacgagcaguacaucaaguggccgugguacaucuggcugggcuucaucgccggccugaucgcgaucgugauggugaccaucaugcucugcugcaugaccagcugcugcuccugccugaaggggugcugcagcugcggcuccugcugcaaguucgacgaggacgacagcgagcccguccugaagggggugaagcuccacuacacgugaggacuagucccuguucccagagcccacuuuuuuuucuuuuuuugaaauaaaauagccugucuuucagaucucaaaggcucuuuucagagccaccaaaaaaaaaaaaaaaaaaaaaaaaaaaaaaaaaaaaaaaaaaaaaaaaaaaaaaaaaaaaaaaaaaaaaaaaaaaaaaaaaaaaaaaaaaaaaaaaaaaaa

SEQ ID NO: 23744 - RNA, 4191 nt, Artificial Sequence
  SARS-CoV-2/Wuhan/WIV05/2019__EPI_ISL_402128 spike protein mRNA gc (1-1273)(K986P_V987P_Y453F_D614G)
aggagagggcgcuuggcuugcaaggacccugagcugcggcauugaagcacacccaacccaacucgacugaagucagccucacugaaccggaucugagaaucuucucucucugggcuugccagggcucuccgaaccuagcuagcauccucuucaauuccaacuagaaagcuuaccauguucguguuccugguccuccugccccuggugagcucccagugcgugaaccucaccacccgcacgcagcugccgcccgccuacaccaacagcuucacccggggcgucuacuaccccgacaagguguuccgcuccagcgugcugcacuccacccaggaccucuuccugcccuucuucagcaacgucacgugguuccacgccauccacguguccgggaccaacggcaccaagcgguucgacaacccggugcugcccuucaacgacggggucuacuucgcgagcaccgagaaguccaacaucauccgcggcuggaucuucgggacgacccucgacagcaagacccagucccugcugaucgugaacaacgccaccaacguggucaucaaggugugcgaguuccaguucugcaacgaccccuuccucggcguguacuaccacaagaacaacaagagcuggauggaguccgaguuccgggucuacagcuccgccaacaacugcacguucgaguacgugagccagcccuuccugauggaccuggagggcaagcaggggaacuucaagaaccuccgcgaguucguguucaagaacaucgacggcuacuucaagaucuacuccaagcacaccccgaucaaccugguccgggaccugccccagggguucagcgcccucgagccccugguggaccugcccaucggcaucaacaucacccgcuuccagacccuccuggcccugcaccgguccuaccucacgccgggggacagcagcuccggcuggaccgcgggcgccgccgccuacuacgugggguaccugcagccccgcaccuuccugcucaaguacaacgagaacggcaccaucacggacgcggucgacugcgcccuggacccccugagcgagaccaagugcacccucaaguccuucaccguggagaaggggaucuaccagacgagcaacuuccgggugcagcccaccgaguccaucguccgcuucccgaacaucaccaaccugugccccuucggcgagguguucaacgccacccgguucgccagcgucuacgccuggaaccgcaagcggaucuccaacugcguggcggacuacagcgugcuguacaacuccgccagcuucuccacguucaagugcuacggcgucagccccaccaagcucaacgaccugugcuucaccaacguguacgccgacuccuucgugauccgcggggacgagguccggcagaucgcccccggccagaccgggaagaucgccgacuacaacuacaagcugccggacgacuucacgggcugcgugaucgcguggaacagcaacaaccucgacuccaaggucgggggcaacuacaacuaccuguuccgccuguuccgcaagagcaaccucaagcccuucgagcgggacaucuccaccgagaucuaccaggccggcagcacccccugcaacgggguggagggcuucaacugcuacuucccccugcaguccuacggguuccagccgaccaacggcgugggguaccagcccuaccggguggucgugcugagcuucgagcuccugcacgcccccgccacggugugcggccccaagaaguccaccaaccuggucaagaacaagugcgugaacuucaacuucaacggccucaccgggaccggcgugcugaccgagagcaacaagaaguuccugccguuccagcaguucgggcgcgacaucgccgacacgaccgacgcgguccgcgacccccagacccuggagauccucgacaucacccccugcagcuucggcgggguguccgugaucacgccgggcaccaacaccagcaaccaggucgccgugcuguaccagggcgugaacugcaccgagguccccguggccauccacgccgaccagcugacgcccaccuggcggguguacuccaccggcagcaacgucuuccagacccgcgccgggugccucaucggcgcggagcacgugaacaacuccuacgagugcgacauccccaucggggccggcaucugcgccagcuaccagacgcagaccaacuccccgcggcgcgcccggagcguggcgucccagagcaucaucgccuacaccaugucccugggcgccgagaacagcgucgccuacuccaacaacagcaucgccauccccaccaacuucacgaucuccgugaccaccgagauccugcccgugagcaugaccaagacgagcgucgacugcaccauguacaucugcggggacuccaccgagugcagcaaccuccugcugcaguacggcuccuucugcacccagcucaaccgcgcgcugacggggaucgccguggagcaggacaagaacacccaggagguguucgcccaggucaagcagaucuacaagacgcccccgaucaaggacuucggcggguucaacuucagccagauccugcccgaccccuccaagcccagcaagcgguccuucaucgaggaccuccuguucaacaaggugacccuggccgacgccggcuucaucaagcaguacggcgacugccucggggacaucgcggcccgcgaccugaucugcgcccagaaguucaacggccugaccgugcucccgccccugcugaccgacgagaugaucgcccaguacaccagcgcccuccuggcggggaccaucacguccggcuggaccuucggggccggcgccgcccugcagauccccuucgcgaugcagauggccuaccgguucaacggcaucggggucacccagaacgugcucuacgagaaccagaagcugaucgccaaccaguucaacagcgccaucggcaagauccaggacucccugagcuccaccgccagcgcgcucgggaagcugcaggacguggucaaccagaacgcccaggcccugaacacgcucgugaagcagcuguccagcaacuucggcgccaucuccagcgugcugaacgacauccucucccgccuggacccgcccgaggccgaggugcagaucgaccggcugaucaccgggcgccuccagagccugcagaccuacgugacccagcagcugauccgggcggccgagauccgcgccagcgccaaccucgccgcgaccaagauguccgagugcguccugggccagagcaagcggguggacuucugcggcaagggguaccaccugauguccuucccccagagcgccccgcacggcguggucuuccuccacgugacguacguccccgcccaggagaagaacuucaccaccgcccccgcgaucugccacgacgggaaggcccacuucccccgcgagggcguguucguguccaacgggacccacugguucgucacgcagcggaacuucuacgagccgcagaucaucaccaccgacaacaccuucgugagcggcaacugcgacguggucaucggcaucgugaacaacacgguguacgacccccugcagcccgagcuggacuccuucaaggaggagcucgacaaguacuucaagaaccacaccagccccgacgucgaccugggggacaucuccggcaucaacgccagcguggugaacauccagaaggagaucgaccgccugaacgaggucgccaagaaccucaacgagucccugaucgaccugcaggagcucgggaaguacgagcaguacaucaaguggccgugguacaucuggcugggcuucaucgccggccugaucgcgaucgugauggugaccaucaugcucugcugcaugaccagcugcugcuccugccugaaggggugcugcagcugcggcuccugcugcaaguucgacgaggacgacagcgagcccguccugaagggggugaagcuccacuacacgugaggacuagucccuguucccagagcccacuuuuuuuucuuuuuuugaaauaaaauagccugucuuucagaucucaaaggcucuuuucagagccaccaaaaaaaaaaaaaaaaaaaaaaaaaaaaaaaaaaaaaaaaaaaaaaaaaaaaaaaaaaaaaaaaaaaaaaaaaaaaaaaaaaaaaaaaaaaaaaaaaaaaa

SEQ ID NO: 23745 - RNA, 4191 nt, Artificial Sequence
  SARS-CoV-2/Wuhan/WIV05/2019__EPI_ISL_402128 spike protein mRNA gc (1-1273)(K986P_V987P_D614G_I692V)
aggagagggcgcuuggcuugcaaggacccugagcugcggcauugaagcacacccaacccaacucgacugaagucagccucacugaaccggaucugagaaucuucucucucugggcuugccagggcucuccgaaccuagcuagcauccucuucaauuccaacuagaaagcuuaccauguucguguuccugguccuccugccccuggugagcucccagugcgugaaccucaccacccgcacgcagcugccgcccgccuacaccaacagcuucacccggggcgucuacuaccccgacaagguguuccgcuccagcgugcugcacuccacccaggaccucuuccugcccuucuucagcaacgucacgugguuccacgccauccacguguccgggaccaacggcaccaagcgguucgacaacccggugcugcccuucaacgacggggucuacuucgcgagcaccgagaaguccaacaucauccgcggcuggaucuucgggacgacccucgacagcaagacccagucccugcugaucgugaacaacgccaccaacguggucaucaaggugugcgaguuccaguucugcaacgaccccuuccucggcguguacuaccacaagaacaacaagagcuggauggaguccgaguuccgggucuacagcuccgccaacaacugcacguucgaguacgugagccagcccuuccugauggaccuggagggcaagcaggggaacuucaagaaccuccgcgaguucguguucaagaacaucgacggcuacuucaagaucuacuccaagcacaccccgaucaaccugguccgggaccugccccagggguucagcgcccucgagccccugguggaccugcccaucggcaucaacaucacccgcuuccagacccuccuggcccugcaccgguccuaccucacgccgggggacagcagcuccggcuggaccgcgggcgccgccgccuacuacgugggguaccugcagccccgcaccuuccugcucaaguacaacgagaacggcaccaucacggacgcggucgacugcgcccuggacccccugagcgagaccaagugcacccucaaguccuucaccguggagaaggggaucuaccagacgagcaacuuccgggugcagcccaccgaguccaucguccgcuucccgaacaucaccaaccugugccccuucggcgagguguucaacgccacccgguucgccagcgucuacgccuggaaccgcaagcggaucuccaacugcguggcggacuacagcgugcuguacaacuccgccagcuucuccacguucaagugcuacggcgucagccccaccaagcucaacgaccugugcuucaccaacguguacgccgacuccuucgugauccgcggggacgagguccggcagaucgcccccggccagaccgggaagaucgccgacuacaacuacaagcugccggacgacuucacgggcugcgugaucgcguggaacagcaacaaccucgacuccaaggucgggggcaacuacaacuaccuguaccgccuguuccgcaagagcaaccucaagcccuucgagcgggacaucuccaccgagaucuaccaggccggcagcacccccugcaacgggguggagggcuucaacugcuacuucccccugcaguccuacggguuccagccgaccaacggcgugggguaccagcccuaccggguggucgugcugagcuucgagcuccugcacgcccccgccacggugugcggccccaagaaguccaccaaccuggucaagaacaagugcgugaacuucaacuucaacggccucaccgggaccggcgugcugaccgagagcaacaagaaguuccugccguuccagcaguucgggcgcgacaucgccgacacgaccgacgcgguccgcgacccccagacccuggagauccucgacaucacccccugcagcuucggcgggguguccgugaucacgccgggcaccaacaccagcaaccaggucgccgugcuguaccagggcgugaacugcaccgagguccccguggccauccacgccgaccagcugacgcccaccuggcggguguacuccaccggcagcaacgucuuccagacccgcgccgggugccucaucggcgcggagcacgugaacaacuccuacgagugcgacauccccaucggggccggcaucugcgccagcuaccagacgcagaccaacuccccgcggcgcgcccggagcguggcgucccagagcgucaucgccuacaccaugucccugggcgccgagaacagcgucgccuacuccaacaacagcaucgccauccccaccaacuucacgaucuccgugaccaccgagauccugcccgugagcaugaccaagacgagcgucgacugcaccauguacaucugcggggacuccaccgagugcagcaaccuccugcugcaguacggcuccuucugcacccagcucaaccgcgcgcugacggggaucgccguggagcaggacaagaacacccaggagguguucgcccaggucaagcagaucuacaagacgcccccgaucaaggacuucggcggguucaacuucagccagauccugcccgaccccuccaagcccagcaagcgguccuucaucgaggaccuccuguucaacaaggugacccuggccgacgccggcuucaucaagcaguacggcgacugccucggggacaucgcggcccgcgaccugaucugcgcccagaaguucaacggccugaccgugcucccgccccugcugaccgacgagaugaucgcccaguacaccagcgcccuccuggcggggaccaucacguccggcuggaccuucggggccggcgccgcccugcagauccccuucgcgaugcagauggccuaccgguucaacggcaucggggucacccagaacgugcucuacgagaaccagaagcugaucgccaaccaguucaacagcgccaucggcaagauccaggacucccugagcuccaccgccagcgcgcucgggaagcugcaggacguggucaaccagaacgcccaggcccugaacacgcucgugaagcagcuguccagcaacuucggcgccaucuccagcgugcugaacgacauccucucccgccuggacccgcccgaggccgaggugcagaucgaccggcugaucaccgggcgccuccagagccugcagaccuacgugacccagcagcugauccgggcggccgagauccgcgccagcgccaaccucgccgcgaccaagauguccgagugcguccugggccagagcaagcggguggacuucugcggcaagggguaccaccugauguccuucccccagagcgccccgcacggcguggucuuccuccacgugacguacguccccgcccaggagaagaacuucaccaccgcccccgcgaucugccacgacgggaaggcccacuucccccgcgagggcguguucguguccaacgggacccacugguucgucacgcagcggaacuucuacgagccgcagaucaucaccaccgacaacaccuucgugagcggcaacugcgacguggucaucggcaucgugaacaacacgguguacgacccccugcagcccgagcuggacuccuucaaggaggagcucgacaaguacuucaagaaccacaccagccccgacgucgaccugggggacaucuccggcaucaacgccagcguggugaacauccagaaggagaucgaccgccugaacgaggucgccaagaaccucaacgagucccugaucgaccugcaggagcucgggaaguacgagcaguacaucaaguggccgugguacaucuggcugggcuucaucgccggccugaucgcgaucgugauggugaccaucaugcucugcugcaugaccagcugcugcuccugccugaaggggugcugcagcugcggcuccugcugcaaguucgacgaggacgacagcgagcccguccugaagggggugaagcuccacuacacgugaggacuagucccuguucccagagcccacuuuuuuuucuuuuuuugaaauaaaauagccugucuuucagaucucaaaggcucuuuucagagccaccaaaaaaaaaaaaaaaaaaaaaaaaaaaaaaaaaaaaaaaaaaaaaaaaaaaaaaaaaaaaaaaaaaaaaaaaaaaaaaaaaaaaaaaaaaaaaaaaaaaaa

SEQ ID NO: 23746 - RNA, 4191 nt, Artificial Sequence
  SARS-CoV-2/Wuhan/WIV05/2019__EPI_ISL_402128 spike protein mRNA gc (1-1273)(K986P_V987P_D614G_M1229I)
aggagagggcgcuuggcuugcaaggacccugagcugcggcauugaagcacacccaacccaacucgacugaagucagccucacugaaccggaucugagaaucuucucucucugggcuugccagggcucuccgaaccuagcuagcauccucuucaauuccaacuagaaagcuuaccauguucguguuccugguccuccugccccuggugagcucccagugcgugaaccucaccacccgcacgcagcugccgcccgccuacaccaacagcuucacccggggcgucuacuaccccgacaagguguuccgcuccagcgugcugcacuccacccaggaccucuuccugcccuucuucagcaacgucacgugguuccacgccauccacguguccgggaccaacggcaccaagcgguucgacaacccggugcugcccuucaacgacggggucuacuucgcgagcaccgagaaguccaacaucauccgcggcuggaucuucgggacgacccucgacagcaagacccagucccugcugaucgugaacaacgccaccaacguggucaucaaggugugcgaguuccaguucugcaacgaccccuuccucggcguguacuaccacaagaacaacaagagcuggauggaguccgaguuccgggucuacagcuccgccaacaacugcacguucgaguacgugagccagcccuuccugauggaccuggagggcaagcaggggaacuucaagaaccuccgcgaguucguguucaagaacaucgacggcuacuucaagaucuacuccaagcacaccccgaucaaccugguccgggaccugccccagggguucagcgcccucgagccccugguggaccugcccaucggcaucaacaucacccgcuuccagacccuccuggcccugcaccgguccuaccucacgccgggggacagcagcuccggcuggaccgcgggcgccgccgccuacuacgugggguaccugcagccccgcaccuuccugcucaaguacaacgagaacggcaccaucacggacgcggucgacugcgcccuggacccccugagcgagaccaagugcacccucaaguccuucaccguggagaaggggaucuaccagacgagcaacuuccgggugcagcccaccgaguccaucguccgcuucccgaacaucaccaaccugugccccuucggcgagguguucaacgccacccgguucgccagcgucuacgccuggaaccgcaagcggaucuccaacugcguggcggacuacagcgugcuguacaacuccgccagcuucuccacguucaagugcuacggcgucagccccaccaagcucaacgaccugugcuucaccaacguguacgccgacuccuucgugauccgcggggacgagguccggcagaucgcccccggccagaccgggaagaucgccgacuacaacuacaagcugccggacgacuucacgggcugcgugaucgcguggaacagcaacaaccucgacuccaaggucgggggcaacuacaacuaccuguaccgccuguuccgcaagagcaaccucaagcccuucgagcgggacaucuccaccgagaucuaccaggccggcagcacccccugcaacgggguggagggcuucaacugcuacuucccccugcaguccuacggguuccagccgaccaacggcgugggguaccagcccuaccggguggucgugcugagcuucgagcuccugcacgcccccgccacggugugcggccccaagaaguccaccaaccuggucaagaacaagugcgugaacuucaacuucaacggccucaccgggaccggcgugcugaccgagagcaacaagaaguuccugccguuccagcaguucgggcgcgacaucgccgacacgaccgacgcgguccgcgacccccagacccuggagauccucgacaucacccccugcagcuucggcgggguguccgugaucacgccgggcaccaacaccagcaaccaggucgccgugcuguaccagggcgugaacugcaccgagguccccguggccauccacgccgaccagcugacgcccaccuggcggguguacuccaccggcagcaacgucuuccagacccgcgccgggugccucaucggcgcggagcacgugaacaacuccuacgagugcgacauccccaucggggccggcaucugcgccagcuaccagacgcagaccaacuccccgcggcgcgcccggagcguggcgucccagagcaucaucgccuacaccaugucccugggcgccgagaacagcgucgccuacuccaacaacagcaucgccauccccaccaacuucacgaucuccgugaccaccgagauccugcccgugagcaugaccaagacgagcgucgacugcaccauguacaucugcggggacuccaccgagugcagcaaccuccugcugcaguacggcuccuucugcacccagcucaaccgcgcgcugacggggaucgccguggagcaggacaagaacacccaggagguguucgcccaggucaagcagaucuacaagacgcccccgaucaaggacuucggcggguucaacuucagccagauccugcccgaccccuccaagcccagcaagcgguccuucaucgaggaccuccuguucaacaaggugacccuggccgacgccggcuucaucaagcaguacggcgacugccucggggacaucgcggcccgcgaccugaucugcgcccagaaguucaacggccugaccgugcucccgccccugcugaccgacgagaugaucgcccaguacaccagcgcccuccuggcggggaccaucacguccggcuggaccuucggggccggcgccgcccugcagauccccuucgcgaugcagauggccuaccgguucaacggcaucggggucacccagaacgugcucuacgagaaccagaagcugaucgccaaccaguucaacagcgccaucggcaagauccaggacucccugagcuccaccgccagcgcgcucgggaagcugcaggacguggucaaccagaacgcccaggcccugaacacgcucgugaagcagcuguccagcaacuucggcgccaucuccagcgugcugaacgacauccucucccgccuggacccgcccgaggccgaggugcagaucgaccggcugaucaccgggcgccuccagagccugcagaccuacgugacccagcagcugauccgggcggccgagauccgcgccagcgccaaccucgccgcgaccaagauguccgagugcguccugggccagagcaagcggguggacuucugcggcaagggguaccaccugauguccuucccccagagcgccccgcacggcguggucuuccuccacgugacguacguccccgcccaggagaagaacuucaccaccgcccccgcgaucugccacgacgggaaggcccacuucccccgcgagggcguguucguguccaacgggacccacugguucgucacgcagcggaacuucuacgagccgcagaucaucaccaccgacaacaccuucgugagcggcaacugcgacguggucaucggcaucgugaacaacacgguguacgacccccugcagcccgagcuggacuccuucaaggaggagcucgacaaguacuucaagaaccacaccagccccgacgucgaccugggggacaucuccggcaucaacgccagcguggugaacauccagaaggagaucgaccgccugaacgaggucgccaagaaccucaacgagucccugaucgaccugcaggagcucgggaaguacgagcaguacaucaaguggccgugguacaucuggcugggcuucaucgccggccugaucgcgaucgugaucgugaccaucaugcucugcugcaugaccagcugcugcuccugccugaaggggugcugcagcugcggcuccugcugcaaguucgacgaggacgacagcgagcccguccugaagggggugaagcuccacuacacgugaggacuagucccuguucccagagcccacuuuuuuuucuuuuuuugaaauaaaauagccugucuuucagaucucaaaggcucuuuucagagccaccaaaaaaaaaaaaaaaaaaaaaaaaaaaaaaaaaaaaaaaaaaaaaaaaaaaaaaaaaaaaaaaaaaaaaaaaaaaaaaaaaaaaaaaaaaaaaaaaaaaaa

SEQ ID NO: 23747 - RNA, 4185 nt, Artificial Sequence
  SARS-CoV-2/Wuhan/WIV05/2019__EPI_ISL_402128 spike protein mRNA gc (1-1273)(K986P_V987P_H69del_V70del_A222V_Y453F_S477N_D614G_I692V)
aggagagggcgcuuggcuugcaaggacccugagcugcggcauugaagcacacccaacccaacucgacugaagucagccucacugaaccggaucugagaaucuucucucucugggcuugccagggcucuccgaaccuagcuagcauccucuucaauuccaacuagaaagcuuaccauguucguguuccugguccuccugccccuggugagcucccagugcgugaaccucaccacccgcacgcagcugccgcccgccuacaccaacagcuucacccggggcgucuacuaccccgacaagguguuccgcuccagcgugcugcacuccacccaggaccucuuccugcccuucuucagcaacgucacgugguuccacgccaucuccgggaccaacggcaccaagcgguucgacaacccggugcugcccuucaacgacggggucuacuucgcgagcaccgagaaguccaacaucauccgcggcuggaucuucgggacgacccucgacagcaagacccagucccugcugaucgugaacaacgccaccaacguggucaucaaggugugcgaguuccaguucugcaacgaccccuuccucggcguguacuaccacaagaacaacaagagcuggauggaguccgaguuccgggucuacagcuccgccaacaacugcacguucgaguacgugagccagcccuuccugauggaccuggagggcaagcaggggaacuucaagaaccuccgcgaguucguguucaagaacaucgacggcuacuucaagaucuacuccaagcacaccccgaucaaccugguccgggaccugccccagggguucagcguccucgagccccugguggaccugcccaucggcaucaacaucacccgcuuccagacccuccuggcccugcaccgguccuaccucacgccgggggacagcagcuccggcuggaccgcgggcgccgccgccuacuacgugggguaccugcagccccgcaccuuccugcucaaguacaacgagaacggcaccaucacggacgcggucgacugcgcccuggacccccugagcgagaccaagugcacccucaaguccuucaccguggagaaggggaucuaccagacgagcaacuuccgggugcagcccaccgaguccaucguccgcuucccgaacaucaccaaccugugccccuucggcgagguguucaacgccacccgguucgccagcgucuacgccuggaaccgcaagcggaucuccaacugcguggcggacuacagcgugcuguacaacuccgccagcuucuccacguucaagugcuacggcgucagccccaccaagcucaacgaccugugcuucaccaacguguacgccgacuccuucgugauccgcggggacgagguccggcagaucgcccccggccagaccgggaagaucgccgacuacaacuacaagcugccggacgacuucacgggcugcgugaucgcguggaacagcaacaaccucgacuccaaggucgggggcaacuacaacuaccuguuccgccuguuccgcaagagcaaccucaagcccuucgagcgggacaucuccaccgagaucuaccaggccggcaacacccccugcaacgggguggagggcuucaacugcuacuucccccugcaguccuacggguuccagccgaccaacggcgugggguaccagcccuaccggguggucgugcugagcuucgagcuccugcacgcccccgccacggugugcggccccaagaaguccaccaaccuggucaagaacaagugcgugaacuucaacuucaacggccucaccgggaccggcgugcugaccgagagcaacaagaaguuccugccguuccagcaguucgggcgcgacaucgccgacacgaccgacgcgguccgcgacccccagacccuggagauccucgacaucacccccugcagcuucggcgggguguccgugaucacgccgggcaccaacaccagcaaccaggucgccgugcuguaccagggcgugaacugcaccgagguccccguggccauccacgccgaccagcugacgcccaccuggcggguguacuccaccggcagcaacgucuuccagacccgcgccgggugccucaucggcgcggagcacgugaacaacuccuacgagugcgacauccccaucggggccggcaucugcgccagcuaccagacgcagaccaacuccccgcggcgcgcccggagcguggcgucccagagcgucaucgccuacaccaugucccugggcgccgagaacagcgucgccuacuccaacaacagcaucgccauccccaccaacuucacgaucuccgugaccaccgagauccugcccgugagcaugaccaagacgagcgucgacugcaccauguacaucugcggggacuccaccgagugcagcaaccuccugcugcaguacggcuccuucugcacccagcucaaccgcgcgcugacggggaucgccguggagcaggacaagaacacccaggagguguucgcccaggucaagcagaucuacaagacgcccccgaucaaggacuucggcggguucaacuucagccagauccugcccgaccccuccaagcccagcaagcgguccuucaucgaggaccuccuguucaacaaggugacccuggccgacgccggcuucaucaagcaguacggcgacugccucggggacaucgcggcccgcgaccugaucugcgcccagaaguucaacggccugaccgugcucccgccccugcugaccgacgagaugaucgcccaguacaccagcgcccuccuggcggggaccaucacguccggcuggaccuucggggccggcgccgcccugcagauccccuucgcgaugcagauggccuaccgguucaacggcaucggggucacccagaacgugcucuacgagaaccagaagcugaucgccaaccaguucaacagcgccaucggcaagauccaggacucccugagcuccaccgccagcgcgcucgggaagcugcaggacguggucaaccagaacgcccaggcccugaacacgcucgugaagcagcuguccagcaacuucggcgccaucuccagcgugcugaacgacauccucucccgccuggacccgcccgaggccgaggugcagaucgaccggcugaucaccgggcgccuccagagccugcagaccuacgugacccagcagcugauccgggcggccgagauccgcgccagcgccaaccucgccgcgaccaagauguccgagugcguccugggccagagcaagcggguggacuucugcggcaagggguaccaccugauguccuucccccagagcgccccgcacggcguggucuuccuccacgugacguacguccccgcccaggagaagaacuucaccaccgcccccgcgaucugccacgacgggaaggcccacuucccccgcgagggcguguucguguccaacgggacccacugguucgucacgcagcggaacuucuacgagccgcagaucaucaccaccgacaacaccuucgugagcggcaacugcgacguggucaucggcaucgugaacaacacgguguacgacccccugcagcccgagcuggacuccuucaaggaggagcucgacaaguacuucaagaaccacaccagccccgacgucgaccugggggacaucuccggcaucaacgccagcguggugaacauccagaaggagaucgaccgccugaacgaggucgccaagaaccucaacgagucccugaucgaccugcaggagcucgggaaguacgagcaguacaucaaguggccgugguacaucuggcugggcuucaucgccggccugaucgcgaucgugauggugaccaucaugcucugcugcaugaccagcugcugcuccugccugaaggggugcugcagcugcggcuccugcugcaaguucgacgaggacgacagcgagcccguccugaagggggugaagcuccacuacacgugaggacuagucccuguucccagagcccacuuuuuuuucuuuuuuugaaauaaaauagccugucuuucagaucucaaaggcucuuuucagagccaccaaaaaaaaaaaaaaaaaaaaaaaaaaaaaaaaaaaaaaaaaaaaaaaaaaaaaaaaaaaaaaaaaaaaaaaaaaaaaaaaaaaaaaaaaaaaaaaaaaaaa

SEQ ID NO: 23748 - RNA, 4185 nt, Artificial Sequence
  SARS-CoV-2/Wuhan/WIV05/2019__EPI_ISL_402128 spike protein mRNA gc (1-1273)(K986P_V987P_H69del_V70del_Y453F_D614G_I692V_M1229I)
aggagagggcgcuuggcuugcaaggacccugagcugcggcauugaagcacacccaacccaacucgacugaagucagccucacugaaccggaucugagaaucuucucucucugggcuugccagggcucuccgaaccuagcuagcauccucuucaauuccaacuagaaagcuuaccauguucguguuccugguccuccugccccuggugagcucccagugcgugaaccucaccacccgcacgcagcugccgcccgccuacaccaacagcuucacccggggcgucuacuaccccgacaagguguuccgcuccagcgugcugcacuccacccaggaccucuuccugcccuucuucagcaacgucacgugguuccacgccaucuccgggaccaacggcaccaagcgguucgacaacccggugcugcccuucaacgacggggucuacuucgcgagcaccgagaaguccaacaucauccgcggcuggaucuucgggacgacccucgacagcaagacccagucccugcugaucgugaacaacgccaccaacguggucaucaaggugugcgaguuccaguucugcaacgaccccuuccucggcguguacuaccacaagaacaacaagagcuggauggaguccgaguuccgggucuacagcuccgccaacaacugcacguucgaguacgugagccagcccuuccugauggaccuggagggcaagcaggggaacuucaagaaccuccgcgaguucguguucaagaacaucgacggcuacuucaagaucuacuccaagcacaccccgaucaaccugguccgggaccugccccagggguucagcgcccucgagccccugguggaccugcccaucggcaucaacaucacccgcuuccagacccuccuggcccugcaccgguccuaccucacgccgggggacagcagcuccggcuggaccgcgggcgccgccgccuacuacgugggguaccugcagccccgcaccuuccugcucaaguacaacgagaacggcaccaucacggacgcggucgacugcgcccuggacccccugagcgagaccaagugcacccucaaguccuucaccguggagaaggggaucuaccagacgagcaacuuccgggugcagcccaccgaguccaucguccgcuucccgaacaucaccaaccugugccccuucggcgagguguucaacgccacccgguucgccagcgucuacgccuggaaccgcaagcggaucuccaacugcguggcggacuacagcgugcuguacaacuccgccagcuucuccacguucaagugcuacggcgucagccccaccaagcucaacgaccugugcuucaccaacguguacgccgacuccuucgugauccgcggggacgagguccggcagaucgcccccggccagaccgggaagaucgccgacuacaacuacaagcugccggacgacuucacgggcugcgugaucgcguggaacagcaacaaccucgacuccaaggucgggggcaacuacaacuaccuguuccgccuguuccgcaagagcaaccucaagcccuucgagcgggacaucuccaccgagaucuaccaggccggcagcacccccugcaacgggguggagggcuucaacugcuacuucccccugcaguccuacggguuccagccgaccaacggcgugggguaccagcccuaccggguggucgugcugagcuucgagcuccugcacgcccccgccacggugugcggccccaagaaguccaccaaccuggucaagaacaagugcgugaacuucaacuucaacggccucaccgggaccggcgugcugaccgagagcaacaagaaguuccugccguuccagcaguucgggcgcgacaucgccgacacgaccgacgcgguccgcgacccccagacccuggagauccucgacaucacccccugcagcuucggcgggguguccgugaucacgccgggcaccaacaccagcaaccaggucgccgugcuguaccagggcgugaacugcaccgagguccccguggccauccacgccgaccagcugacgcccaccuggcggguguacuccaccggcagcaacgucuuccagacccgcgccgggugccucaucggcgcggagcacgugaacaacuccuacgagugcgacauccccaucggggccggcaucugcgccagcuaccagacgcagaccaacuccccgcggcgcgcccggagcguggcgucccagagcgugaucgccuacaccaugucccugggcgccgagaacagcgucgccuacuccaacaacagcaucgccauccccaccaacuucacgaucuccgugaccaccgagauccugcccgugagcaugaccaagacgagcgucgacugcaccauguacaucugcggggacuccaccgagugcagcaaccuccugcugcaguacggcuccuucugcacccagcucaaccgcgcgcugacggggaucgccguggagcaggacaagaacacccaggagguguucgcccaggucaagcagaucuacaagacgcccccgaucaaggacuucggcggguucaacuucagccagauccugcccgaccccuccaagcccagcaagcgguccuucaucgaggaccuccuguucaacaaggugacccuggccgacgccggcuucaucaagcaguacggcgacugccucggggacaucgcggcccgcgaccugaucugcgcccagaaguucaacggccugaccgugcucccgccccugcugaccgacgagaugaucgcccaguacaccagcgcccuccuggcggggaccaucacguccggcuggaccuucggggccggcgccgcccugcagauccccuucgcgaugcagauggccuaccgguucaacggcaucggggucacccagaacgugcucuacgagaaccagaagcugaucgccaaccaguucaacagcgccaucggcaagauccaggacucccugagcuccaccgccagcgcgcucgggaagcugcaggacguggucaaccagaacgcccaggcccugaacacgcucgugaagcagcuguccagcaacuucggcgccaucuccagcgugcugaacgacauccucucccgccuggacccgcccgaggccgaggugcagaucgaccggcugaucaccgggcgccuccagagccugcagaccuacgugacccagcagcugauccgggcggccgagauccgcgccagcgccaaccucgccgcgaccaagauguccgagugcguccugggccagagcaagcggguggacuucugcggcaagggguaccaccugauguccuucccccagagcgccccgcacggcguggucuuccuccacgugacguacguccccgcccaggagaagaacuucaccaccgcccccgcgaucugccacgacgggaaggcccacuucccccgcgagggcguguucguguccaacgggacccacugguucgucacgcagcggaacuucuacgagccgcagaucaucaccaccgacaacaccuucgugagcggcaacugcgacguggucaucggcaucgugaacaacacgguguacgacccccugcagcccgagcuggacuccuucaaggaggagcucgacaaguacuucaagaaccacaccagccccgacgucgaccugggggacaucuccggcaucaacgccagcguggugaacauccagaaggagaucgaccgccugaacgaggucgccaagaaccucaacgagucccugaucgaccugcaggagcucgggaaguacgagcaguacaucaaguggccgugguacaucuggcugggcuucaucgccggccugaucgcgaucgugaucgugaccaucaugcucugcugcaugaccagcugcugcuccugccugaaggggugcugcagcugcggcuccugcugcaaguucgacgaggacgacagcgagcccguccugaagggggugaagcuccacuacacgugaggacuagucccuguucccagagcccacuuuuuuuucuuuuuuugaaauaaaauagccugucuuucagaucucaaaggcucuuuucagagccaccaaaaaaaaaaaaaaaaaaaaaaaaaaaaaaaaaaaaaaaaaaaaaaaaaaaaaaaaaaaaaaaaaaaaaaaaaaaaaaaaaaaaaaaaaaaaaaaaaaaaa

SEQ ID NO: 23749 - RNA, 4182 nt, Artificial Sequence
  SARS-CoV-2/Wuhan/WIV05/2019__EPI_ISL_402128 spike protein mRNA gc (1-1273)(K986P_V987P_K986P_V987P_H69del_V70del_Y144del_N501Y_A570 D_D614G_P681H_T716I_S982A_D1118H)
aggagagggcgcuuggcuugcaaggacccugagcugcggcauugaagcacacccaacccaacucgacugaagucagccucacugaaccggaucugagaaucuucucucucugggcuugccagggcucuccgaaccuagcuagcauccucuucaauuccaacuagaaagcuuaccauguucguguuccugguccuccugccccuggugagcucccagugcgugaaccucaccacccgcacgcagcugccgcccgccuacaccaacagcuucacccggggcgucuacuaccccgacaagguguuccgcuccagcgugcugcacuccacccaggaccucuuccugcccuucuucagcaacgucacgugguuccacgccaucuccgggaccaacggcaccaagcgguucgacaacccggugcugcccuucaacgacggggucuacuucgcgagcaccgagaaguccaacaucauccgcggcuggaucuucgggacgacccucgacagcaagacccagucccugcugaucgugaacaacgccaccaacguggucaucaaggugugcgaguuccaguucugcaacgaccccuuccucggcguguaccacaagaacaacaagagcuggauggaguccgaguuccgggucuacagcuccgccaacaacugcacguucgaguacgugagccagcccuuccugauggaccuggagggcaagcaggggaacuucaagaaccuccgcgaguucguguucaagaacaucgacggcuacuucaagaucuacuccaagcacaccccgaucaaccugguccgggaccugccccagggguucagcgcccucgagccccugguggaccugcccaucggcaucaacaucacccgcuuccagacccuccuggcccugcaccgguccuaccucacgccgggggacagcagcuccggcuggaccgcgggcgccgccgccuacuacgugggguaccugcagccccgcaccuuccugcucaaguacaacgagaacggcaccaucacggacgcggucgacugcgcccuggacccccugagcgagaccaagugcacccucaaguccuucaccguggagaaggggaucuaccagacgagcaacuuccgggugcagcccaccgaguccaucguccgcuucccgaacaucaccaaccugugccccuucggcgagguguucaacgccacccgguucgccagcgucuacgccuggaaccgcaagcggaucuccaacugcguggcggacuacagcgugcuguacaacuccgccagcuucuccacguucaagugcuacggcgucagccccaccaagcucaacgaccugugcuucaccaacguguacgccgacuccuucgugauccgcggggacgagguccggcagaucgcccccggccagaccgggaagaucgccgacuacaacuacaagcugccggacgacuucacgggcugcgugaucgcguggaacagcaacaaccucgacuccaaggucgggggcaacuacaacuaccuguaccgccuguuccgcaagagcaaccucaagcccuucgagcgggacaucuccaccgagaucuaccaggccggcagcacccccugcaacgggguggagggcuucaacugcuacuucccccugcaguccuacggguuccagccgaccuacggcgugggguaccagcccuaccggguggucgugcugagcuucgagcuccugcacgcccccgccacggugugcggccccaagaaguccaccaaccuggucaagaacaagugcgugaacuucaacuucaacggccucaccgggaccggcgugcugaccgagagcaacaagaaguuccugccguuccagcaguucgggcgcgacaucgacgacacgaccgacgcgguccgcgacccccagacccuggagauccucgacaucacccccugcagcuucggcgggguguccgugaucacgccgggcaccaacaccagcaaccaggucgccgugcuguaccagggcgugaacugcaccgagguccccguggccauccacgccgaccagcugacgcccaccuggcggguguacuccaccggcagcaacgucuuccagacccgcgccgggugccucaucggcgcggagcacgugaacaacuccuacgagugcgacauccccaucggggccggcaucugcgccagcuaccagacgcagaccaacucccaccggcgcgcccggagcguggcgucccagagcaucaucgccuacaccaugucccugggcgccgagaacagcgucgccuacuccaacaacagcaucgccauccccaucaacuucacgaucuccgugaccaccgagauccugcccgugagcaugaccaagacgagcgucgacugcaccauguacaucugcggggacuccaccgagugcagcaaccuccugcugcaguacggcuccuucugcacccagcucaaccgcgcgcugacggggaucgccguggagcaggacaagaacacccaggagguguucgcccaggucaagcagaucuacaagacgcccccgaucaaggacuucggcggguucaacuucagccagauccugcccgaccccuccaagcccagcaagcgguccuucaucgaggaccuccuguucaacaaggugacccuggccgacgccggcuucaucaagcaguacggcgacugccucggggacaucgcggcccgcgaccugaucugcgcccagaaguucaacggccugaccgugcucccgccccugcugaccgacgagaugaucgcccaguacaccagcgcccuccuggcggggaccaucacguccggcuggaccuucggggccggcgccgcccugcagauccccuucgcgaugcagauggccuaccgguucaacggcaucggggucacccagaacgugcucuacgagaaccagaagcugaucgccaaccaguucaacagcgccaucggcaagauccaggacucccugagcuccaccgccagcgcgcucgggaagcugcaggacguggucaaccagaacgcccaggcccugaacacgcucgugaagcagcuguccagcaacuucggcgccaucuccagcgugcugaacgacauccucgcccgccuggacccgcccgaggccgaggugcagaucgaccggcugaucaccgggcgccuccagagccugcagaccuacgugacccagcagcugauccgggcggccgagauccgcgccagcgccaaccucgccgcgaccaagauguccgagugcguccugggccagagcaagcggguggacuucugcggcaagggguaccaccugauguccuucccccagagcgccccgcacggcguggucuuccuccacgugacguacguccccgcccaggagaagaacuucaccaccgcccccgcgaucugccacgacgggaaggcccacuucccccgcgagggcguguucguguccaacgggacccacugguucgucacgcagcggaacuucuacgagccgcagaucaucaccacccacaacaccuucgugagcggcaacugcgacguggucaucggcaucgugaacaacacgguguacgacccccugcagcccgagcuggacuccuucaaggaggagcucgacaaguacuucaagaaccacaccagccccgacgucgaccugggggacaucuccggcaucaacgccagcguggugaacauccagaaggagaucgaccgccugaacgaggucgccaagaaccucaacgagucccugaucgaccugcaggagcucgggaaguacgagcaguacaucaaguggccgugguacaucuggcugggcuucaucgccggccugaucgcgaucgugauggugaccaucaugcucugcugcaugaccagcugcugcuccugccugaaggggugcugcagcugcggcuccugcugcaaguucgacgaggacgacagcgagcccguccugaagggggugaagcuccacuacacgugaggacuagucccuguucccagagcccacuuuuuuuucuuuuuuugaaauaaaauagccugucuuucagaucucaaaggcucuuuucagagccaccaaaaaaaaaaaaaaaaaaaaaaaaaaaaaaaaaaaaaaaaaaaaaaaaaaaaaaaaaaaaaaaaaaaaaaaaaaaaaaaaaaaaaaaaaaaaaaaaaaaaa

SEQ ID NO: 23750 - RNA, 4191 nt, Artificial Sequence
  SARS-CoV-2/Wuhan/WIV05/2019__EPI_ISL_402128 spike protein mRNA gc (1-1273)(K986P_V987P_K986P_V987P_K417N_E484K_N501Y_D614G)
aggagagggcgcuuggcuugcaaggacccugagcugcggcauugaagcacacccaacccaacucgacugaagucagccucacugaaccggaucugagaaucuucucucucugggcuugccagggcucuccgaaccuagcuagcauccucuucaauuccaacuagaaagcuuaccauguucguguuccugguccuccugccccuggugagcucccagugcgugaaccucaccacccgcacgcagcugccgcccgccuacaccaacagcuucacccggggcgucuacuaccccgacaagguguuccgcuccagcgugcugcacuccacccaggaccucuuccugcccuucuucagcaacgucacgugguuccacgccauccacguguccgggaccaacggcaccaagcgguucgacaacccggugcugcccuucaacgacggggucuacuucgcgagcaccgagaaguccaacaucauccgcggcuggaucuucgggacgacccucgacagcaagacccagucccugcugaucgugaacaacgccaccaacguggucaucaaggugugcgaguuccaguucugcaacgaccccuuccucggcguguacuaccacaagaacaacaagagcuggauggaguccgaguuccgggucuacagcuccgccaacaacugcacguucgaguacgugagccagcccuuccugauggaccuggagggcaagcaggggaacuucaagaaccuccgcgaguucguguucaagaacaucgacggcuacuucaagaucuacuccaagcacaccccgaucaaccugguccgggaccugccccagggguucagcgcccucgagccccugguggaccugcccaucggcaucaacaucacccgcuuccagacccuccuggcccugcaccgguccuaccucacgccgggggacagcagcuccggcuggaccgcgggcgccgccgccuacuacgugggguaccugcagccccgcaccuuccugcucaaguacaacgagaacggcaccaucacggacgcggucgacugcgcccuggacccccugagcgagaccaagugcacccucaaguccuucaccguggagaaggggaucuaccagacgagcaacuuccgggugcagcccaccgaguccaucguccgcuucccgaacaucaccaaccugugccccuucggcgagguguucaacgccacccgguucgccagcgucuacgccuggaaccgcaagcggaucuccaacugcguggcggacuacagcgugcuguacaacuccgccagcuucuccacguucaagugcuacggcgucagccccaccaagcucaacgaccugugcuucaccaacguguacgccgacuccuucgugauccgcggggacgagguccggcagaucgcccccggccagaccgggaacaucgccgacuacaacuacaagcugccggacgacuucacgggcugcgugaucgcguggaacagcaacaaccucgacuccaaggucgggggcaacuacaacuaccuguaccgccuguuccgcaagagcaaccucaagcccuucgagcgggacaucuccaccgagaucuaccaggccggcagcacccccugcaacggggugaagggcuucaacugcuacuucccccugcaguccuacggguuccagccgaccuacggcgugggguaccagcccuaccggguggucgugcugagcuucgagcuccugcacgcccccgccacggugugcggccccaagaaguccaccaaccuggucaagaacaagugcgugaacuucaacuucaacggccucaccgggaccggcgugcugaccgagagcaacaagaaguuccugccguuccagcaguucgggcgcgacaucgccgacacgaccgacgcgguccgcgacccccagacccuggagauccucgacaucacccccugcagcuucggcgggguguccgugaucacgccgggcaccaacaccagcaaccaggucgccgugcuguaccagggcgugaacugcaccgagguccccguggccauccacgccgaccagcugacgcccaccuggcggguguacuccaccggcagcaacgucuuccagacccgcgccgggugccucaucggcgcggagcacgugaacaacuccuacgagugcgacauccccaucggggccggcaucugcgccagcuaccagacgcagaccaacuccccgcggcgcgcccggagcguggcgucccagagcaucaucgccuacaccaugucccugggcgccgagaacagcgucgccuacuccaacaacagcaucgccauccccaccaacuucacgaucuccgugaccaccgagauccugcccgugagcaugaccaagacgagcgucgacugcaccauguacaucugcggggacuccaccgagugcagcaaccuccugcugcaguacggcuccuucugcacccagcucaaccgcgcgcugacggggaucgccguggagcaggacaagaacacccaggagguguucgcccaggucaagcagaucuacaagacgcccccgaucaaggacuucggcggguucaacuucagccagauccugcccgaccccuccaagcccagcaagcgguccuucaucgaggaccuccuguucaacaaggugacccuggccgacgccggcuucaucaagcaguacggcgacugccucggggacaucgcggcccgcgaccugaucugcgcccagaaguucaacggccugaccgugcucccgccccugcugaccgacgagaugaucgcccaguacaccagcgcccuccuggcggggaccaucacguccggcuggaccuucggggccggcgccgcccugcagauccccuucgcgaugcagauggccuaccgguucaacggcaucggggucacccagaacgugcucuacgagaaccagaagcugaucgccaaccaguucaacagcgccaucggcaagauccaggacucccugagcuccaccgccagcgcgcucgggaagcugcaggacguggucaaccagaacgcccaggcccugaacacgcucgugaagcagcuguccagcaacuucggcgccaucuccagcgugcugaacgacauccucucccgccuggacccgcccgaggccgaggugcagaucgaccggcugaucaccgggcgccuccagagccugcagaccuacgugacccagcagcugauccgggcggccgagauccgcgccagcgccaaccucgccgcgaccaagauguccgagugcguccugggccagagcaagcggguggacuucugcggcaagggguaccaccugauguccuucccccagagcgccccgcacggcguggucuuccuccacgugacguacguccccgcccaggagaagaacuucaccaccgcccccgcgaucugccacgacgggaaggcccacuucccccgcgagggcguguucguguccaacgggacccacugguucgucacgcagcggaacuucuacgagccgcagaucaucaccaccgacaacaccuucgugagcggcaacugcgacguggucaucggcaucgugaacaacacgguguacgacccccugcagcccgagcuggacuccuucaaggaggagcucgacaaguacuucaagaaccacaccagccccgacgucgaccugggggacaucuccggcaucaacgccagcguggugaacauccagaaggagaucgaccgccugaacgaggucgccaagaaccucaacgagucccugaucgaccugcaggagcucgggaaguacgagcaguacaucaaguggccgugguacaucuggcugggcuucaucgccggccugaucgcgaucgugauggugaccaucaugcucugcugcaugaccagcugcugcuccugccugaaggggugcugcagcugcggcuccugcugcaaguucgacgaggacgacagcgagcccguccugaagggggugaagcuccacuacacgugaggacuagucccuguucccagagcccacuuuuuuuucuuuuuuugaaauaaaauagccugucuuucagaucucaaaggcucuuuucagagccaccaaaaaaaaaaaaaaaaaaaaaaaaaaaaaaaaaaaaaaaaaaaaaaaaaaaaaaaaaaaaaaaaaaaaaaaaaaaaaaaaaaaaaaaaaaaaaaaaaaaaa

SEQ ID NO: 23751 - RNA, 4182 nt, Artificial Sequence
  SARS-CoV-2/Wuhan/WIV05/2019__EPI_ISL_402128 spike protein mRNA gc (1-1273)(K986P_V987P_K986P_V987P_L18F_D80A_D215G_L242del_A243del_ L244del_R246I_K417N_E484K_N501Y_D614G_A701V)
aggagagggcgcuuggcuugcaaggacccugagcugcggcauugaagcacacccaacccaacucgacugaagucagccucacugaaccggaucugagaaucuucucucucugggcuugccagggcucuccgaaccuagcuagcauccucuucaauuccaacuagaaagcuuaccauguucguguuccugguccuccugccccuggugagcucccagugcgugaacuucaccacccgcacgcagcugccgcccgccuacaccaacagcuucacccggggcgucuacuaccccgacaagguguuccgcuccagcgugcugcacuccacccaggaccucuuccugcccuucuucagcaacgucacgugguuccacgccauccacguguccgggaccaacggcaccaagcgguucgccaacccggugcugcccuucaacgacggggucuacuucgcgagcaccgagaaguccaacaucauccgcggcuggaucuucgggacgacccucgacagcaagacccagucccugcugaucgugaacaacgccaccaacguggucaucaaggugugcgaguuccaguucugcaacgaccccuuccucggcguguacuaccacaagaacaacaagagcuggauggaguccgaguuccgggucuacagcuccgccaacaacugcacguucgaguacgugagccagcccuuccugauggaccuggagggcaagcaggggaacuucaagaaccuccgcgaguucguguucaagaacaucgacggcuacuucaagaucuacuccaagcacaccccgaucaaccugguccggggccugccccagggguucagcgcccucgagccccugguggaccugcccaucggcaucaacaucacccgcuuccagacccuccacaucuccuaccucacgccgggggacagcagcuccggcuggaccgcgggcgccgccgccuacuacgugggguaccugcagccccgcaccuuccugcucaaguacaacgagaacggcaccaucacggacgcggucgacugcgcccuggacccccugagcgagaccaagugcacccucaaguccuucaccguggagaaggggaucuaccagacgagcaacuuccgggugcagcccaccgaguccaucguccgcuucccgaacaucaccaaccugugccccuucggcgagguguucaacgccacccgguucgccagcgucuacgccuggaaccgcaagcggaucuccaacugcguggcggacuacagcgugcuguacaacuccgccagcuucuccacguucaagugcuacggcgucagccccaccaagcucaacgaccugugcuucaccaacguguacgccgacuccuucgugauccgcggggacgagguccggcagaucgcccccggccagaccgggaacaucgccgacuacaacuacaagcugccggacgacuucacgggcugcgugaucgcguggaacagcaacaaccucgacuccaaggucgggggcaacuacaacuaccuguaccgccuguuccgcaagagcaaccucaagcccuucgagcgggacaucuccaccgagaucuaccaggccggcagcacccccugcaacggggugaagggcuucaacugcuacuucccccugcaguccuacggguuccagccgaccuacggcgugggguaccagcccuaccggguggucgugcugagcuucgagcuccugcacgcccccgccacggugugcggccccaagaaguccaccaaccuggucaagaacaagugcgugaacuucaacuucaacggccucaccgggaccggcgugcugaccgagagcaacaagaaguuccugccguuccagcaguucgggcgcgacaucgccgacacgaccgacgcgguccgcgacccccagacccuggagauccucgacaucacccccugcagcuucggcgggguguccgugaucacgccgggcaccaacaccagcaaccaggucgccgugcuguaccagggcgugaacugcaccgagguccccguggccauccacgccgaccagcugacgcccaccuggcggguguacuccaccggcagcaacgucuuccagacccgcgccgggugccucaucggcgcggagcacgugaacaacuccuacgagugcgacauccccaucggggccggcaucugcgccagcuaccagacgcagaccaacuccccgcggcgcgcccggagcguggcgucccagagcaucaucgccuacaccaugucccugggcguggagaacagcgucgccuacuccaacaacagcaucgccauccccaccaacuucacgaucuccgugaccaccgagauccugcccgugagcaugaccaagacgagcgucgacugcaccauguacaucugcggggacuccaccgagugcagcaaccuccugcugcaguacggcuccuucugcacccagcucaaccgcgcgcugacggggaucgccguggagcaggacaagaacacccaggagguguucgcccaggucaagcagaucuacaagacgcccccgaucaaggacuucggcggguucaacuucagccagauccugcccgaccccuccaagcccagcaagcgguccuucaucgaggaccuccuguucaacaaggugacccuggccgacgccggcuucaucaagcaguacggcgacugccucggggacaucgcggcccgcgaccugaucugcgcccagaaguucaacggccugaccgugcucccgccccugcugaccgacgagaugaucgcccaguacaccagcgcccuccuggcggggaccaucacguccggcuggaccuucggggccggcgccgcccugcagauccccuucgcgaugcagauggccuaccgguucaacggcaucggggucacccagaacgugcucuacgagaaccagaagcugaucgccaaccaguucaacagcgccaucggcaagauccaggacucccugagcuccaccgccagcgcgcucgggaagcugcaggacguggucaaccagaacgcccaggcccugaacacgcucgugaagcagcuguccagcaacuucggcgccaucuccagcgugcugaacgacauccucucccgccuggacccgcccgaggccgaggugcagaucgaccggcugaucaccgggcgccuccagagccugcagaccuacgugacccagcagcugauccgggcggccgagauccgcgccagcgccaaccucgccgcgaccaagauguccgagugcguccugggccagagcaagcggguggacuucugcggcaagggguaccaccugauguccuucccccagagcgccccgcacggcguggucuuccuccacgugacguacguccccgcccaggagaagaacuucaccaccgcccccgcgaucugccacgacgggaaggcccacuucccccgcgagggcguguucguguccaacgggacccacugguucgucacgcagcggaacuucuacgagccgcagaucaucaccaccgacaacaccuucgugagcggcaacugcgacguggucaucggcaucgugaacaacacgguguacgacccccugcagcccgagcuggacuccuucaaggaggagcucgacaaguacuucaagaaccacaccagccccgacgucgaccugggggacaucuccggcaucaacgccagcguggugaacauccagaaggagaucgaccgccugaacgaggucgccaagaaccucaacgagucccugaucgaccugcaggagcucgggaaguacgagcaguacaucaaguggccgugguacaucuggcugggcuucaucgccggccugaucgcgaucgugauggugaccaucaugcucugcugcaugaccagcugcugcuccugccugaaggggugcugcagcugcggcuccugcugcaaguucgacgaggacgacagcgagcccguccugaagggggugaagcuccacuacacgugaggacuagucccuguucccagagcccacuuuuuuuucuuuuuuugaaauaaaauagccugucuuucagaucucaaaggcucuuuucagagccaccaaaaaaaaaaaaaaaaaaaaaaaaaaaaaaaaaaaaaaaaaaaaaaaaaaaaaaaaaaaaaaaaaaaaaaaaaaaaaaaaaaaaaaaaaaaaaaaaaaaaa

SEQ ID NO: 23752 - RNA, 4191 nt, Artificial Sequence
  SARS-CoV-2/Wuhan/WIV05/2019__EPI_ISL_402128 spike protein mRNA gc (1-1273)(K986P_V987P_K986P_V987P_E484K_D614G)
aggagagggcgcuuggcuugcaaggacccugagcugcggcauugaagcacacccaacccaacucgacugaagucagccucacugaaccggaucugagaaucuucucucucugggcuugccagggcucuccgaaccuagcuagcauccucuucaauuccaacuagaaagcuuaccauguucguguuccugguccuccugccccuggugagcucccagugcgugaaccucaccacccgcacgcagcugccgcccgccuacaccaacagcuucacccggggcgucuacuaccccgacaagguguuccgcuccagcgugcugcacuccacccaggaccucuuccugcccuucuucagcaacgucacgugguuccacgccauccacguguccgggaccaacggcaccaagcgguucgacaacccggugcugcccuucaacgacggggucuacuucgcgagcaccgagaaguccaacaucauccgcggcuggaucuucgggacgacccucgacagcaagacccagucccugcugaucgugaacaacgccaccaacguggucaucaaggugugcgaguuccaguucugcaacgaccccuuccucggcguguacuaccacaagaacaacaagagcuggauggaguccgaguuccgggucuacagcuccgccaacaacugcacguucgaguacgugagccagcccuuccugauggaccuggagggcaagcaggggaacuucaagaaccuccgcgaguucguguucaagaacaucgacggcuacuucaagaucuacuccaagcacaccccgaucaaccugguccgggaccugccccagggguucagcgcccucgagccccugguggaccugcccaucggcaucaacaucacccgcuuccagacccuccuggcccugcaccgguccuaccucacgccgggggacagcagcuccggcuggaccgcgggcgccgccgccuacuacgugggguaccugcagccccgcaccuuccugcucaaguacaacgagaacggcaccaucacggacgcggucgacugcgcccuggacccccugagcgagaccaagugcacccucaaguccuucaccguggagaaggggaucuaccagacgagcaacuuccgggugcagcccaccgaguccaucguccgcuucccgaacaucaccaaccugugccccuucggcgagguguucaacgccacccgguucgccagcgucuacgccuggaaccgcaagcggaucuccaacugcguggcggacuacagcgugcuguacaacuccgccagcuucuccacguucaagugcuacggcgucagccccaccaagcucaacgaccugugcuucaccaacguguacgccgacuccuucgugauccgcggggacgagguccggcagaucgcccccggccagaccgggaagaucgccgacuacaacuacaagcugccggacgacuucacgggcugcgugaucgcguggaacagcaacaaccucgacuccaaggucgggggcaacuacaacuaccuguaccgccuguuccgcaagagcaaccucaagcccuucgagcgggacaucuccaccgagaucuaccaggccggcagcacccccugcaacggggugaagggcuucaacugcuacuucccccugcaguccuacggguuccagccgaccaacggcgugggguaccagcccuaccggguggucgugcugagcuucgagcuccugcacgcccccgccacggugugcggccccaagaaguccaccaaccuggucaagaacaagugcgugaacuucaacuucaacggccucaccgggaccggcgugcugaccgagagcaacaagaaguuccugccguuccagcaguucgggcgcgacaucgccgacacgaccgacgcgguccgcgacccccagacccuggagauccucgacaucacccccugcagcuucggcgggguguccgugaucacgccgggcaccaacaccagcaaccaggucgccgugcuguaccagggcgugaacugcaccgagguccccguggccauccacgccgaccagcugacgcccaccuggcggguguacuccaccggcagcaacgucuuccagacccgcgccgggugccucaucggcgcggagcacgugaacaacuccuacgagugcgacauccccaucggggccggcaucugcgccagcuaccagacgcagaccaacuccccgcggcgcgcccggagcguggcgucccagagcaucaucgccuacaccaugucccugggcgccgagaacagcgucgccuacuccaacaacagcaucgccauccccaccaacuucacgaucuccgugaccaccgagauccugcccgugagcaugaccaagacgagcgucgacugcaccauguacaucugcggggacuccaccgagugcagcaaccuccugcugcaguacggcuccuucugcacccagcucaaccgcgcgcugacggggaucgccguggagcaggacaagaacacccaggagguguucgcccaggucaagcagaucuacaagacgcccccgaucaaggacuucggcggguucaacuucagccagauccugcccgaccccuccaagcccagcaagcgguccuucaucgaggaccuccuguucaacaaggugacccuggccgacgccggcuucaucaagcaguacggcgacugccucggggacaucgcggcccgcgaccugaucugcgcccagaaguucaacggccugaccgugcucccgccccugcugaccgacgagaugaucgcccaguacaccagcgcccuccuggcggggaccaucacguccggcuggaccuucggggccggcgccgcccugcagauccccuucgcgaugcagauggccuaccgguucaacggcaucggggucacccagaacgugcucuacgagaaccagaagcugaucgccaaccaguucaacagcgccaucggcaagauccaggacucccugagcuccaccgccagcgcgcucgggaagcugcaggacguggucaaccagaacgcccaggcccugaacacgcucgugaagcagcuguccagcaacuucggcgccaucuccagcgugcugaacgacauccucucccgccuggacccgcccgaggccgaggugcagaucgaccggcugaucaccgggcgccuccagagccugcagaccuacgugacccagcagcugauccgggcggccgagauccgcgccagcgccaaccucgccgcgaccaagauguccgagugcguccugggccagagcaagcggguggacuucugcggcaagggguaccaccugauguccuucccccagagcgccccgcacggcguggucuuccuccacgugacguacguccccgcccaggagaagaacuucaccaccgcccccgcgaucugccacgacgggaaggcccacuucccccgcgagggcguguucguguccaacgggacccacugguucgucacgcagcggaacuucuacgagccgcagaucaucaccaccgacaacaccuucgugagcggcaacugcgacguggucaucggcaucgugaacaacacgguguacgacccccugcagcccgagcuggacuccuucaaggaggagcucgacaaguacuucaagaaccacaccagccccgacgucgaccugggggacaucuccggcaucaacgccagcguggugaacauccagaaggagaucgaccgccugaacgaggucgccaagaaccucaacgagucccugaucgaccugcaggagcucgggaaguacgagcaguacaucaaguggccgugguacaucuggcugggcuucaucgccggccugaucgcgaucgugauggugaccaucaugcucugcugcaugaccagcugcugcuccugccugaaggggugcugcagcugcggcuccugcugcaaguucgacgaggacgacagcgagcccguccugaagggggugaagcuccacuacacgugaggacuagucccuguucccagagcccacuuuuuuuucuuuuuuugaaauaaaauagccugucuuucagaucucaaaggcucuuuucagagccaccaaaaaaaaaaaaaaaaaaaaaaaaaaaaaaaaaaaaaaaaaaaaaaaaaaaaaaaaaaaaaaaaaaaaaaaaaaaaaaaaaaaaaaaaaaaaaaaaaaaaa

SEQ ID NO: 23753 - RNA, 4191 nt, Artificial Sequence
  SARS-CoV-2/Wuhan/WIV05/2019__EPI_ISL_402128 spike protein mRNA gc (1-1273)(K986P_V987P_K986P_V987P_L18F_T20N_P26S_D138Y_R190S_K417T _E484K_N501Y_D614G_H655Y_T1027I)
aggagagggcgcuuggcuugcaaggacccugagcugcggcauugaagcacacccaacccaacucgacugaagucagccucacugaaccggaucugagaaucuucucucucugggcuugccagggcucuccgaaccuagcuagcauccucuucaauuccaacuagaaagcuuaccauguucguguuccugguccuccugccccuggugagcucccagugcgugaacuucaccaaccgcacgcagcugccgagcgccuacaccaacagcuucacccggggcgucuacuaccccgacaagguguuccgcuccagcgugcugcacuccacccaggaccucuuccugcccuucuucagcaacgucacgugguuccacgccauccacguguccgggaccaacggcaccaagcgguucgacaacccggugcugcccuucaacgacggggucuacuucgcgagcaccgagaaguccaacaucauccgcggcuggaucuucgggacgacccucgacagcaagacccagucccugcugaucgugaacaacgccaccaacguggucaucaaggugugcgaguuccaguucugcaacuaccccuuccucggcguguacuaccacaagaacaacaagagcuggauggaguccgaguuccgggucuacagcuccgccaacaacugcacguucgaguacgugagccagcccuuccugauggaccuggagggcaagcaggggaacuucaagaaccucagcgaguucguguucaagaacaucgacggcuacuucaagaucuacuccaagcacaccccgaucaaccugguccgggaccugccccagggguucagcgcccucgagccccugguggaccugcccaucggcaucaacaucacccgcuuccagacccuccuggcccugcaccgguccuaccucacgccgggggacagcagcuccggcuggaccgcgggcgccgccgccuacuacgugggguaccugcagccccgcaccuuccugcucaaguacaacgagaacggcaccaucacggacgcggucgacugcgcccuggacccccugagcgagaccaagugcacccucaaguccuucaccguggagaaggggaucuaccagacgagcaacuuccgggugcagcccaccgaguccaucguccgcuucccgaacaucaccaaccugugccccuucggcgagguguucaacgccacccgguucgccagcgucuacgccuggaaccgcaagcggaucuccaacugcguggcggacuacagcgugcuguacaacuccgccagcuucuccacguucaagugcuacggcgucagccccaccaagcucaacgaccugugcuucaccaacguguacgccgacuccuucgugauccgcggggacgagguccggcagaucgcccccggccagaccgggaccaucgccgacuacaacuacaagcugccggacgacuucacgggcugcgugaucgcguggaacagcaacaaccucgacuccaaggucgggggcaacuacaacuaccuguaccgccuguuccgcaagagcaaccucaagcccuucgagcgggacaucuccaccgagaucuaccaggccggcagcacccccugcaacggggugaagggcuucaacugcuacuucccccugcaguccuacggguuccagccgaccuacggcgugggguaccagcccuaccggguggucgugcugagcuucgagcuccugcacgcccccgccacggugugcggccccaagaaguccaccaaccuggucaagaacaagugcgugaacuucaacuucaacggccucaccgggaccggcgugcugaccgagagcaacaagaaguuccugccguuccagcaguucgggcgcgacaucgccgacacgaccgacgcgguccgcgacccccagacccuggagauccucgacaucacccccugcagcuucggcgggguguccgugaucacgccgggcaccaacaccagcaaccaggucgccgugcuguaccagggcgugaacugcaccgagguccccguggccauccacgccgaccagcugacgcccaccuggcggguguacuccaccggcagcaacgucuuccagacccgcgccgggugccucaucggcgcggaguacgugaacaacuccuacgagugcgacauccccaucggggccggcaucugcgccagcuaccagacgcagaccaacuccccgcggcgcgcccggagcguggcgucccagagcaucaucgccuacaccaugucccugggcgccgagaacagcgucgccuacuccaacaacagcaucgccauccccaccaacuucacgaucuccgugaccaccgagauccugcccgugagcaugaccaagacgagcgucgacugcaccauguacaucugcggggacuccaccgagugcagcaaccuccugcugcaguacggcuccuucugcacccagcucaaccgcgcgcugacggggaucgccguggagcaggacaagaacacccaggagguguucgcccaggucaagcagaucuacaagacgcccccgaucaaggacuucggcggguucaacuucagccagauccugcccgaccccuccaagcccagcaagcgguccuucaucgaggaccuccuguucaacaaggugacccuggccgacgccggcuucaucaagcaguacggcgacugccucggggacaucgcggcccgcgaccugaucugcgcccagaaguucaacggccugaccgugcucccgccccugcugaccgacgagaugaucgcccaguacaccagcgcccuccuggcggggaccaucacguccggcuggaccuucggggccggcgccgcccugcagauccccuucgcgaugcagauggccuaccgguucaacggcaucggggucacccagaacgugcucuacgagaaccagaagcugaucgccaaccaguucaacagcgccaucggcaagauccaggacucccugagcuccaccgccagcgcgcucgggaagcugcaggacguggucaaccagaacgcccaggcccugaacacgcucgugaagcagcuguccagcaacuucggcgccaucuccagcgugcugaacgacauccucucccgccuggacccgcccgaggccgaggugcagaucgaccggcugaucaccgggcgccuccagagccugcagaccuacgugacccagcagcugauccgggcggccgagauccgcgccagcgccaaccucgccgcgaucaagauguccgagugcguccugggccagagcaagcggguggacuucugcggcaagggguaccaccugauguccuucccccagagcgccccgcacggcguggucuuccuccacgugacguacguccccgcccaggagaagaacuucaccaccgcccccgcgaucugccacgacgggaaggcccacuucccccgcgagggcguguucguguccaacgggacccacugguucgucacgcagcggaacuucuacgagccgcagaucaucaccaccgacaacaccuucgugagcggcaacugcgacguggucaucggcaucgugaacaacacgguguacgacccccugcagcccgagcuggacuccuucaaggaggagcucgacaaguacuucaagaaccacaccagccccgacgucgaccugggggacaucuccggcaucaacgccagcguggugaacauccagaaggagaucgaccgccugaacgaggucgccaagaaccucaacgagucccugaucgaccugcaggagcucgggaaguacgagcaguacaucaaguggccgugguacaucuggcugggcuucaucgccggccugaucgcgaucgugauggugaccaucaugcucugcugcaugaccagcugcugcuccugccugaaggggugcugcagcugcggcuccugcugcaaguucgacgaggacgacagcgagcccguccugaagggggugaagcuccacuacacgugaggacuagucccuguucccagagcccacuuuuuuuucuuuuuuugaaauaaaauagccugucuuucagaucucaaaggcucuuuucagagccaccaaaaaaaaaaaaaaaaaaaaaaaaaaaaaaaaaaaaaaaaaaaaaaaaaaaaaaaaaaaaaaaaaaaaaaaaaaaaaaaaaaaaaaaaaaaaaaaaaaaaa

SEQ ID NO: 23754 - RNA, 4191 nt, Artificial Sequence
  SARS-CoV-2/Wuhan/WIV05/2019__EPI_ISL_402128 spike protein mRNA gc (1-1273)(K986P_V987P_K986P_V987P_S13I_W152C_L452R_D614G)
aggagagggcgcuuggcuugcaaggacccugagcugcggcauugaagcacacccaacccaacucgacugaagucagccucacugaaccggaucugagaaucuucucucucugggcuugccagggcucuccgaaccuagcuagcauccucuucaauuccaacuagaaagcuuaccauguucguguuccugguccuccugccccuggugagcauccagugcgugaaccucaccacccgcacgcagcugccgcccgccuacaccaacagcuucacccggggcgucuacuaccccgacaagguguuccgcuccagcgugcugcacuccacccaggaccucuuccugcccuucuucagcaacgucacgugguuccacgccauccacguguccgggaccaacggcaccaagcgguucgacaacccggugcugcccuucaacgacggggucuacuucgcgagcaccgagaaguccaacaucauccgcggcuggaucuucgggacgacccucgacagcaagacccagucccugcugaucgugaacaacgccaccaacguggucaucaaggugugcgaguuccaguucugcaacgaccccuuccucggcguguacuaccacaagaacaacaagagcugcauggaguccgaguuccgggucuacagcuccgccaacaacugcacguucgaguacgugagccagcccuuccugauggaccuggagggcaagcaggggaacuucaagaaccuccgcgaguucguguucaagaacaucgacggcuacuucaagaucuacuccaagcacaccccgaucaaccugguccgggaccugccccagggguucagcgcccucgagccccugguggaccugcccaucggcaucaacaucacccgcuuccagacccuccuggcccugcaccgguccuaccucacgccgggggacagcagcuccggcuggaccgcgggcgccgccgccuacuacgugggguaccugcagccccgcaccuuccugcucaaguacaacgagaacggcaccaucacggacgcggucgacugcgcccuggacccccugagcgagaccaagugcacccucaaguccuucaccguggagaaggggaucuaccagacgagcaacuuccgggugcagcccaccgaguccaucguccgcuucccgaacaucaccaaccugugccccuucggcgagguguucaacgccacccgguucgccagcgucuacgccuggaaccgcaagcggaucuccaacugcguggcggacuacagcgugcuguacaacuccgccagcuucuccacguucaagugcuacggcgucagccccaccaagcucaacgaccugugcuucaccaacguguacgccgacuccuucgugauccgcggggacgagguccggcagaucgcccccggccagaccgggaagaucgccgacuacaacuacaagcugccggacgacuucacgggcugcgugaucgcguggaacagcaacaaccucgacuccaaggucgggggcaacuacaacuaccgcuaccgccuguuccgcaagagcaaccucaagcccuucgagcgggacaucuccaccgagaucuaccaggccggcagcacccccugcaacgggguggagggcuucaacugcuacuucccccugcaguccuacggguuccagccgaccaacggcgugggguaccagcccuaccggguggucgugcugagcuucgagcuccugcacgcccccgccacggugugcggccccaagaaguccaccaaccuggucaagaacaagugcgugaacuucaacuucaacggccucaccgggaccggcgugcugaccgagagcaacaagaaguuccugccguuccagcaguucgggcgcgacaucgccgacacgaccgacgcgguccgcgacccccagacccuggagauccucgacaucacccccugcagcuucggcgggguguccgugaucacgccgggcaccaacaccagcaaccaggucgccgugcuguaccagggcgugaacugcaccgagguccccguggccauccacgccgaccagcugacgcccaccuggcggguguacuccaccggcagcaacgucuuccagacccgcgccgggugccucaucggcgcggagcacgugaacaacuccuacgagugcgacauccccaucggggccggcaucugcgccagcuaccagacgcagaccaacuccccgcggcgcgcccggagcguggcgucccagagcaucaucgccuacaccaugucccugggcgccgagaacagcgucgccuacuccaacaacagcaucgccauccccaccaacuucacgaucuccgugaccaccgagauccugcccgugagcaugaccaagacgagcgucgacugcaccauguacaucugcggggacuccaccgagugcagcaaccuccugcugcaguacggcuccuucugcacccagcucaaccgcgcgcugacggggaucgccguggagcaggacaagaacacccaggagguguucgcccaggucaagcagaucuacaagacgcccccgaucaaggacuucggcggguucaacuucagccagauccugcccgaccccuccaagcccagcaagcgguccuucaucgaggaccuccuguucaacaaggugacccuggccgacgccggcuucaucaagcaguacggcgacugccucggggacaucgcggcccgcgaccugaucugcgcccagaaguucaacggccugaccgugcucccgccccugcugaccgacgagaugaucgcccaguacaccagcgcccuccuggcggggaccaucacguccggcuggaccuucggggccggcgccgcccugcagauccccuucgcgaugcagauggccuaccgguucaacggcaucggggucacccagaacgugcucuacgagaaccagaagcugaucgccaaccaguucaacagcgccaucggcaagauccaggacucccugagcuccaccgccagcgcgcucgggaagcugcaggacguggucaaccagaacgcccaggcccugaacacgcucgugaagcagcuguccagcaacuucggcgccaucuccagcgugcugaacgacauccucucccgccuggacccgcccgaggccgaggugcagaucgaccggcugaucaccgggcgccuccagagccugcagaccuacgugacccagcagcugauccgggcggccgagauccgcgccagcgccaaccucgccgcgaccaagauguccgagugcguccugggccagagcaagcggguggacuucugcggcaagggguaccaccugauguccuucccccagagcgccccgcacggcguggucuuccuccacgugacguacguccccgcccaggagaagaacuucaccaccgcccccgcgaucugccacgacgggaaggcccacuucccccgcgagggcguguucguguccaacgggacccacugguucgucacgcagcggaacuucuacgagccgcagaucaucaccaccgacaacaccuucgugagcggcaacugcgacguggucaucggcaucgugaacaacacgguguacgacccccugcagcccgagcuggacuccuucaaggaggagcucgacaaguacuucaagaaccacaccagccccgacgucgaccugggggacaucuccggcaucaacgccagcguggugaacauccagaaggagaucgaccgccugaacgaggucgccaagaaccucaacgagucccugaucgaccugcaggagcucgggaaguacgagcaguacaucaaguggccgugguacaucuggcugggcuucaucgccggccugaucgcgaucgugauggugaccaucaugcucugcugcaugaccagcugcugcuccugccugaaggggugcugcagcugcggcuccugcugcaaguucgacgaggacgacagcgagcccguccugaagggggugaagcuccacuacacgugaggacuagucccuguucccagagcccacuuuuuuuucuuuuuuugaaauaaaauagccugucuuucagaucucaaaggcucuuuucagagccaccaaaaaaaaaaaaaaaaaaaaaaaaaaaaaaaaaaaaaaaaaaaaaaaaaaaaaaaaaaaaaaaaaaaaaaaaaaaaaaaaaaaaaaaaaaaaaaaaaaaaa

SEQ ID NO: 23755 - RNA, 4191 nt, Artificial Sequence
  SARS-CoV-2/Wuhan/WIV05/2019__EPI_ISL_402128 spike protein mRNA gc (1-1273)(K986P_V987P)
aggagagggcgcuuggcuugcaaggacccugagcugcggcauugaagcacacccaacccaacucgacugaagucagccucacugaaccggaucugagaaucuucucucucugggcuugccagggcucuccgaaccuagcuagcauccucuucaauuccaacuagaaagcuuaccauguucguguuccugguccuccugccccuggugagcucccagugcgugaaccucaccacccgcacgcagcugccgcccgccuacaccaacagcuucacccggggcgucuacuaccccgacaagguguuccgcuccagcgugcugcacuccacccaggaccucuuccugcccuucuucagcaacgucacgugguuccacgccauccacguguccgggaccaacggcaccaagcgguucgacaacccggugcugcccuucaacgacggggucuacuucgcgagcaccgagaaguccaacaucauccgcggcuggaucuucgggacgacccucgacagcaagacccagucccugcugaucgugaacaacgccaccaacguggucaucaaggugugcgaguuccaguucugcaacgaccccuuccucggcguguacuaccacaagaacaacaagagcuggauggaguccgaguuccgggucuacagcuccgccaacaacugcacguucgaguacgugagccagcccuuccugauggaccuggagggcaagcaggggaacuucaagaaccuccgcgaguucguguucaagaacaucgacggcuacuucaagaucuacuccaagcacaccccgaucaaccugguccgggaccugccccagggguucagcgcccucgagccccugguggaccugcccaucggcaucaacaucacccgcuuccagacccuccuggcccugcaccgguccuaccucacgccgggggacagcagcuccggcuggaccgcgggcgccgccgccuacuacgugggguaccugcagccccgcaccuuccugcucaaguacaacgagaacggcaccaucacggacgcggucgacugcgcccuggacccccugagcgagaccaagugcacccucaaguccuucaccguggagaaggggaucuaccagacgagcaacuuccgggugcagcccaccgaguccaucguccgcuucccgaacaucaccaaccugugccccuucggcgagguguucaacgccacccgguucgccagcgucuacgccuggaaccgcaagcggaucuccaacugcguggcggacuacagcgugcuguacaacuccgccagcuucuccacguucaagugcuacggcgucagccccaccaagcucaacgaccugugcuucaccaacguguacgccgacuccuucgugauccgcggggacgagguccggcagaucgcccccggccagaccgggaagaucgccgacuacaacuacaagcugccggacgacuucacgggcugcgugaucgcguggaacagcaacaaccucgacuccaaggucgggggcaacuacaacuaccuguaccgccuguuccgcaagagcaaccucaagcccuucgagcgggacaucuccaccgagaucuaccaggccggcagcacccccugcaacgggguggagggcuucaacugcuacuucccccugcaguccuacggguuccagccgaccaacggcgugggguaccagcccuaccggguggucgugcugagcuucgagcuccugcacgcccccgccacggugugcggccccaagaaguccaccaaccuggucaagaacaagugcgugaacuucaacuucaacggccucaccgggaccggcgugcugaccgagagcaacaagaaguuccugccguuccagcaguucgggcgcgacaucgccgacacgaccgacgcgguccgcgacccccagacccuggagauccucgacaucacccccugcagcuucggcgggguguccgugaucacgccgggcaccaacaccagcaaccaggucgccgugcuguaccaggacgugaacugcaccgagguccccguggccauccacgccgaccagcugacgcccaccuggcggguguacuccaccggcagcaacgucuuccagacccgcgccgggugccucaucggcgcggagcacgugaacaacuccuacgagugcgacauccccaucggggccggcaucugcgccagcuaccagacgcagaccaacuccccgcggcgcgcccggagcguggcgucccagagcaucaucgccuacaccaugucccugggcgccgagaacagcgucgccuacuccaacaacagcaucgccauccccaccaacuucacgaucuccgugaccaccgagauccugcccgugagcaugaccaagacgagcgucgacugcaccauguacaucugcggggacuccaccgagugcagcaaccuccugcugcaguacggcuccuucugcacccagcucaaccgcgcgcugacggggaucgccguggagcaggacaagaacacccaggagguguucgcccaggucaagcagaucuacaagacgcccccgaucaaggacuucggcggguucaacuucagccagauccugcccgaccccuccaagcccagcaagcgguccuucaucgaggaccuccuguucaacaaggugacccuggccgacgccggcuucaucaagcaguacggcgacugccucggggacaucgcggcccgcgaccugaucugcgcccagaaguucaacggccugaccgugcucccgccccugcugaccgacgagaugaucgcccaguacaccagcgcccuccuggcggggaccaucacguccggcuggaccuucggggccggcgccgcccugcagauccccuucgcgaugcagauggccuaccgguucaacggcaucggggucacccagaacgugcucuacgagaaccagaagcugaucgccaaccaguucaacagcgccaucggcaagauccaggacucccugagcuccaccgccagcgcgcucgggaagcugcaggacguggucaaccagaacgcccaggcccugaacacgcucgugaagcagcuguccagcaacuucggcgccaucuccagcgugcugaacgacauccucucccgccuggacccgcccgaggccgagguccagaucgaccggcugaucaccgggcgccuccagagccugcagaccuacgugacccagcagcugauccgggcggccgagauccgcgccagcgccaaccucgccgcgaccaagauguccgagugcgugcugggccagagcaagcgggucgacuucugcggcaagggguaccaccugauguccuucccccagagcgcgccccacggcgugguguuccuccacgucacguacgugcccgcccaggagaagaacuucaccaccgccccggccaucugccacgacgggaaggcccacuucccccgcgagggcgucuucguguccaacgggacccacugguucgugacgcagcggaacuucuacgagccccagaucaucaccaccgacaacaccuucgucagcggcaacugcgacguggugaucggcaucgucaacaacacgguguacgacccccugcagccggagcuggacuccuucaaggaggagcucgacaaguacuucaagaaccacaccagccccgacguggaccugggggacaucuccggcaucaacgccagcgucgugaacauccagaaggagaucgaccgccugaacgagguggccaagaaccucaacgagucccugaucgaccugcaggagcucgggaaguacgagcaguacaucaaguggcccugguacaucuggcugggcuucaucgccggccugaucgcgaucgucauggugaccaucaugcucugcugcaugaccagcugcugcuccugccugaaggggugcugcagcugcggcuccugcugcaaguucgacgaggacgacagcgagccggugcugaagggggucaagcuccacuacacgugaggacuagucccuguucccagagcccacuuuuuuuucuuuuuuugaaauaaaauagccugucuuucagaucucaaaggcucuuuucagagccaccaaaaaaaaaaaaaaaaaaaaaaaaaaaaaaaaaaaaaaaaaaaaaaaaaaaaaaaaaaaaaaaaaaaaaaaaaaaaaaaaaaaaaaaaaaaaaaaaaaaaa

SEQ ID NO: 23756 - RNA, 4191 nt, Artificial Sequence
  SARS-CoV-2/Wuhan/WIV05/2019__EPI_ISL_402128 spike protein mRNA gc (1-1273)(K986P_V987P_ D614G)
aggagagggcgcuuggcuugcaaggacccugagcugcggcauugaagcacacccaacccaacucgacugaagucagccucacugaaccggaucugagaaucuucucucucugggcuugccagggcucuccgaaccuagcuagcauccucuucaauuccaacuagaaagcuuaccauguucguguuccugguccuccugccccuggugagcucccagugcgugaaccucaccacccgcacgcagcugccgcccgccuacaccaacagcuucacccggggcgucuacuaccccgacaagguguuccgcuccagcgugcugcacuccacccaggaccucuuccugcccuucuucagcaacgucacgugguuccacgccauccacguguccgggaccaacggcaccaagcgguucgacaacccggugcugcccuucaacgacggggucuacuucgcgagcaccgagaaguccaacaucauccgcggcuggaucuucgggacgacccucgacagcaagacccagucccugcugaucgugaacaacgccaccaacguggucaucaaggugugcgaguuccaguucugcaacgaccccuuccucggcguguacuaccacaagaacaacaagagcuggauggaguccgaguuccgggucuacagcuccgccaacaacugcacguucgaguacgugagccagcccuuccugauggaccuggagggcaagcaggggaacuucaagaaccuccgcgaguucguguucaagaacaucgacggcuacuucaagaucuacuccaagcacaccccgaucaaccugguccgggaccugccccagggguucagcgcccucgagccccugguggaccugcccaucggcaucaacaucacccgcuuccagacccuccuggcccugcaccgguccuaccucacgccgggggacagcagcuccggcuggaccgcgggcgccgccgccuacuacgugggguaccugcagccccgcaccuuccugcucaaguacaacgagaacggcaccaucacggacgcggucgacugcgcccuggacccccugagcgagaccaagugcacccucaaguccuucaccguggagaaggggaucuaccagacgagcaacuuccgggugcagcccaccgaguccaucguccgcuucccgaacaucaccaaccugugccccuucggcgagguguucaacgccacccgguucgccagcgucuacgccuggaaccgcaagcggaucuccaacugcguggcggacuacagcgugcuguacaacuccgccagcuucuccacguucaagugcuacggcgucagccccaccaagcucaacgaccugugcuucaccaacguguacgccgacuccuucgugauccgcggggacgagguccggcagaucgcccccggccagaccgggaagaucgccgacuacaacuacaagcugccggacgacuucacgggcugcgugaucgcguggaacagcaacaaccucgacuccaaggucgggggcaacuacaacuaccuguaccgccuguuccgcaagagcaaccucaagcccuucgagcgggacaucuccaccgagaucuaccaggccggcagcacccccugcaacgggguggagggcuucaacugcuacuucccccugcaguccuacggguuccagccgaccaacggcgugggguaccagcccuaccggguggucgugcugagcuucgagcuccugcacgcccccgccacggugugcggccccaagaaguccaccaaccuggucaagaacaagugcgugaacuucaacuucaacggccucaccgggaccggcgugcugaccgagagcaacaagaaguuccugccguuccagcaguucgggcgcgacaucgccgacacgaccgacgcgguccgcgacccccagacccuggagauccucgacaucacccccugcagcuucggcgggguguccgugaucacgccgggcaccaacaccagcaaccaggucgccgugcuguaccagggcgugaacugcaccgagguccccguggccauccacgccgaccagcugacgcccaccuggcggguguacuccaccgggagcaacgucuuccagacccgcgccggcugccucaucggggcggagcacgugaacaacuccuacgagugcgacauccccaucggcgccggcaucugcgccagcuaccagacgcagaccaacuccccgcggcgcgcccggagcguggcgucccagagcaucaucgccuacaccaugucccugggggccgagaacagcgucgccuacuccaacaacagcaucgccauccccaccaacuucacgaucuccgugaccaccgagauccugcccgugagcaugaccaagacgagcgucgacugcaccauguacaucugcggcgacuccaccgagugcagcaaccuccugcugcaguacggguccuucugcacccagcucaaccgcgcgcugacgggcaucgccguggagcaggacaagaacacccaggagguguucgcccaggucaagcagaucuacaagacgcccccgaucaaggacuucgggggcuucaacuucagccagauccugcccgaccccuccaagcccagcaagcgguccuucaucgaggaccuccuguucaacaaggugacccuggccgacgccggcuucaucaagcaguacggggacugccucggcgacaucgcggcccgcgaccugaucugcgcccagaaguucaacgggcugaccgugcucccgccccugcugaccgacgagaugaucgcccaguacaccagcgcccuccuggcgggcaccaucacguccggguggaccuucggcgccggcgccgcccugcagauccccuucgcgaugcagauggccuaccgguucaacgggaucggcgucacccagaacgugcucuacgagaaccagaagcugaucgccaaccaguucaacagcgccaucgggaagauccaggacucccugagcuccaccgccagcgcgcucggcaagcugcaggacguggucaaccagaacgcccaggcccugaacacgcucgugaagcagcuguccagcaacuucggggccaucuccagcgugcugaacgacauccucucccgccuggacccgcccgaggccgagguccagaucgaccggcugaucaccggccgccuccagagccugcagaccuacgugacccagcagcugauccgggcggccgagauccgcgccagcgccaaccucgccgcgaccaagauguccgagugcgugcugggccagagcaagcgggucgacuucugcgggaagggcuaccaccugauguccuucccccagagcgcgccccacggggugguguuccuccacgucacguacgugcccgcccaggagaagaacuucaccaccgccccggccaucugccacgacggcaaggcccacuucccccgcgagggggucuucguguccaacggcacccacugguucgugacgcagcggaacuucuacgagccccagaucaucaccaccgacaacaccuucgucagcggcaacugcgacguggugaucgggaucgucaacaacacgguguacgacccccugcagccggagcuggacuccuucaaggaggagcucgacaaguacuucaagaaccacaccagccccgacguggaccugggcgacaucuccgggaucaacgccagcgucgugaacauccagaaggagaucgaccgccugaacgagguggccaagaaccucaacgagucccugaucgaccugcaggagcucggcaaguacgagcaguacaucaaguggcccugguacaucuggcugggcuucaucgccgggcugaucgcgaucgucauggugaccaucaugcucugcugcaugaccagcugcugcuccugccugaagggcugcugcagcugcggguccugcugcaaguucgacgaggacgacagcgagccggugcugaagggcgucaagcuccacuacacgugaggacuagucccuguucccagagcccacuuuuuuuucuuuuuuugaaauaaaauagccugucuuucagaucucaaaggcucuuuucagagccaccaaaaaaaaaaaaaaaaaaaaaaaaaaaaaaaaaaaaaaaaaaaaaaaaaaaaaaaaaaaaaaaaaaaaaaaaaaaaaaaaaaaaaaaaaaaaaaaaaaaaa

SEQ ID NO: 23757 - RNA, 4191 nt, Artificial Sequence
  SARS-CoV-2/Wuhan/WIV05/2019__EPI_ISL_402128 spike protein mRNA gc (1-1273)(K986P_V987P_A222V_D614G)
aggagagggcgcuuggcuugcaaggacccugagcugcggcauugaagcacacccaacccaacucgacugaagucagccucacugaaccggaucugagaaucuucucucucugggcuugccagggcucuccgaaccuagcuagcauccucuucaauuccaacuagaaagcuuaccauguucguguuccugguccuccugccccuggugagcucccagugcgugaaccucaccacccgcacgcagcugccgcccgccuacaccaacagcuucacccggggcgucuacuaccccgacaagguguuccgcuccagcgugcugcacuccacccaggaccucuuccugcccuucuucagcaacgucacgugguuccacgccauccacguguccgggaccaacggcaccaagcgguucgacaacccggugcugcccuucaacgacggggucuacuucgcgagcaccgagaaguccaacaucauccgcggcuggaucuucgggacgacccucgacagcaagacccagucccugcugaucgugaacaacgccaccaacguggucaucaaggugugcgaguuccaguucugcaacgaccccuuccucggcguguacuaccacaagaacaacaagagcuggauggaguccgaguuccgggucuacagcuccgccaacaacugcacguucgaguacgugagccagcccuuccugauggaccuggagggcaagcaggggaacuucaagaaccuccgcgaguucguguucaagaacaucgacggcuacuucaagaucuacuccaagcacaccccgaucaaccugguccgggaccugccccagggguucagcgugcucgagccccugguggaccugcccaucggcaucaacaucacccgcuuccagacccuccuggcccugcaccgguccuaccucacgccgggggacagcagcuccggcuggaccgccggcgcggccgccuacuacgucggguaccugcagccccgcaccuuccugcucaaguacaacgagaacggcaccaucacggacgccguggacugcgcgcuggacccccugagcgagaccaagugcacccucaaguccuucaccguggagaaggggaucuaccagacgagcaacuuccggguccagcccaccgaguccaucgugcgcuucccgaacaucaccaaccugugccccuucggcgaggucuucaacgccacccgguucgccagcguguacgccuggaaccgcaagcggaucuccaacugcguggccgacuacagcguccuguacaacuccgcgagcuucuccacguucaagugcuacggcgugagccccaccaagcucaacgaccugugcuucaccaacguguacgccgacuccuucgucauccgcggggacgaggugcggcagaucgcccccggccagaccgggaagaucgccgacuacaacuacaagcugccggacgacuucacgggcugcgugaucgccuggaacagcaacaaccucgacuccaaggucgggggcaacuacaacuaccuguaccgccuguuccgcaagagcaaccucaagcccuucgagcgggacaucuccaccgagaucuaccaggcgggcagcacccccugcaacgggguggagggcuucaacugcuacuucccccugcaguccuacggguuccagccgaccaacggcgugggguaccagcccuaccgggucguggugcugagcuucgagcuccugcacgcccccgccacggucugcggccccaagaaguccaccaaccuggugaagaacaagugcgugaacuucaacuucaacggccucaccgggaccggcguccugaccgagagcaacaagaaguuccugccguuccagcaguucgggcgcgacaucgccgacacgaccgacgccgugcgcgacccccagacccuggagauccucgacaucacccccugcagcuucggcgggguguccgucaucacgccgggcaccaacaccagcaaccagguggcggugcuguaccagggcgucaacugcaccgaggugcccguggccauccacgccgaccagcugacgcccaccuggcgggucuacuccaccgggagcaacguguuccagacccgcgccggcugccucaucggggccgagcacgugaacaacuccuacgagugcgacauccccaucggcgcgggcaucugcgccagcuaccagacgcagaccaacuccccgcggcgcgcccggagcgucgccucccagagcaucaucgcguacaccaugucccugggggccgagaacagcguggccuacuccaacaacagcaucgccauccccaccaacuucacgaucuccgugaccaccgagauccugcccgucagcaugaccaagacgagcguggacugcaccauguacaucugcggcgacuccaccgagugcagcaaccuccugcugcaguacggguccuucugcacccagcucaaccgcgcccugacgggcaucgcgguggagcaggacaagaacacccaggaggucuucgcccaggugaagcagaucuacaagacgcccccgaucaaggacuucgggggcuucaacuucagccagauccugcccgaccccuccaagcccagcaagcgguccuucaucgaggaccuccuguucaacaaggugacccuggccgacgccggcuucaucaagcaguacggggacugccucggcgacaucgccgcgcgcgaccugaucugcgcccagaaguucaacgggcugaccguccucccgccccugcugaccgacgagaugaucgcccaguacaccagcgcccuccuggccggcaccaucacguccggguggaccuucggcgcgggcgccgcccugcagauccccuucgccaugcagauggcguaccgguucaacgggaucggcgugacccagaacgugcucuacgagaaccagaagcugaucgccaaccaguucaacagcgccaucgggaagauccaggacucccugagcuccaccgccagcgcccucggcaagcugcaggacgucgugaaccagaacgcgcaggcccugaacacgcucgugaagcagcuguccagcaacuucggggccaucuccagcguccugaacgacauccucucccgccuggacccgcccgaggccgaggugcagaucgaccggcugaucaccggccgccuccagagccugcagaccuacgugacccagcagcugauccgggccgcggagauccgcgccagcgccaaccucgccgccaccaagauguccgagugcguccugggccagagcaagcggguggacuucugcgggaagggcuaccaccugauguccuucccccagagcgcgccccacgggguggucuuccuccacgugacguacguccccgcccaggagaagaacuucaccaccgccccggccaucugccacgacggcaaggcgcacuucccccgcgaggggguguucguguccaacggcacccacugguucgucacgcagcggaacuucuacgagccccagaucaucaccaccgacaacaccuucgugagcggcaacugcgacguggucaucgggaucgugaacaacacgguguacgacccccugcagccggagcuggacuccuucaaggaggagcucgacaaguacuucaagaaccacaccagccccgacgucgaccugggcgacaucuccgggaucaacgccagcguggugaacauccagaaggagaucgaccgccugaacgaggucgccaagaaccucaacgagucccugaucgaccugcaggagcucggcaaguacgagcaguacaucaaguggcccugguacaucuggcugggcuucaucgccgggcugaucgccaucgugauggugaccaucaugcucugcugcaugaccagcugcugcuccugccugaagggcugcugcagcugcggguccugcugcaaguucgacgaggacgacagcgagccgguccugaagggcgugaagcuccacuacacgugaggacuagucccuguucccagagcccacuuuuuuuucuuuuuuugaaauaaaauagccugucuuucagaucucaaaggcucuuuucagagccaccaaaaaaaaaaaaaaaaaaaaaaaaaaaaaaaaaaaaaaaaaaaaaaaaaaaaaaaaaaaaaaaaaaaaaaaaaaaaaaaaaaaaaaaaaaaaaaaaaaaaa

SEQ ID NO: 23758 - RNA, 4191 nt, Artificial Sequence
  SARS-CoV-2/Wuhan/WIV05/2019__EPI_ISL_402128 spike protein mRNA gc (1-1273)(K986P_V987P_N439K_D614G)
aggagagggcgcuuggcuugcaaggacccugagcugcggcauugaagcacacccaacccaacucgacugaagucagccucacugaaccggaucugagaaucuucucucucugggcuugccagggcucuccgaaccuagcuagcauccucuucaauuccaacuagaaagcuuaccauguucguguuccugguccuccugccccuggugagcucccagugcgugaaccucaccacccgcacgcagcugccgcccgccuacaccaacagcuucacccggggcgucuacuaccccgacaagguguuccgcuccagcgugcugcacuccacccaggaccucuuccugcccuucuucagcaacgucacgugguuccacgccauccacguguccgggaccaacggcaccaagcgguucgacaacccggugcugcccuucaacgacggggucuacuucgcgagcaccgagaaguccaacaucauccgcggcuggaucuucgggacgacccucgacagcaagacccagucccugcugaucgugaacaacgccaccaacguggucaucaaggugugcgaguuccaguucugcaacgaccccuuccucggcguguacuaccacaagaacaacaagagcuggauggaguccgaguuccgggucuacagcuccgccaacaacugcacguucgaguacgugagccagcccuuccugauggaccuggagggcaagcaggggaacuucaagaaccuccgcgaguucguguucaagaacaucgacggcuacuucaagaucuacuccaagcacaccccgaucaaccugguccgggaccugccccagggguucagcgcccucgagccccugguggaccugcccaucggcaucaacaucacccgcuuccagacccuccuggcccugcaccgguccuaccucacgccgggggacagcagcuccggcuggaccgcgggcgccgccgccuacuacgugggguaccugcagccccgcaccuuccugcucaaguacaacgagaacggcaccaucacggacgcggucgacugcgcccuggacccccugagcgagaccaagugcacccucaaguccuucaccguggagaaggggaucuaccagacgagcaacuuccgggugcagcccaccgaguccaucguccgcuucccgaacaucaccaaccugugccccuucggcgagguguucaacgccacccgguucgccagcgucuacgccuggaaccgcaagcggaucuccaacugcguggcggacuacagcgugcuguacaacuccgccagcuucuccacguucaagugcuacggcgucagccccaccaagcucaacgaccugugcuucaccaacguguacgccgacuccuucgugauccgcggggacgagguccggcagaucgcccccggccagaccgggaagaucgccgacuacaacuacaagcugccggacgacuucacgggcugcgugaucgcguggaacagcaagaaccucgacuccaaggucgggggcaacuacaacuaccuguaccgccuguuccgcaagagcaaccucaagcccuucgagcgggacaucuccaccgagaucuaccaggccggcagcacccccugcaacgggguggagggcuucaacugcuacuucccccugcaguccuacggguuccagccgaccaacggcgugggguaccagcccuaccggguggucgugcugagcuucgagcuccugcacgcccccgccacggugugcggccccaagaaguccaccaaccuggucaagaacaagugcgugaacuucaacuucaacggccucaccgggaccggcgugcugaccgagagcaacaagaaguuccugccguuccagcaguucgggcgcgacaucgccgacacgaccgacgcgguccgcgacccccagacccuggagauccucgacaucacccccugcagcuucggcgggguguccgugaucacgccgggcaccaacaccagcaaccaggucgccgugcuguaccagggcgugaacugcaccgagguccccguggccauccacgccgaccagcugacgcccaccuggcggguguacuccaccgggagcaacgucuuccagacccgcgccggcugccucaucggggcggagcacgugaacaacuccuacgagugcgacauccccaucggcgccggcaucugcgccagcuaccagacgcagaccaacuccccgcggcgcgcccggagcguggcgucccagagcaucaucgccuacaccaugucccugggggccgagaacagcgucgccuacuccaacaacagcaucgccauccccaccaacuucacgaucuccgugaccaccgagauccugcccgugagcaugaccaagacgagcgucgacugcaccauguacaucugcggcgacuccaccgagugcagcaaccuccugcugcaguacggguccuucugcacccagcucaaccgcgcgcugacgggcaucgccguggagcaggacaagaacacccaggagguguucgcccaggucaagcagaucuacaagacgcccccgaucaaggacuucgggggcuucaacuucagccagauccugcccgaccccuccaagcccagcaagcgguccuucaucgaggaccuccuguucaacaaggugacccuggccgacgccggcuucaucaagcaguacggggacugccucggcgacaucgcggcccgcgaccugaucugcgcccagaaguucaacgggcugaccgugcucccgccccugcugaccgacgagaugaucgcccaguacaccagcgcccuccuggcgggcaccaucacguccggguggaccuucggcgccggcgccgcccugcagauccccuucgcgaugcagauggccuaccgguucaacgggaucggcgucacccagaacgugcucuacgagaaccagaagcugaucgccaaccaguucaacagcgccaucgggaagauccaggacucccugagcuccaccgccagcgcgcucggcaagcugcaggacguggucaaccagaacgcccaggcccugaacacgcucgugaagcagcuguccagcaacuucggggccaucuccagcgugcugaacgacauccucucccgccuggacccgcccgaggccgagguccagaucgaccggcugaucaccggccgccuccagagccugcagaccuacgugacccagcagcugauccgggcggccgagauccgcgccagcgccaaccucgccgcgaccaagauguccgagugcgugcugggccagagcaagcgggucgacuucugcgggaagggcuaccaccugauguccuucccccagagcgcgccccacggggugguguuccuccacgucacguacgugcccgcccaggagaagaacuucaccaccgccccggccaucugccacgacggcaaggcccacuucccccgcgagggggucuucguguccaacggcacccacugguucgugacgcagcggaacuucuacgagccccagaucaucaccaccgacaacaccuucgucagcggcaacugcgacguggugaucgggaucgucaacaacacgguguacgacccccugcagccggagcuggacuccuucaaggaggagcucgacaaguacuucaagaaccacaccagccccgacguggaccugggcgacaucuccgggaucaacgccagcgucgugaacauccagaaggagaucgaccgccugaacgagguggccaagaaccucaacgagucccugaucgaccugcaggagcucggcaaguacgagcaguacaucaaguggcccugguacaucuggcugggcuucaucgccgggcugaucgcgaucgucauggugaccaucaugcucugcugcaugaccagcugcugcuccugccugaagggcugcugcagcugcggguccugcugcaaguucgacgaggacgacagcgagccggugcugaagggcgucaagcuccacuacacgugaggacuagucccuguucccagagcccacuuuuuuuucuuuuuuugaaauaaaauagccugucuuucagaucucaaaggcucuuuucagagccaccaaaaaaaaaaaaaaaaaaaaaaaaaaaaaaaaaaaaaaaaaaaaaaaaaaaaaaaaaaaaaaaaaaaaaaaaaaaaaaaaaaaaaaaaaaaaaaaaaaaaa

SEQ ID NO: 23759 - RNA, 4191 nt, Artificial Sequence
  SARS-CoV-2/Wuhan/WIV05/2019__EPI_ISL_402128 spike protein mRNA gc (1-1273)(K986P_V987P_S477N_D614G)
aggagagggcgcuuggcuugcaaggacccugagcugcggcauugaagcacacccaacccaacucgacugaagucagccucacugaaccggaucugagaaucuucucucucugggcuugccagggcucuccgaaccuagcuagcauccucuucaauuccaacuagaaagcuuaccauguucguguuccugguccuccugccccuggugagcucccagugcgugaaccucaccacccgcacgcagcugccgcccgccuacaccaacagcuucacccggggcgucuacuaccccgacaagguguuccgcuccagcgugcugcacuccacccaggaccucuuccugcccuucuucagcaacgucacgugguuccacgccauccacguguccgggaccaacggcaccaagcgguucgacaacccggugcugcccuucaacgacggggucuacuucgcgagcaccgagaaguccaacaucauccgcggcuggaucuucgggacgacccucgacagcaagacccagucccugcugaucgugaacaacgccaccaacguggucaucaaggugugcgaguuccaguucugcaacgaccccuuccucggcguguacuaccacaagaacaacaagagcuggauggaguccgaguuccgggucuacagcuccgccaacaacugcacguucgaguacgugagccagcccuuccugauggaccuggagggcaagcaggggaacuucaagaaccuccgcgaguucguguucaagaacaucgacggcuacuucaagaucuacuccaagcacaccccgaucaaccugguccgggaccugccccagggguucagcgcccucgagccccugguggaccugcccaucggcaucaacaucacccgcuuccagacccuccuggcccugcaccgguccuaccucacgccgggggacagcagcuccggcuggaccgcgggcgccgccgccuacuacgugggguaccugcagccccgcaccuuccugcucaaguacaacgagaacggcaccaucacggacgcggucgacugcgcccuggacccccugagcgagaccaagugcacccucaaguccuucaccguggagaaggggaucuaccagacgagcaacuuccgggugcagcccaccgaguccaucguccgcuucccgaacaucaccaaccugugccccuucggcgagguguucaacgccacccgguucgccagcgucuacgccuggaaccgcaagcggaucuccaacugcguggcggacuacagcgugcuguacaacuccgccagcuucuccacguucaagugcuacggcgucagccccaccaagcucaacgaccugugcuucaccaacguguacgccgacuccuucgugauccgcggggacgagguccggcagaucgcccccggccagaccgggaagaucgccgacuacaacuacaagcugccggacgacuucacgggcugcgugaucgcguggaacagcaacaaccucgacuccaaggucgggggcaacuacaacuaccuguaccgccuguuccgcaagagcaaccucaagcccuucgagcgggacaucuccaccgagaucuaccaggccggcaacacccccugcaacgggguggagggcuucaacugcuacuucccccugcagagcuacggguuccagccgaccaacggcgugggguaccagcccuaccggguggucgugcuguccuucgagcuccugcacgcccccgccacggugugcggccccaagaaguccaccaaccuggucaagaacaagugcgugaacuucaacuucaacggccucaccgggaccggcgugcugaccgagagcaacaagaaguuccugccguuccagcaguucgggcgcgacaucgccgacacgaccgacgcgguccgcgacccccagacccuggagauccucgacaucacccccugcagcuucggcggggugagcgugaucacgccgggcaccaacaccuccaaccaggucgccgugcuguaccagggcgugaacugcaccgagguccccguggccauccacgccgaccagcugacgcccaccuggcggguguacagcaccggguccaacgucuuccagacccgcgccggcugccucaucggggcggagcacgugaacaacagcuacgagugcgacauccccaucggcgccggcaucugcgccuccuaccagacgcagaccaacagcccgcggcgcgcccgguccguggcgagccaguccaucaucgccuacaccaugagccugggggccgagaacuccgucgccuacagcaacaacuccaucgccauccccaccaacuucacgaucagcgugaccaccgagauccugcccguguccaugaccaagacgagcgucgacugcaccauguacaucugcggcgacagcaccgagugcuccaaccuccugcugcaguacgggagcuucugcacccagcucaaccgcgcgcugacgggcaucgccguggagcaggacaagaacacccaggagguguucgcccaggucaagcagaucuacaagacgcccccgaucaaggacuucgggggcuucaacuucucccagauccugcccgaccccagcaagcccuccaagcggagcuucaucgaggaccuccuguucaacaaggugacccuggccgacgccggcuucaucaagcaguacggggacugccucggcgacaucgcggcccgcgaccugaucugcgcccagaaguucaacgggcugaccgugcucccgccccugcugaccgacgagaugaucgcccaguacaccuccgcccuccuggcgggcaccaucacgagcggguggaccuucggcgccggcgccgcccugcagauccccuucgcgaugcagauggccuaccgguucaacgggaucggcgucacccagaacgugcucuacgagaaccagaagcugaucgccaaccaguucaacuccgccaucgggaagauccaggacagccuguccagcaccgccuccgcgcucggcaagcugcaggacguggucaaccagaacgcccaggcccugaacacgcucgugaagcagcugagcuccaacuucggggccaucagcuccgugcugaacgacauccucagccgccuggacccgcccgaggccgagguccagaucgaccggcugaucaccggccgccuccagucccugcagaccuacgugacccagcagcugauccgggcggccgagauccgcgccagcgccaaccucgccgcgaccaagaugagcgagugcgugcugggccaguccaagcgggucgacuucugcgggaagggcuaccaccugaugagcuucccccaguccgcgccccacggggugguguuccuccacgucacguacgugcccgcccaggagaagaacuucaccaccgccccggccaucugccacgacggcaaggcccacuucccccgcgagggggucuucgugagcaacggcacccacugguucgugacgcagcggaacuucuacgagccccagaucaucaccaccgacaacaccuucgucuccggcaacugcgacguggugaucgggaucgucaacaacacgguguacgacccccugcagccggagcuggacagcuucaaggaggagcucgacaaguacuucaagaaccacaccucccccgacguggaccugggcgacaucagcgggaucaacgccuccgucgugaacauccagaaggagaucgaccgccugaacgagguggccaagaaccucaacgagagccugaucgaccugcaggagcucggcaaguacgagcaguacaucaaguggcccugguacaucuggcugggcuucaucgccgggcugaucgcgaucgucauggugaccaucaugcucugcugcaugaccuccugcugcagcugccugaagggcugcugcuccugcgggagcugcugcaaguucgacgaggacgacuccgagccggugcugaagggcgucaagcuccacuacacgugaggacuagucccuguucccagagcccacuuuuuuuucuuuuuuugaaauaaaauagccugucuuucagaucucaaaggcucuuuucagagccaccaaaaaaaaaaaaaaaaaaaaaaaaaaaaaaaaaaaaaaaaaaaaaaaaaaaaaaaaaaaaaaaaaaaaaaaaaaaaaaaaaaaaaaaaaaaaaaaaaaaaa

SEQ ID NO: 23760 - RNA, 4191 nt, Artificial Sequence
  SARS-CoV-2/Wuhan/WIV05/2019__EPI_ISL_402128 spike protein mRNA gc (1-1273)(K986P_V987P_N501Y_D614G)
aggagagggcgcuuggcuugcaaggacccugagcugcggcauugaagcacacccaacccaacucgacugaagucagccucacugaaccggaucugagaaucuucucucucugggcuugccagggcucuccgaaccuagcuagcauccucuucaauuccaacuagaaagcuuaccauguucguguuccugguccuccugccccuggugagcucccagugcgugaaccucaccacccgcacgcagcugccgcccgccuacaccaacagcuucacccggggcgucuacuaccccgacaagguguuccgcuccagcgugcugcacuccacccaggaccucuuccugcccuucuucagcaacgucacgugguuccacgccauccacguguccgggaccaacggcaccaagcgguucgacaacccggugcugcccuucaacgacggggucuacuucgcgagcaccgagaaguccaacaucauccgcggcuggaucuucgggacgacccucgacagcaagacccagucccugcugaucgugaacaacgccaccaacguggucaucaaggugugcgaguuccaguucugcaacgaccccuuccucggcguguacuaccacaagaacaacaagagcuggauggaguccgaguuccgggucuacagcuccgccaacaacugcacguucgaguacgugagccagcccuuccugauggaccuggagggcaagcaggggaacuucaagaaccuccgcgaguucguguucaagaacaucgacggcuacuucaagaucuacuccaagcacaccccgaucaaccugguccgggaccugccccagggguucagcgcccucgagccccugguggaccugcccaucggcaucaacaucacccgcuuccagacccuccuggcccugcaccgguccuaccucacgccgggggacagcagcuccggcuggaccgcgggcgccgccgccuacuacgugggguaccugcagccccgcaccuuccugcucaaguacaacgagaacggcaccaucacggacgcggucgacugcgcccuggacccccugagcgagaccaagugcacccucaaguccuucaccguggagaaggggaucuaccagacgagcaacuuccgggugcagcccaccgaguccaucguccgcuucccgaacaucaccaaccugugccccuucggcgagguguucaacgccacccgguucgccagcgucuacgccuggaaccgcaagcggaucuccaacugcguggcggacuacagcgugcuguacaacuccgccagcuucuccacguucaagugcuacggcgucagccccaccaagcucaacgaccugugcuucaccaacguguacgccgacuccuucgugauccgcggggacgagguccggcagaucgcccccggccagaccgggaagaucgccgacuacaacuacaagcugccggacgacuucacgggcugcgugaucgcguggaacagcaacaaccucgacuccaaggucgggggcaacuacaacuaccuguaccgccuguuccgcaagagcaaccucaagcccuucgagcgggacaucuccaccgagaucuaccaggccggcagcacccccugcaacgggguggagggcuucaacugcuacuucccccugcaguccuacggguuccagccgaccuacggcgugggguaccagcccuaccggguggucgugcugagcuucgagcuccugcacgcccccgccacggugugcggccccaagaaguccaccaaccuggucaagaacaagugcgugaacuucaacuucaacggccucaccgggaccggcgugcugaccgagagcaacaagaaguuccugccguuccagcaguucgggcgcgacaucgccgacacgaccgacgcgguccgcgacccccagacccuggagauccucgacaucacccccugcagcuucggcgggguguccgugaucacgccgggcaccaacaccagcaaccaggucgccgugcuguaccagggcgugaacugcaccgagguccccguggccauccacgccgaccagcugacgcccaccuggcggguguacuccaccgggagcaacgucuuccagacccgcgccggcugccucaucggggcggagcacgugaacaacuccuacgagugcgacauccccaucggcgccggcaucugcgccagcuaccagacgcagaccaacuccccgcggcgcgcccggagcguggcgucccagagcaucaucgccuacaccaugucccugggggccgagaacagcgucgccuacuccaacaacagcaucgccauccccaccaacuucacgaucuccgugaccaccgagauccugcccgugagcaugaccaagacgagcgucgacugcaccauguacaucugcggcgacuccaccgagugcagcaaccuccugcugcaguacggguccuucugcacccagcucaaccgcgcgcugacgggcaucgccguggagcaggacaagaacacccaggagguguucgcccaggucaagcagaucuacaagacgcccccgaucaaggacuucgggggcuucaacuucagccagauccugcccgaccccuccaagcccagcaagcgguccuucaucgaggaccuccuguucaacaaggugacccuggccgacgccggcuucaucaagcaguacggggacugccucggcgacaucgcggcccgcgaccugaucugcgcccagaaguucaacgggcugaccgugcucccgccccugcugaccgacgagaugaucgcccaguacaccagcgcccuccuggcgggcaccaucacguccggguggaccuucggcgccggcgccgcccugcagauccccuucgcgaugcagauggccuaccgguucaacgggaucggcgucacccagaacgugcucuacgagaaccagaagcugaucgccaaccaguucaacagcgccaucgggaagauccaggacucccugagcuccaccgccagcgcgcucggcaagcugcaggacguggucaaccagaacgcccaggcccugaacacgcucgugaagcagcuguccagcaacuucggggccaucuccagcgugcugaacgacauccucucccgccuggacccgcccgaggccgagguccagaucgaccggcugaucaccggccgccuccagagccugcagaccuacgugacccagcagcugauccgggcggccgagauccgcgccagcgccaaccucgccgcgaccaagauguccgagugcgugcugggccagagcaagcgggucgacuucugcgggaagggcuaccaccugauguccuucccccagagcgcgccccacggggugguguuccuccacgucacguacgugcccgcccaggagaagaacuucaccaccgccccggccaucugccacgacggcaaggcccacuucccccgcgagggggucuucguguccaacggcacccacugguucgugacgcagcggaacuucuacgagccccagaucaucaccaccgacaacaccuucgucagcggcaacugcgacguggugaucgggaucgucaacaacacgguguacgacccccugcagccggagcuggacuccuucaaggaggagcucgacaaguacuucaagaaccacaccagccccgacguggaccugggcgacaucuccgggaucaacgccagcgucgugaacauccagaaggagaucgaccgccugaacgagguggccaagaaccucaacgagucccugaucgaccugcaggagcucggcaaguacgagcaguacaucaaguggcccugguacaucuggcugggcuucaucgccgggcugaucgcgaucgucauggugaccaucaugcucugcugcaugaccagcugcugcuccugccugaagggcugcugcagcugcggguccugcugcaaguucgacgaggacgacagcgagccggugcugaagggcgucaagcuccacuacacgugaggacuagucccuguucccagagcccacuuuuuuuucuuuuuuugaaauaaaauagccugucuuucagaucucaaaggcucuuuucagagccaccaaaaaaaaaaaaaaaaaaaaaaaaaaaaaaaaaaaaaaaaaaaaaaaaaaaaaaaaaaaaaaaaaaaaaaaaaaaaaaaaaaaaaaaaaaaaaaaaaaaaa

SEQ ID NO: 23761 - RNA, 4185 nt, Artificial Sequence
  SARS-CoV-2/Wuhan/WIV05/2019__EPI_ISL_402128 spike protein mRNA gc (1-1273)(K986P_V987P_H69del_V70del_D614G)
aggagagggcgcuuggcuugcaaggacccugagcugcggcauugaagcacacccaacccaacucgacugaagucagccucacugaaccggaucugagaaucuucucucucugggcuugccagggcucuccgaaccuagcuagcauccucuucaauuccaacuagaaagcuuaccauguucguguuccugguccuccugccccuggugagcucccagugcgugaaccucaccacccgcacgcagcugccgcccgccuacaccaacagcuucacccggggcgucuacuaccccgacaagguguuccgcuccagcgugcugcacuccacccaggaccucuuccugcccuucuucagcaacgucacgugguuccacgccaucuccgggaccaacggcaccaagcgguucgacaacccggugcugcccuucaacgacgggguguacuucgcgagcaccgagaaguccaacaucauccgcggcuggaucuucgggacgacccucgacagcaagacccagucccugcugaucgucaacaacgccaccaacguggugaucaaggucugcgaguuccaguucugcaacgaccccuuccucggcguguacuaccacaagaacaacaagagcuggauggaguccgaguuccggguguacagcuccgccaacaacugcacguucgaguacgucagccagcccuuccugauggaccuggagggcaagcaggggaacuucaagaaccuccgcgaguucguguucaagaacaucgacggcuacuucaagaucuacuccaagcacaccccgaucaaccuggugcgggaccugccccagggguucagcgcccucgagccccuggucgaccugcccaucggcaucaacaucacccgcuuccagacccuccuggcccugcaccgguccuaccucacgccgggggacagcagcuccggcuggaccgcgggcgccgccgccuacuacgugggguaccugcagccccgcaccuuccugcucaaguacaacgagaacggcaccaucacggacgcgguggacugcgcccuggacccccugagcgagaccaagugcacccucaaguccuucaccgucgagaaggggaucuaccagacgagcaacuuccgggugcagcccaccgaguccaucgugcgcuucccgaacaucaccaaccugugccccuucggcgaggucuucaacgccacccgguucgccagcguguacgccuggaaccgcaagcggaucuccaacugcgucgcggacuacagcgugcuguacaacuccgccagcuucuccacguucaagugcuacggcgugagccccaccaagcucaacgaccugugcuucaccaacgucuacgccgacuccuucgugauccgcggggacgaggugcggcagaucgcccccggccagaccgggaagaucgccgacuacaacuacaagcugccggacgacuucacgggcugcgucaucgcguggaacagcaacaaccucgacuccaaggucgggggcaacuacaacuaccuguaccgccuguuccgcaagagcaaccucaagcccuucgagcgggacaucuccaccgagaucuaccaggccggcagcacccccugcaacgggguggagggcuucaacugcuacuucccccugcaguccuacggguuccagccgaccaacggcgugggguaccagcccuaccggguggugguccugagcuucgagcuccugcacgcccccgccacggugugcggccccaagaaguccaccaaccuggugaagaacaagugcgucaacuucaacuucaacggccucaccgggaccggcgugcugaccgagagcaacaagaaguuccugccguuccagcaguucgggcgcgacaucgccgacacgaccgacgcggugcgcgacccccagacccuggagauccucgacaucacccccugcagcuucggcggggucuccgugaucacgccgggcaccaacaccagcaaccagguggccguccuguaccagggcgugaacugcaccgaggugcccgucgccauccacgccgaccagcugacgcccaccuggcggguguacuccaccgggagcaacguguuccagacccgcgccggcugccucaucggggcggagcacgucaacaacuccuacgagugcgacauccccaucggcgccggcaucugcgccagcuaccagacgcagaccaacuccccgcggcgcgcccggagcguggcgucccagagcaucaucgccuacaccaugucccugggggccgagaacagcguggccuacuccaacaacagcaucgccauccccaccaacuucacgaucuccgucaccaccgagauccugcccgugagcaugaccaagacgagcguggacugcaccauguacaucugcggcgacuccaccgagugcagcaaccuccugcugcaguacggguccuucugcacccagcucaaccgcgcgcugacgggcaucgccgucgagcaggacaagaacacccaggagguguucgcccaggugaagcagaucuacaagacgcccccgaucaaggacuucgggggcuucaacuucagccagauccugcccgaccccuccaagcccagcaagcgguccuucaucgaggaccuccuguucaacaaggucacccuggccgacgccggcuucaucaagcaguacggggacugccucggcgacaucgcggcccgcgaccugaucugcgcccagaaguucaacgggcugaccgugcucccgccccugcugaccgacgagaugaucgcccaguacaccagcgcccuccuggcgggcaccaucacguccggguggaccuucggcgccggcgccgcccugcagauccccuucgcgaugcagauggccuaccgguucaacgggaucggcgugacccagaacguccucuacgagaaccagaagcugaucgccaaccaguucaacagcgccaucgggaagauccaggacucccugagcuccaccgccagcgcgcucggcaagcugcaggacguggugaaccagaacgcccaggcccugaacacgcucgucaagcagcuguccagcaacuucggggccaucuccagcgugcugaacgacauccucucccgccuggacccgcccgaggccgaggugcagaucgaccggcugaucaccggccgccuccagagccugcagaccuacgucacccagcagcugauccgggcggccgagauccgcgccagcgccaaccucgccgcgaccaagauguccgagugcgugcugggccagagcaagcggguggacuucugcgggaagggcuaccaccugauguccuucccccagagcgcgccccacggggucguguuccuccacgugacguacguccccgcccaggagaagaacuucaccaccgccccggccaucugccacgacggcaaggcccacuucccccgcgaggggguguucgucuccaacggcacccacugguucgugacgcagcggaacuucuacgagccccagaucaucaccaccgacaacaccuucgugagcggcaacugcgacgucgugaucgggaucgugaacaacacggucuacgacccccugcagccggagcuggacuccuucaaggaggagcucgacaaguacuucaagaaccacaccagccccgacguggaccugggcgacaucuccgggaucaacgccagcguggucaacauccagaaggagaucgaccgccugaacgagguggccaagaaccucaacgagucccugaucgaccugcaggagcucggcaaguacgagcaguacaucaaguggcccugguacaucuggcugggcuucaucgccgggcugaucgcgaucgugauggucaccaucaugcucugcugcaugaccagcugcugcuccugccugaagggcugcugcagcugcggguccugcugcaaguucgacgaggacgacagcgagccggugcugaagggcgugaagcuccacuacacgugaggacuagucccuguucccagagcccacuuuuuuuucuuuuuuugaaauaaaauagccugucuuucagaucucaaaggcucuuuucagagccaccaaaaaaaaaaaaaaaaaaaaaaaaaaaaaaaaaaaaaaaaaaaaaaaaaaaaaaaaaaaaaaaaaaaaaaaaaaaaaaaaaaaaaaaaaaaaaaaaaaaaa

SEQ ID NO: 23762 - RNA, 4191 nt, Artificial Sequence
  SARS-CoV-2/Wuhan/WIV05/2019__EPI_ISL_402128 spike protein mRNA gc (1-1273)(K986P_V987P_Y453F_D614G)
aggagagggcgcuuggcuugcaaggacccugagcugcggcauugaagcacacccaacccaacucgacugaagucagccucacugaaccggaucugagaaucuucucucucugggcuugccagggcucuccgaaccuagcuagcauccucuucaauuccaacuagaaagcuuaccauguucguguuccugguccuccugccccuggugagcucccagugcgugaaccucaccacccgcacgcagcugccgcccgccuacaccaacagcuucacccggggcgucuacuaccccgacaagguguuccgcuccagcgugcugcacuccacccaggaccucuuccugcccuucuucagcaacgucacgugguuccacgccauccacguguccgggaccaacggcaccaagcgguucgacaacccggugcugcccuucaacgacggggucuacuucgcgagcaccgagaaguccaacaucauccgcggcuggaucuucgggacgacccucgacagcaagacccagucccugcugaucgugaacaacgccaccaacguggucaucaaggugugcgaguuccaguucugcaacgaccccuuccucggcguguacuaccacaagaacaacaagagcuggauggaguccgaguuccgggucuacagcuccgccaacaacugcacguucgaguacgugagccagcccuuccugauggaccuggagggcaagcaggggaacuucaagaaccuccgcgaguucguguucaagaacaucgacggcuacuucaagaucuacuccaagcacaccccgaucaaccugguccgggaccugccccagggguucagcgcccucgagccccugguggaccugcccaucggcaucaacaucacccgcuuccagacccuccuggcccugcaccgguccuaccucacgccgggggacagcagcuccggcuggaccgcgggcgccgccgccuacuacgugggguaccugcagccccgcaccuuccugcucaaguacaacgagaacggcaccaucacggacgcggucgacugcgcccuggacccccugagcgagaccaagugcacccucaaguccuucaccguggagaaggggaucuaccagacgagcaacuuccgggugcagcccaccgaguccaucguccgcuucccgaacaucaccaaccugugccccuucggcgagguguucaacgccacccgguucgccagcgucuacgccuggaaccgcaagcggaucuccaacugcguggcggacuacagcgugcuguacaacuccgccagcuucuccacguucaagugcuacggcgucagccccaccaagcucaacgaccugugcuucaccaacguguacgccgacuccuucgugauccgcggggacgagguccggcagaucgcccccggccagaccgggaagaucgccgacuacaacuacaagcugccggacgacuucacgggcugcgugaucgcguggaacagcaacaaccucgacuccaaggucgggggcaacuacaacuaccuguuccgccuguuccgcaagagcaaccucaagcccuucgagcgggacaucuccaccgagaucuaccaggccggcagcacccccugcaacgggguggagggcuucaacugcuacuucccccugcaguccuacggguuccagccgaccaacggcgugggguaccagcccuaccggguggucgugcugagcuucgagcuccugcacgcccccgccacggugugcggccccaagaaguccaccaaccuggucaagaacaagugcgugaacuucaacuucaacggccucaccgggaccggcgugcugaccgagagcaacaagaaguuccugccguuccagcaguucgggcgcgacaucgccgacacgaccgacgcgguccgcgacccccagacccuggagauccucgacaucacccccugcagcuucggcgggguguccgugaucacgccgggcaccaacaccagcaaccaggucgccgugcuguaccagggcgugaacugcaccgagguccccguggccauccacgccgaccagcugacgcccaccuggcggguguacuccaccgggagcaacgucuuccagacccgcgccggcugccucaucggggcggagcacgugaacaacuccuacgagugcgacauccccaucggcgccggcaucugcgccagcuaccagacgcagaccaacuccccgcggcgcgcccggagcguggcgucccagagcaucaucgccuacaccaugucccugggggccgagaacagcgucgccuacuccaacaacagcaucgccauccccaccaacuucacgaucuccgugaccaccgagauccugcccgugagcaugaccaagacgagcgucgacugcaccauguacaucugcggcgacuccaccgagugcagcaaccuccugcugcaguacggguccuucugcacccagcucaaccgcgcgcugacgggcaucgccguggagcaggacaagaacacccaggagguguucgcccaggucaagcagaucuacaagacgcccccgaucaaggacuucgggggcuucaacuucagccagauccugcccgaccccuccaagcccagcaagcgguccuucaucgaggaccuccuguucaacaaggugacccuggccgacgccggcuucaucaagcaguacggggacugccucggcgacaucgcggcccgcgaccugaucugcgcccagaaguucaacgggcugaccgugcucccgccccugcugaccgacgagaugaucgcccaguacaccagcgcccuccuggcgggcaccaucacguccggguggaccuucggcgccggcgccgcccugcagauccccuucgcgaugcagauggccuaccgguucaacgggaucggcgucacccagaacgugcucuacgagaaccagaagcugaucgccaaccaguucaacagcgccaucgggaagauccaggacucccugagcuccaccgccagcgcgcucggcaagcugcaggacguggucaaccagaacgcccaggcccugaacacgcucgugaagcagcuguccagcaacuucggggccaucuccagcgugcugaacgacauccucucccgccuggacccgcccgaggccgagguccagaucgaccggcugaucaccggccgccuccagagccugcagaccuacgugacccagcagcugauccgggcggccgagauccgcgccagcgccaaccucgccgcgaccaagauguccgagugcgugcugggccagagcaagcgggucgacuucugcgggaagggcuaccaccugauguccuucccccagagcgcgccccacggggugguguuccuccacgucacguacgugcccgcccaggagaagaacuucaccaccgccccggccaucugccacgacggcaaggcccacuucccccgcgagggggucuucguguccaacggcacccacugguucgugacgcagcggaacuucuacgagccccagaucaucaccaccgacaacaccuucgucagcggcaacugcgacguggugaucgggaucgucaacaacacgguguacgacccccugcagccggagcuggacuccuucaaggaggagcucgacaaguacuucaagaaccacaccagccccgacguggaccugggcgacaucuccgggaucaacgccagcgucgugaacauccagaaggagaucgaccgccugaacgagguggccaagaaccucaacgagucccugaucgaccugcaggagcucggcaaguacgagcaguacaucaaguggcccugguacaucuggcugggcuucaucgccgggcugaucgcgaucgucauggugaccaucaugcucugcugcaugaccagcugcugcuccugccugaagggcugcugcagcugcggguccugcugcaaguucgacgaggacgacagcgagccggugcugaagggcgucaagcuccacuacacgugaggacuagucccuguucccagagcccacuuuuuuuucuuuuuuugaaauaaaauagccugucuuucagaucucaaaggcucuuuucagagccaccaaaaaaaaaaaaaaaaaaaaaaaaaaaaaaaaaaaaaaaaaaaaaaaaaaaaaaaaaaaaaaaaaaaaaaaaaaaaaaaaaaaaaaaaaaaaaaaaaaaaa

SEQ ID NO: 23763 - RNA, 4191 nt, Artificial Sequence
  SARS-CoV-2/Wuhan/WIV05/2019__EPI_ISL_402128 spike protein mRNA gc (1-1273)(K986P_V987P_D614G_I692V)
aggagagggcgcuuggcuugcaaggacccugagcugcggcauugaagcacacccaacccaacucgacugaagucagccucacugaaccggaucugagaaucuucucucucugggcuugccagggcucuccgaaccuagcuagcauccucuucaauuccaacuagaaagcuuaccauguucguguuccugguccuccugccccuggugagcucccagugcgugaaccucaccacccgcacgcagcugccgcccgccuacaccaacagcuucacccggggcgucuacuaccccgacaagguguuccgcuccagcgugcugcacuccacccaggaccucuuccugcccuucuucagcaacgucacgugguuccacgccauccacguguccgggaccaacggcaccaagcgguucgacaacccggugcugcccuucaacgacggggucuacuucgcgagcaccgagaaguccaacaucauccgcggcuggaucuucgggacgacccucgacagcaagacccagucccugcugaucgugaacaacgccaccaacguggucaucaaggugugcgaguuccaguucugcaacgaccccuuccucggcguguacuaccacaagaacaacaagagcuggauggaguccgaguuccgggucuacagcuccgccaacaacugcacguucgaguacgugagccagcccuuccugauggaccuggagggcaagcaggggaacuucaagaaccuccgcgaguucguguucaagaacaucgacggcuacuucaagaucuacuccaagcacaccccgaucaaccugguccgggaccugccccagggguucagcgcccucgagccccugguggaccugcccaucggcaucaacaucacccgcuuccagacccuccuggcccugcaccgguccuaccucacgccgggggacagcagcuccggcuggaccgcgggcgccgccgccuacuacgugggguaccugcagccccgcaccuuccugcucaaguacaacgagaacggcaccaucacggacgcggucgacugcgcccuggacccccugagcgagaccaagugcacccucaaguccuucaccguggagaaggggaucuaccagacgagcaacuuccgggugcagcccaccgaguccaucguccgcuucccgaacaucaccaaccugugccccuucggcgagguguucaacgccacccgguucgccagcgucuacgccuggaaccgcaagcggaucuccaacugcguggcggacuacagcgugcuguacaacuccgccagcuucuccacguucaagugcuacggcgucagccccaccaagcucaacgaccugugcuucaccaacguguacgccgacuccuucgugauccgcggggacgagguccggcagaucgcccccggccagaccgggaagaucgccgacuacaacuacaagcugccggacgacuucacgggcugcgugaucgcguggaacagcaacaaccucgacuccaaggucgggggcaacuacaacuaccuguaccgccuguuccgcaagagcaaccucaagcccuucgagcgggacaucuccaccgagaucuaccaggccggcagcacccccugcaacgggguggagggcuucaacugcuacuucccccugcaguccuacggguuccagccgaccaacggcgugggguaccagcccuaccggguggucgugcugagcuucgagcuccugcacgcccccgccacggugugcggccccaagaaguccaccaaccuggucaagaacaagugcgugaacuucaacuucaacggccucaccgggaccggcgugcugaccgagagcaacaagaaguuccugccguuccagcaguucgggcgcgacaucgccgacacgaccgacgcgguccgcgacccccagacccuggagauccucgacaucacccccugcagcuucggcgggguguccgugaucacgccgggcaccaacaccagcaaccaggucgccgugcuguaccagggcgugaacugcaccgagguccccguggccauccacgccgaccagcugacgcccaccuggcggguguacuccaccgggagcaacgucuuccagacccgcgccggcugccucaucggggcggagcacgugaacaacuccuacgagugcgacauccccaucggcgccggcaucugcgccagcuaccagacgcagaccaacuccccgcggcgcgcccggagcguggcgucccagagcgucaucgccuacaccaugucccugggggccgagaacagcguggccuacuccaacaacagcaucgccauccccaccaacuucacgaucuccgugaccaccgagauccugcccgucagcaugaccaagacgagcguggacugcaccauguacaucugcggcgacuccaccgagugcagcaaccuccugcugcaguacggguccuucugcacccagcucaaccgcgcgcugacgggcaucgccguggagcaggacaagaacacccaggaggucuucgcccaggugaagcagaucuacaagacgcccccgaucaaggacuucgggggcuucaacuucagccagauccugcccgaccccuccaagcccagcaagcgguccuucaucgaggaccuccuguucaacaaggugacccuggccgacgccggcuucaucaagcaguacggggacugccucggcgacaucgcggcccgcgaccugaucugcgcccagaaguucaacgggcugaccguccucccgccccugcugaccgacgagaugaucgcccaguacaccagcgcccuccuggcgggcaccaucacguccggguggaccuucggcgccggcgccgcccugcagauccccuucgcgaugcagauggccuaccgguucaacgggaucggcgugacccagaacgugcucuacgagaaccagaagcugaucgccaaccaguucaacagcgccaucgggaagauccaggacucccugagcuccaccgccagcgcgcucggcaagcugcaggacgucgugaaccagaacgcccaggcccugaacacgcucgugaagcagcuguccagcaacuucggggccaucuccagcguccugaacgacauccucucccgccuggacccgcccgaggccgaggugcagaucgaccggcugaucaccggccgccuccagagccugcagaccuacgugacccagcagcugauccgggcggccgagauccgcgccagcgccaaccucgccgcgaccaagauguccgagugcguccugggccagagcaagcggguggacuucugcgggaagggcuaccaccugauguccuucccccagagcgcgccccacgggguggucuuccuccacgugacguacguccccgcccaggagaagaacuucaccaccgccccggccaucugccacgacggcaaggcccacuucccccgcgaggggguguucguguccaacggcacccacugguucgucacgcagcggaacuucuacgagccccagaucaucaccaccgacaacaccuucgugagcggcaacugcgacguggucaucgggaucgugaacaacacgguguacgacccccugcagccggagcuggacuccuucaaggaggagcucgacaaguacuucaagaaccacaccagccccgacgucgaccugggcgacaucuccgggaucaacgccagcguggugaacauccagaaggagaucgaccgccugaacgaggucgccaagaaccucaacgagucccugaucgaccugcaggagcucggcaaguacgagcaguacaucaaguggcccugguacaucuggcugggcuucaucgccgggcugaucgcgaucgugauggugaccaucaugcucugcugcaugaccagcugcugcuccugccugaagggcugcugcagcugcggguccugcugcaaguucgacgaggacgacagcgagccgguccugaagggcgugaagcuccacuacacgugaggacuagucccuguucccagagcccacuuuuuuuucuuuuuuugaaauaaaauagccugucuuucagaucucaaaggcucuuuucagagccaccaaaaaaaaaaaaaaaaaaaaaaaaaaaaaaaaaaaaaaaaaaaaaaaaaaaaaaaaaaaaaaaaaaaaaaaaaaaaaaaaaaaaaaaaaaaaaaaaaaaaa

SEQ ID NO: 23764 - RNA, 4191 nt, Artificial Sequence
  SARS-CoV-2/Wuhan/WIV05/2019__EPI_ISL_402128 spike protein mRNA gc (1-1273)(K986P_V987P_D614G_M1229I)
aggagagggcgcuuggcuugcaaggacccugagcugcggcauugaagcacacccaacccaacucgacugaagucagccucacugaaccggaucugagaaucuucucucucugggcuugccagggcucuccgaaccuagcuagcauccucuucaauuccaacuagaaagcuuaccauguucguguuccugguccuccugccccuggugagcucccagugcgugaaccucaccacccgcacgcagcugccgcccgccuacaccaacagcuucacccggggcgucuacuaccccgacaagguguuccgcuccagcgugcugcacuccacccaggaccucuuccugcccuucuucagcaacgucacgugguuccacgccauccacguguccgggaccaacggcaccaagcgguucgacaacccggugcugcccuucaacgacggggucuacuucgcgagcaccgagaaguccaacaucauccgcggcuggaucuucgggacgacccucgacagcaagacccagucccugcugaucgugaacaacgccaccaacguggucaucaaggugugcgaguuccaguucugcaacgaccccuuccucggcguguacuaccacaagaacaacaagagcuggauggaguccgaguuccgggucuacagcuccgccaacaacugcacguucgaguacgugagccagcccuuccugauggaccuggagggcaagcaggggaacuucaagaaccuccgcgaguucguguucaagaacaucgacggcuacuucaagaucuacuccaagcacaccccgaucaaccugguccgggaccugccccagggguucagcgcccucgagccccugguggaccugcccaucggcaucaacaucacccgcuuccagacccuccuggcccugcaccgguccuaccucacgccgggggacagcagcuccggcuggaccgcgggcgccgccgccuacuacgugggguaccugcagccccgcaccuuccugcucaaguacaacgagaacggcaccaucacggacgcggucgacugcgcccuggacccccugagcgagaccaagugcacccucaaguccuucaccguggagaaggggaucuaccagacgagcaacuuccgggugcagcccaccgaguccaucguccgcuucccgaacaucaccaaccugugccccuucggcgagguguucaacgccacccgguucgccagcgucuacgccuggaaccgcaagcggaucuccaacugcguggcggacuacagcgugcuguacaacuccgccagcuucuccacguucaagugcuacggcgucagccccaccaagcucaacgaccugugcuucaccaacguguacgccgacuccuucgugauccgcggggacgagguccggcagaucgcccccggccagaccgggaagaucgccgacuacaacuacaagcugccggacgacuucacgggcugcgugaucgcguggaacagcaacaaccucgacuccaaggucgggggcaacuacaacuaccuguaccgccuguuccgcaagagcaaccucaagcccuucgagcgggacaucuccaccgagaucuaccaggccggcagcacccccugcaacgggguggagggcuucaacugcuacuucccccugcaguccuacggguuccagccgaccaacggcgugggguaccagcccuaccggguggucgugcugagcuucgagcuccugcacgcccccgccacggugugcggccccaagaaguccaccaaccuggucaagaacaagugcgugaacuucaacuucaacggccucaccgggaccggcgugcugaccgagagcaacaagaaguuccugccguuccagcaguucgggcgcgacaucgccgacacgaccgacgcgguccgcgacccccagacccuggagauccucgacaucacccccugcagcuucggcgggguguccgugaucacgccgggcaccaacaccagcaaccaggucgccgugcuguaccagggcgugaacugcaccgagguccccguggccauccacgccgaccagcugacgcccaccuggcggguguacuccaccgggagcaacgucuuccagacccgcgccggcugccucaucggggcggagcacgugaacaacuccuacgagugcgacauccccaucggcgccggcaucugcgccagcuaccagacgcagaccaacuccccgcggcgcgcccggagcguggcgucccagagcaucaucgccuacaccaugucccugggggccgagaacagcgucgccuacuccaacaacagcaucgccauccccaccaacuucacgaucuccgugaccaccgagauccugcccgugagcaugaccaagacgagcgucgacugcaccauguacaucugcggcgacuccaccgagugcagcaaccuccugcugcaguacggguccuucugcacccagcucaaccgcgcgcugacgggcaucgccguggagcaggacaagaacacccaggagguguucgcccaggucaagcagaucuacaagacgcccccgaucaaggacuucgggggcuucaacuucagccagauccugcccgaccccuccaagcccagcaagcgguccuucaucgaggaccuccuguucaacaaggugacccuggccgacgccggcuucaucaagcaguacggggacugccucggcgacaucgcggcccgcgaccugaucugcgcccagaaguucaacgggcugaccgugcucccgccccugcugaccgacgagaugaucgcccaguacaccagcgcccuccuggcgggcaccaucacguccggguggaccuucggcgccggcgccgcccugcagauccccuucgcgaugcagauggccuaccgguucaacgggaucggcgucacccagaacgugcucuacgagaaccagaagcugaucgccaaccaguucaacagcgccaucgggaagauccaggacucccugagcuccaccgccagcgcgcucggcaagcugcaggacguggucaaccagaacgcccaggcccugaacacgcucgugaagcagcuguccagcaacuucggggccaucuccagcgugcugaacgacauccucucccgccuggacccgcccgaggccgagguccagaucgaccggcugaucaccggccgccuccagagccugcagaccuacgugacccagcagcugauccgggcggccgagauccgcgccagcgccaaccucgccgcgaccaagauguccgagugcgugcugggccagagcaagcgggucgacuucugcgggaagggcuaccaccugauguccuucccccagagcgcgccccacggggugguguuccuccacgucacguacgugcccgcccaggagaagaacuucaccaccgccccggccaucugccacgacggcaaggcccacuucccccgcgagggggucuucguguccaacggcacccacugguucgugacgcagcggaacuucuacgagccccagaucaucaccaccgacaacaccuucgucagcggcaacugcgacguggugaucgggaucgucaacaacacgguguacgacccccugcagccggagcuggacuccuucaaggaggagcucgacaaguacuucaagaaccacaccagccccgacguggaccugggcgacaucuccgggaucaacgccagcgucgugaacauccagaaggagaucgaccgccugaacgagguggccaagaaccucaacgagucccugaucgaccugcaggagcucggcaaguacgagcaguacaucaaguggcccugguacaucuggcugggcuucaucgccgggcugaucgcgaucgucaucgugaccaucaugcucugcugcaugaccagcugcugcuccugccugaagggcugcugcagcugcggguccugcugcaaguucgacgaggacgacagcgagccggugcugaagggcgucaagcuccacuacacgugaggacuagucccuguucccagagcccacuuuuuuuucuuuuuuugaaauaaaauagccugucuuucagaucucaaaggcucuuuucagagccaccaaaaaaaaaaaaaaaaaaaaaaaaaaaaaaaaaaaaaaaaaaaaaaaaaaaaaaaaaaaaaaaaaaaaaaaaaaaaaaaaaaaaaaaaaaaaaaaaaaaaa

SEQ ID NO: 23765 - RNA, 4185 nt, Artificial Sequence
  SARS-CoV-2/Wuhan/WIV05/2019__EPI_ISL_402128 spike protein mRNA gc (1-1273)(K986P_V987P_H69del_V70del_A222V_Y453F_S477N_D614G_I692V)
aggagagggcgcuuggcuugcaaggacccugagcugcggcauugaagcacacccaacccaacucgacugaagucagccucacugaaccggaucugagaaucuucucucucugggcuugccagggcucuccgaaccuagcuagcauccucuucaauuccaacuagaaagcuuaccauguucguguuccugguccuccugccccuggugagcucccagugcgugaaccucaccacccgcacgcagcugccgcccgccuacaccaacagcuucacccggggcgucuacuaccccgacaagguguuccgcuccagcgugcugcacuccacccaggaccucuuccugcccuucuucagcaacgucacgugguuccacgccaucuccgggaccaacggcaccaagcgguucgacaacccggugcugcccuucaacgacgggguguacuucgcgagcaccgagaaguccaacaucauccgcggcuggaucuucgggacgacccucgacagcaagacccagucccugcugaucgucaacaacgccaccaacguggugaucaaggucugcgaguuccaguucugcaacgaccccuuccucggcguguacuaccacaagaacaacaagagcuggauggaguccgaguuccggguguacagcuccgccaacaacugcacguucgaguacgucagccagcccuuccugauggaccuggagggcaagcaggggaacuucaagaaccuccgcgaguucguguucaagaacaucgacggcuacuucaagaucuacuccaagcacaccccgaucaaccuggugcgggaccugccccagggguucagcguccucgagccccugguggaccugcccaucggcaucaacaucacccgcuuccagacccuccuggcccugcaccgguccuaccucacgccgggggacagcagcuccggcuggaccgccggcgcggccgccuacuacgugggguaccugcagccccgcaccuuccugcucaaguacaacgagaacggcaccaucacggacgccgucgacugcgcgcuggacccccugagcgagaccaagugcacccucaaguccuucaccguggagaaggggaucuaccagacgagcaacuuccgggugcagcccaccgaguccaucguccgcuucccgaacaucaccaaccugugccccuucggcgagguguucaacgccacccgguucgccagcgucuacgccuggaaccgcaagcggaucuccaacugcguggccgacuacagcgugcuguacaacuccgcgagcuucuccacguucaagugcuacggcgucagccccaccaagcucaacgaccugugcuucaccaacguguacgccgacuccuucgugauccgcggggacgagguccggcagaucgcccccggccagaccgggaagaucgccgacuacaacuacaagcugccggacgacuucacgggcugcgugaucgccuggaacagcaacaaccucgacuccaaggucgggggcaacuacaacuaccuguuccgccuguuccgcaagagcaaccucaagcccuucgagcgggacaucuccaccgagaucuaccaggcgggcaacacccccugcaacgggguggagggcuucaacugcuacuucccccugcagagcuacggguuccagccgaccaacggcgugggguaccagcccuaccggguggucgugcuguccuucgagcuccugcacgcccccgccacggugugcggccccaagaaguccaccaaccuggucaagaacaagugcgugaacuucaacuucaacggccucaccgggaccggcgugcugaccgagagcaacaagaaguuccugccguuccagcaguucgggcgcgacaucgccgacacgaccgacgccguccgcgacccccagacccuggagauccucgacaucacccccugcagcuucggcggggugagcgugaucacgccgggcaccaacaccuccaaccaggucgcggugcuguaccagggcgugaacugcaccgagguccccguggccauccacgccgaccagcugacgcccaccuggcggguguacagcaccggguccaacgucuuccagacccgcgccggcugccucaucggggccgagcacgugaacaacagcuacgagugcgacauccccaucggcgcgggcaucugcgccuccuaccagacgcagaccaacagcccgcggcgcgcccgguccguggccagccaguccgucaucgcguacaccaugagccugggggccgagaacuccguggccuacagcaacaacuccaucgccauccccaccaacuucacgaucagcgugaccaccgagauccugcccgucuccaugaccaagacgagcguggacugcaccauguacaucugcggcgacagcaccgagugcuccaaccuccugcugcaguacgggagcuucugcacccagcucaaccgcgcccugacgggcaucgcgguggagcaggacaagaacacccaggaggucuucgcccaggugaagcagaucuacaagacgcccccgaucaaggacuucgggggcuucaacuucucccagauccugcccgaccccagcaagcccuccaagcggagcuucaucgaggaccuccuguucaacaaggugacccuggccgacgccggcuucaucaagcaguacggggacugccucggcgacaucgccgcgcgcgaccugaucugcgcccagaaguucaacgggcugaccguccucccgccccugcugaccgacgagaugaucgcccaguacaccuccgcccuccuggccggcaccaucacgagcggguggaccuucggcgcgggcgccgcccugcagauccccuucgccaugcagauggcguaccgguucaacgggaucggcgugacccagaacgugcucuacgagaaccagaagcugaucgccaaccaguucaacuccgccaucgggaagauccaggacagccuguccagcaccgccuccgcccucggcaagcugcaggacgucgugaaccagaacgcgcaggcccugaacacgcucgugaagcagcugagcuccaacuucggggccaucagcuccguccugaacgacauccucagccgccuggacccgcccgaggccgaggugcagaucgaccggcugaucaccggccgccuccagucccugcagaccuacgugacccagcagcugauccgggccgcggagauccgcgccagcgccaaccucgccgccaccaagaugagcgagugcguccugggccaguccaagcggguggacuucugcgggaagggcuaccaccugaugagcuucccccaguccgcgccccacgggguggucuuccuccacgugacguacguccccgcccaggagaagaacuucaccaccgccccggccaucugccacgacggcaaggcgcacuucccccgcgaggggguguucgugagcaacggcacccacugguucgucacgcagcggaacuucuacgagccccagaucaucaccaccgacaacaccuucguguccggcaacugcgacguggucaucgggaucgugaacaacacgguguacgacccccugcagccggagcuggacagcuucaaggaggagcucgacaaguacuucaagaaccacaccucccccgacgucgaccugggcgacaucagcgggaucaacgccuccguggugaacauccagaaggagaucgaccgccugaacgaggucgccaagaaccucaacgagagccugaucgaccugcaggagcucggcaaguacgagcaguacaucaaguggcccugguacaucuggcugggcuucaucgccgggcugaucgccaucgugauggugaccaucaugcucugcugcaugaccuccugcugcagcugccugaagggcugcugcuccugcgggagcugcugcaaguucgacgaggacgacuccgagccgguccugaagggcgugaagcuccacuacacgugaggacuagucccuguucccagagcccacuuuuuuuucuuuuuuugaaauaaaauagccugucuuucagaucucaaaggcucuuuucagagccaccaaaaaaaaaaaaaaaaaaaaaaaaaaaaaaaaaaaaaaaaaaaaaaaaaaaaaaaaaaaaaaaaaaaaaaaaaaaaaaaaaaaaaaaaaaaaaaaaaaaaa

SEQ ID NO: 23766 - RNA, 4185 nt, Artificial Sequence
  SARS-CoV-2/Wuhan/WIV05/2019__EPI_ISL_402128 spike protein mRNA gc (1-1273)(K986P_V987P_H69del_V70del_Y453F_D614G_I692V_M1229I)
aggagagggcgcuuggcuugcaaggacccugagcugcggcauugaagcacacccaacccaacucgacugaagucagccucacugaaccggaucugagaaucuucucucucugggcuugccagggcucuccgaaccuagcuagcauccucuucaauuccaacuagaaagcuuaccauguucguguuccugguccuccugccccuggugagcucccagugcgugaaccucaccacccgcacgcagcugccgcccgccuacaccaacagcuucacccggggcgucuacuaccccgacaagguguuccgcuccagcgugcugcacuccacccaggaccucuuccugcccuucuucagcaacgucacgugguuccacgccaucuccgggaccaacggcaccaagcgguucgacaacccggugcugcccuucaacgacgggguguacuucgcgagcaccgagaaguccaacaucauccgcggcuggaucuucgggacgacccucgacagcaagacccagucccugcugaucgucaacaacgccaccaacguggugaucaaggucugcgaguuccaguucugcaacgaccccuuccucggcguguacuaccacaagaacaacaagagcuggauggaguccgaguuccggguguacagcuccgccaacaacugcacguucgaguacgucagccagcccuuccugauggaccuggagggcaagcaggggaacuucaagaaccuccgcgaguucguguucaagaacaucgacggcuacuucaagaucuacuccaagcacaccccgaucaaccuggugcgggaccugccccagggguucagcgcccucgagccccuggucgaccugcccaucggcaucaacaucacccgcuuccagacccuccuggcccugcaccgguccuaccucacgccgggggacagcagcuccggcuggaccgcgggcgccgccgccuacuacgugggguaccugcagccccgcaccuuccugcucaaguacaacgagaacggcaccaucacggacgcgguggacugcgcccuggacccccugagcgagaccaagugcacccucaaguccuucaccgucgagaaggggaucuaccagacgagcaacuuccgggugcagcccaccgaguccaucgugcgcuucccgaacaucaccaaccugugccccuucggcgaggucuucaacgccacccgguucgccagcguguacgccuggaaccgcaagcggaucuccaacugcgucgcggacuacagcgugcuguacaacuccgccagcuucuccacguucaagugcuacggcgugagccccaccaagcucaacgaccugugcuucaccaacgucuacgccgacuccuucgugauccgcggggacgaggugcggcagaucgcccccggccagaccgggaagaucgccgacuacaacuacaagcugccggacgacuucacgggcugcgucaucgcguggaacagcaacaaccucgacuccaaggucgggggcaacuacaacuaccuguuccgccuguuccgcaagagcaaccucaagcccuucgagcgggacaucuccaccgagaucuaccaggccggcagcacccccugcaacgggguggagggcuucaacugcuacuucccccugcaguccuacggguuccagccgaccaacggcgugggguaccagcccuaccggguggugguccugagcuucgagcuccugcacgcccccgccacggugugcggccccaagaaguccaccaaccuggugaagaacaagugcgucaacuucaacuucaacggccucaccgggaccggcgugcugaccgagagcaacaagaaguuccugccguuccagcaguucgggcgcgacaucgccgacacgaccgacgcggugcgcgacccccagacccuggagauccucgacaucacccccugcagcuucggcggggucuccgugaucacgccgggcaccaacaccagcaaccagguggccguccuguaccagggcgugaacugcaccgaggugcccgucgccauccacgccgaccagcugacgcccaccuggcggguguacuccaccgggagcaacguguuccagacccgcgccggcugccucaucggggcggagcacgucaacaacuccuacgagugcgacauccccaucggcgccggcaucugcgccagcuaccagacgcagaccaacuccccgcggcgcgcccggagcguggcgucccagagcgugaucgccuacaccaugucccugggggccgagaacagcgucgccuacuccaacaacagcaucgccauccccaccaacuucacgaucuccgugaccaccgagauccugcccgugagcaugaccaagacgagcgucgacugcaccauguacaucugcggcgacuccaccgagugcagcaaccuccugcugcaguacggguccuucugcacccagcucaaccgcgcgcugacgggcaucgccguggagcaggacaagaacacccaggagguguucgcccaggucaagcagaucuacaagacgcccccgaucaaggacuucgggggcuucaacuucagccagauccugcccgaccccuccaagcccagcaagcgguccuucaucgaggaccuccuguucaacaaggugacccuggccgacgccggcuucaucaagcaguacggggacugccucggcgacaucgcggcccgcgaccugaucugcgcccagaaguucaacgggcugaccgugcucccgccccugcugaccgacgagaugaucgcccaguacaccagcgcccuccuggcgggcaccaucacguccggguggaccuucggcgccggcgccgcccugcagauccccuucgcgaugcagauggccuaccgguucaacgggaucggcgucacccagaacgugcucuacgagaaccagaagcugaucgccaaccaguucaacagcgccaucgggaagauccaggacucccugagcuccaccgccagcgcgcucggcaagcugcaggacguggucaaccagaacgcccaggcccugaacacgcucgugaagcagcuguccagcaacuucggggccaucuccagcgugcugaacgacauccucucccgccuggacccgcccgaggccgagguccagaucgaccggcugaucaccggccgccuccagagccugcagaccuacgugacccagcagcugauccgggcggccgagauccgcgccagcgccaaccucgccgcgaccaagauguccgagugcgugcugggccagagcaagcgggucgacuucugcgggaagggcuaccaccugauguccuucccccagagcgcgccccacggggugguguuccuccacgucacguacgugcccgcccaggagaagaacuucaccaccgccccggccaucugccacgacggcaaggcccacuucccccgcgagggggucuucguguccaacggcacccacugguucgugacgcagcggaacuucuacgagccccagaucaucaccaccgacaacaccuucgucagcggcaacugcgacguggugaucgggaucgucaacaacacgguguacgacccccugcagccggagcuggacuccuucaaggaggagcucgacaaguacuucaagaaccacaccagccccgacguggaccugggcgacaucuccgggaucaacgccagcgucgugaacauccagaaggagaucgaccgccugaacgagguggccaagaaccucaacgagucccugaucgaccugcaggagcucggcaaguacgagcaguacaucaaguggcccugguacaucuggcugggcuucaucgccgggcugaucgcgaucgucaucgugaccaucaugcucugcugcaugaccagcugcugcuccugccugaagggcugcugcagcugcggguccugcugcaaguucgacgaggacgacagcgagccggugcugaagggcgucaagcuccacuacacgugaggacuagucccuguucccagagcccacuuuuuuuucuuuuuuugaaauaaaauagccugucuuucagaucucaaaggcucuuuucagagccaccaaaaaaaaaaaaaaaaaaaaaaaaaaaaaaaaaaaaaaaaaaaaaaaaaaaaaaaaaaaaaaaaaaaaaaaaaaaaaaaaaaaaaaaaaaaaaaaaaaaaa

SEQ ID NO: 23767 - RNA, 4182 nt, Artificial Sequence
  SARS-CoV-2/Wuhan/WIV05/2019__EPI_ISL_402128 spike protein mRNA gc (1-1273)(K986P_V987P_K986P_V987P_H69del_V70del_Y144del_N501Y_A570 D_D614G_P681H_T716I_S982A_D1118H)
aggagagggcgcuuggcuugcaaggacccugagcugcggcauugaagcacacccaacccaacucgacugaagucagccucacugaaccggaucugagaaucuucucucucugggcuugccagggcucuccgaaccuagcuagcauccucuucaauuccaacuagaaagcuuaccauguucguguuccugguccuccugccccuggugagcucccagugcgugaaccucaccacccgcacgcagcugccgcccgccuacaccaacagcuucacccggggcgucuacuaccccgacaagguguuccgcuccagcgugcugcacuccacccaggaccucuuccugcccuucuucagcaacgucacgugguuccacgccaucuccgggaccaacggcaccaagcgguucgacaacccggugcugcccuucaacgacgggguguacuucgcgagcaccgagaaguccaacaucauccgcggcuggaucuucgggacgacccucgacagcaagacccagucccugcugaucgucaacaacgccaccaacguggugaucaaggucugcgaguuccaguucugcaacgaccccuuccucggcguguaccacaagaacaacaagagcuggauggaguccgaguuccggguguacagcuccgccaacaacugcacguucgaguacgucagccagcccuuccugauggaccuggagggcaagcaggggaacuucaagaaccuccgcgaguucguguucaagaacaucgacggcuacuucaagaucuacuccaagcacaccccgaucaaccuggugcgggaccugccccagggguucagcgcccucgagccccuggucgaccugcccaucggcaucaacaucacccgcuuccagacccuccuggcccugcaccgguccuaccucacgccgggggacagcagcuccggcuggaccgcgggcgccgccgccuacuacgugggguaccugcagccccgcaccuuccugcucaaguacaacgagaacggcaccaucacggacgcgguggacugcgcccuggacccccugagcgagaccaagugcacccucaaguccuucaccgucgagaaggggaucuaccagacgagcaacuuccgggugcagcccaccgaguccaucgugcgcuucccgaacaucaccaaccugugccccuucggcgaggucuucaacgccacccgguucgccagcguguacgccuggaaccgcaagcggaucuccaacugcgucgcggacuacagcgugcuguacaacuccgccagcuucuccacguucaagugcuacggcgugagccccaccaagcucaacgaccugugcuucaccaacgucuacgccgacuccuucgugauccgcggggacgaggugcggcagaucgcccccggccagaccgggaagaucgccgacuacaacuacaagcugccggacgacuucacgggcugcgucaucgcguggaacagcaacaaccucgacuccaaggucgggggcaacuacaacuaccuguaccgccuguuccgcaagagcaaccucaagcccuucgagcgggacaucuccaccgagaucuaccaggccggcagcacccccugcaacgggguggagggcuucaacugcuacuucccccugcaguccuacggguuccagccgaccuacggcgugggguaccagcccuaccggguggugguccugagcuucgagcuccugcacgcccccgccacggugugcggccccaagaaguccaccaaccuggugaagaacaagugcgucaacuucaacuucaacggccucaccgggaccggcgugcugaccgagagcaacaagaaguuccugccguuccagcaguucgggcgcgacaucgacgacacgaccgacgccgugcgcgacccccagacccuggagauccucgacaucacccccugcagcuucggcggggucuccgugaucacgccgggcaccaacaccagcaaccagguggcgguccuguaccagggcgugaacugcaccgaggugcccgucgccauccacgccgaccagcugacgcccaccuggcggguguacuccaccgggagcaacguguuccagacccgcgccggcugccucaucggggccgagcacgucaacaacuccuacgagugcgacauccccaucggcgcgggcaucugcgccagcuaccagacgcagaccaacucccaccggcgcgcccggagcguggccucccagagcaucaucgcguacaccaugucccugggggccgagaacagcguggccuacuccaacaacagcaucgccaucccgaucaacuucaccaucuccgucacgaccgagauccugcccgugagcaugaccaagaccagcguggacugcacgauguacaucugcggcgacuccaccgagugcagcaaccuccugcugcaguacggguccuucugcacccagcucaaccgcgcccugaccggcaucgcggucgagcaggacaagaacacgcaggagguguucgcccaggugaagcagaucuacaagaccccgcccaucaaggacuucgggggcuucaacuucagccagauccugcccgaccccuccaagcccagcaagcgguccuucaucgaggaccuccuguucaacaaggucacccuggccgacgccggcuucaucaagcaguacggggacugccucggcgacaucgccgcgcgcgaccugaucugcgcccagaaguucaacgggcugaccgugcugcccccgcuccugacggacgagaugaucgcccaguacaccagcgcccuccuggccggcaccaucaccuccggguggacguucggcgcgggcgccgcccugcagauccccuucgccaugcagauggcguaccgguucaacgggaucggcgugacccagaacguccucuacgagaaccagaagcugaucgccaaccaguucaacagcgccaucgggaagauccaggacucccugagcuccaccgccagcgcccucggcaagcugcaggacguggugaaccagaacgcgcaggcccugaacacccucgucaagcagcuguccagcaacuucggggccaucuccagcgugcugaacgacauccucgcccgccuggacccgcccgaggccgaggugcagaucgaccggcugaucacgggccgccuccagucccugcagaccuacgucacccagcagcugauccgggcggccgagauccgcgccagcgccaaccucgccgcgaccaagaugagcgagugcgugcugggccaguccaagcggguggacuucugcgggaagggcuaccaccugaugagcuucccccaguccgcgccccacggggucguguuccuccacgugaccuacguccccgcccaggagaagaacuucacgaccgcccccgccaucugccacgacggcaaggcccacuucccgcgcgaggggguguucgucagcaacggcacccacugguucgugacccagcggaacuucuacgagccccagaucaucacgacccacaacaccuucguguccggcaacugcgacgucgugaucgggaucgugaacaacaccgucuacgacccccugcagcccgagcuggacagcuucaaggaggagcucgacaaguacuucaagaaccacacguccccggacguggaccugggcgacaucagcgggaucaacgccuccguggucaacauccagaaggagaucgaccgccugaacgagguggccaagaaccucaacgagagccugaucgaccugcaggagcucggcaaguacgagcaguacaucaaguggcccugguacaucuggcugggcuucaucgccgggcugaucgcgaucgugauggucaccaucaugcucugcugcaugaccuccugcugcagcugccugaagggcugcugcuccugcgggagcugcugcaaguucgacgaggacgacuccgagcccgugcugaagggcgugaagcuccacuacaccugaggacuagucccuguucccagagcccacuuuuuuuucuuuuuuugaaauaaaauagccugucuuucagaucucaaaggcucuuuucagagccaccaaaaaaaaaaaaaaaaaaaaaaaaaaaaaaaaaaaaaaaaaaaaaaaaaaaaaaaaaaaaaaaaaaaaaaaaaaaaaaaaaaaaaaaaaaaaaaaaaaaaa

SEQ ID NO: 23768 - RNA, 4191 nt, Artificial Sequence
  SARS-CoV-2/Wuhan/WIV05/2019__EPI_ISL_402128 spike protein mRNA gc (1-1273)(K986P_V987P_K986P_V987P_K417N_E484K_N501Y_D614G)
aggagagggcgcuuggcuugcaaggacccugagcugcggcauugaagcacacccaacccaacucgacugaagucagccucacugaaccggaucugagaaucuucucucucugggcuugccagggcucuccgaaccuagcuagcauccucuucaauuccaacuagaaagcuuaccauguucguguuccugguccuccugccccuggugagcucccagugcgugaaccucaccacccgcacgcagcugccgcccgccuacaccaacagcuucacccggggcgucuacuaccccgacaagguguuccgcuccagcgugcugcacuccacccaggaccucuuccugcccuucuucagcaacgucacgugguuccacgccauccacguguccgggaccaacggcaccaagcgguucgacaacccggugcugcccuucaacgacggggucuacuucgcgagcaccgagaaguccaacaucauccgcggcuggaucuucgggacgacccucgacagcaagacccagucccugcugaucgugaacaacgccaccaacguggucaucaaggugugcgaguuccaguucugcaacgaccccuuccucggcguguacuaccacaagaacaacaagagcuggauggaguccgaguuccgggucuacagcuccgccaacaacugcacguucgaguacgugagccagcccuuccugauggaccuggagggcaagcaggggaacuucaagaaccuccgcgaguucguguucaagaacaucgacggcuacuucaagaucuacuccaagcacaccccgaucaaccugguccgggaccugccccagggguucagcgcccucgagccccugguggaccugcccaucggcaucaacaucacccgcuuccagacccuccuggcccugcaccgguccuaccucacgccgggggacagcagcuccggcuggaccgcgggcgccgccgccuacuacgugggguaccugcagccccgcaccuuccugcucaaguacaacgagaacggcaccaucacggacgcggucgacugcgcccuggacccccugagcgagaccaagugcacccucaaguccuucaccguggagaaggggaucuaccagacgagcaacuuccgggugcagcccaccgaguccaucguccgcuucccgaacaucaccaaccugugccccuucggcgagguguucaacgccacccgguucgccagcgucuacgccuggaaccgcaagcggaucuccaacugcguggcggacuacagcgugcuguacaacuccgccagcuucuccacguucaagugcuacggcgucagccccaccaagcucaacgaccugugcuucaccaacguguacgccgacuccuucgugauccgcggggacgagguccggcagaucgcccccggccagaccgggaacaucgccgacuacaacuacaagcugccggacgacuucacgggcugcgugaucgcguggaacagcaacaaccucgacuccaaggucgggggcaacuacaacuaccuguaccgccuguuccgcaagagcaaccucaagcccuucgagcgggacaucuccaccgagaucuaccaggccggcagcacccccugcaacggggugaagggcuucaacugcuacuucccccugcaguccuacggguuccagccgaccuacggcgugggguaccagcccuaccggguggucgugcugagcuucgagcuccugcacgcccccgccacggugugcggccccaagaaguccaccaaccuggucaagaacaagugcgugaacuucaacuucaacggccucaccgggaccggcgugcugaccgagagcaacaagaaguuccugccguuccagcaguucgggcgcgacaucgccgacacgaccgacgcgguccgcgacccccagacccuggagauccucgacaucacccccugcagcuucggcgggguguccgugaucacgccgggcaccaacaccagcaaccaggucgccgugcuguaccagggcgugaacugcaccgagguccccguggccauccacgccgaccagcugacgcccaccuggcggguguacuccaccgggagcaacgucuuccagacccgcgccggcugccucaucggggcggagcacgugaacaacuccuacgagugcgacauccccaucggcgccggcaucugcgccagcuaccagacgcagaccaacuccccgcggcgcgcccggagcguggcgucccagagcaucaucgccuacaccaugucccugggggccgagaacagcgucgccuacuccaacaacagcaucgccauccccaccaacuucacgaucuccgugaccaccgagauccugcccgugagcaugaccaagacgagcgucgacugcaccauguacaucugcggcgacuccaccgagugcagcaaccuccugcugcaguacggguccuucugcacccagcucaaccgcgcgcugacgggcaucgccguggagcaggacaagaacacccaggagguguucgcccaggucaagcagaucuacaagacgcccccgaucaaggacuucgggggcuucaacuucagccagauccugcccgaccccuccaagcccagcaagcgguccuucaucgaggaccuccuguucaacaaggugacccuggccgacgccggcuucaucaagcaguacggggacugccucggcgacaucgcggcccgcgaccugaucugcgcccagaaguucaacgggcugaccgugcucccgccccugcugaccgacgagaugaucgcccaguacaccagcgcccuccuggcgggcaccaucacguccggguggaccuucggcgccggcgccgcccugcagauccccuucgcgaugcagauggccuaccgguucaacgggaucggcgucacccagaacgugcucuacgagaaccagaagcugaucgccaaccaguucaacagcgccaucgggaagauccaggacucccugagcuccaccgccagcgcgcucggcaagcugcaggacguggucaaccagaacgcccaggcccugaacacgcucgugaagcagcuguccagcaacuucggggccaucuccagcgugcugaacgacauccucucccgccuggacccgcccgaggccgagguccagaucgaccggcugaucaccggccgccuccagagccugcagaccuacgugacccagcagcugauccgggcggccgagauccgcgccagcgccaaccucgccgcgaccaagauguccgagugcgugcugggccagagcaagcgggucgacuucugcgggaagggcuaccaccugauguccuucccccagagcgcgccccacggggugguguuccuccacgucacguacgugcccgcccaggagaagaacuucaccaccgccccggccaucugccacgacggcaaggcccacuucccccgcgagggggucuucguguccaacggcacccacugguucgugacgcagcggaacuucuacgagccccagaucaucaccaccgacaacaccuucgucagcggcaacugcgacguggugaucgggaucgucaacaacacgguguacgacccccugcagccggagcuggacuccuucaaggaggagcucgacaaguacuucaagaaccacaccagccccgacguggaccugggcgacaucuccgggaucaacgccagcgucgugaacauccagaaggagaucgaccgccugaacgagguggccaagaaccucaacgagucccugaucgaccugcaggagcucggcaaguacgagcaguacaucaaguggcccugguacaucuggcugggcuucaucgccgggcugaucgcgaucgucauggugaccaucaugcucugcugcaugaccagcugcugcuccugccugaagggcugcugcagcugcggguccugcugcaaguucgacgaggacgacagcgagccggugcugaagggcgucaagcuccacuacacgugaggacuagucccuguucccagagcccacuuuuuuuucuuuuuuugaaauaaaauagccugucuuucagaucucaaaggcucuuuucagagccaccaaaaaaaaaaaaaaaaaaaaaaaaaaaaaaaaaaaaaaaaaaaaaaaaaaaaaaaaaaaaaaaaaaaaaaaaaaaaaaaaaaaaaaaaaaaaaaaaaaaaa

SEQ ID NO: 23769 - RNA, 4182 nt, Artificial Sequence
  SARS-CoV-2/Wuhan/WIV05/2019__EPI_ISL_402128 spike protein mRNA gc (1-1273)(K986P_V987P_K986P_V987P_L18F_D80A_D215G_L242del_A243del_ L244del_R246I_K417N_E484K_N501Y_D614G_A701V)
aggagagggcgcuuggcuugcaaggacccugagcugcggcauugaagcacacccaacccaacucgacugaagucagccucacugaaccggaucugagaaucuucucucucugggcuugccagggcucuccgaaccuagcuagcauccucuucaauuccaacuagaaagcuuaccauguucguguuccugguccuccugccccuggugagcucccagugcgugaacuucaccacccgcacgcagcucccgcccgccuacaccaacagcuucacccggggcgucuacuaccccgacaagguguuccgcuccagcgugcugcacuccacccaggaccuguuccuccccuucuucagcaacgucacgugguuccacgccauccacguguccgggaccaacggcaccaagcgguucgcgaacccggugcugcccuucaacgacggggucuacuucgccagcaccgagaaguccaacaucauccgcggcuggaucuucgggacgacccuggacagcaagacccagucccuccugaucgugaacaacgccaccaacguggucaucaaggugugcgaguuccaguucugcaacgaccccuuccugggcguguacuaccacaagaacaacaagagcuggauggaguccgaguuccgggucuacagcuccgccaacaacugcacguucgaguacgugagccagcccuuccucauggaccuggagggcaagcaggggaacuucaagaaccugcgcgaguucguguucaagaacaucgacggcuacuucaagaucuacuccaagcacaccccgaucaaccucguccgggggcugccccagggcuucagcgcccuggagccccucguggaccugcccaucgggaucaacaucacccgcuuccagacccugcacaucuccuaccucacgccgggcgacagcagcuccggcuggaccgcgggggccgccgccuacuacgugggcuaccugcagccccggaccuuccugcucaaguacaacgagaacgggaccaucacggacgcggucgacugcgcccuggacccccugagcgagaccaagugcacccucaaguccuucaccguggagaagggcaucuaccagacgagcaacuuccgcgugcagcccaccgaguccaucguccgguucccgaacaucaccaaccugugccccuucggcgagguguucaacgccacccgcuucgccagcgucuacgccuggaaccggaagcgcaucuccaacugcguggcggacuacagcgugcuguacaacuccgccagcuucuccacguucaagugcuacggggucagccccaccaagcucaacgaccugugcuucaccaacguguacgccgacuccuucgugauccggggcgacgagguccgccagaucgcccccgggcagaccggcaacaucgccgacuacaacuacaagcugccggacgacuucacggggugcgugaucgcguggaacagcaacaaccucgacuccaaggugggcggcaacuacaacuaccuguaccggcuguuccgcaagagcaaccucaagcccuucgagcgggacaucuccaccgagaucuaccaggccgggagcacccccugcaacggcgucaagggguucaacugcuacuucccccugcaguccuacggcuuccagccgaccuacggggugggcuaccagcccuaccgcguggucgugcugagcuucgagcuccugcacgcccccgccacggugugcggccccaagaaguccaccaaccuggucaagaacaagugcgugaacuucaacuucaacgggcucaccggcaccggggugcugaccgagagcaacaagaaguuccugccguuccagcaguucggccgggacaucgccgacacgaccgacgcgguccgcgacccccagacccucgagauccuggacaucacccccugcagcuucgggggcguguccgugaucacgccgggcaccaacaccagcaaccaggucgccgugcuguaccagggggugaacugcaccgagguccccguggccauccacgccgaccagcugacgcccaccuggcgcguguacuccaccggcagcaacgucuuccagacccgggccgggugccucaucggcgcggagcacgugaacaacuccuacgagugcgacauccccaucggcgccgggaucugcgccagcuaccagacgcagaccaacuccccgcgccgggcccgcagcguggcgucccagagcaucaucgccuacaccaugucccugggcgucgagaacagcguggccuacuccaacaacagcaucgccauccccaccaacuucacgaucuccgugaccaccgagauccugcccgucagcaugaccaagacgagcguggacugcaccauguacaucugcggggacuccaccgagugcagcaaccuccugcugcaguacggcuccuucugcacccagcucaaccgggcccugacggggaucgcgguggagcaggacaagaacacccaggaggucuucgcccaggugaagcagaucuacaagacgcccccgaucaaggacuucggcggcuucaacuucagccagauccugcccgaccccuccaagcccagcaagcgcuccuucaucgaggaccuccuguucaacaaggugacccuggccgacgccggguucaucaagcaguacggcgacugccucggggacaucgccgcgcgggaccugaucugcgcccagaaguucaacggccugaccguccucccgccccugcugaccgacgagaugaucgcccaguacaccagcgcccuccuggccgggaccaucacguccggcuggaccuucggcgcgggggccgcccugcagauccccuucgccaugcagauggcguaccgcuucaacggcaucggggugacccagaacgugcucuacgagaaccagaagcugaucgccaaccaguucaacagcgccaucggcaagauccaggacucccugagcuccaccgccagcgcccucgggaagcugcaggacgucgugaaccagaacgcgcaggcccugaacacgcucgugaagcagcuguccagcaacuucggcgccaucuccagcguccugaacgacauccucucccggcuggacccgcccgaggccgaggugcagaucgaccgccugaucaccggccggcuccagagccugcagaccuacgugacccagcagcugauccgcgccgcggagauccgggccagcgccaaccucgccgccaccaagauguccgagugcguccuggggcagagcaagcgcguggacuucugcggcaagggguaccaccugauguccuucccccagagcgcgccccacggcguggucuuccuccacgugacguacguccccgcccaggagaagaacuucaccaccgccccggccaucugccacgacgggaaggcgcacuucccccgggagggcguguucguguccaacggcacccacugguucgucacgcagcgcaacuucuacgagccccagaucaucaccaccgacaacaccuucgugagcgggaacugcgacguggucaucggcaucgugaacaacacgguguacgacccccugcagccggagcuggacuccuucaaggaggagcucgacaaguacuucaagaaccacaccagccccgacgucgaccugggggacaucuccggcaucaacgccagcguggugaacauccagaaggagaucgaccggcugaacgaggucgccaagaaccucaacgagucccugaucgaccugcaggagcucggcaaguacgagcaguacaucaaguggcccugguacaucuggcugggguucaucgccggccugaucgccaucgugauggugaccaucaugcucugcugcaugaccagcugcugcuccugccugaaggggugcugcagcugcggcuccugcugcaaguucgacgaggacgacagcgagccgguccugaagggggugaagcuccacuacacgugaggacuagucccuguucccagagcccacuuuuuuuucuuuuuuugaaauaaaauagccugucuuucagaucucaaaggcucuuuucagagccaccaaaaaaaaaaaaaaaaaaaaaaaaaaaaaaaaaaaaaaaaaaaaaaaaaaaaaaaaaaaaaaaaaaaaaaaaaaaaaaaaaaaaaaaaaaaaaaaaaaaaa

SEQ ID NO: 23770 - RNA, 4191 nt, Artificial Sequence
  SARS-CoV-2/Wuhan/WIV05/2019__EPI_ISL_402128 spike protein mRNA gc (1-1273)(K986P_V987P_K986P_V987P_E484K_D614G)
aggagagggcgcuuggcuugcaaggacccugagcugcggcauugaagcacacccaacccaacucgacugaagucagccucacugaaccggaucugagaaucuucucucucugggcuugccagggcucuccgaaccuagcuagcauccucuucaauuccaacuagaaagcuuaccauguucguguuccugguccuccugccccuggugagcucccagugcgugaaccucaccacccgcacgcagcugccgcccgccuacaccaacagcuucacccggggcgucuacuaccccgacaagguguuccgcuccagcgugcugcacuccacccaggaccucuuccugcccuucuucagcaacgucacgugguuccacgccauccacguguccgggaccaacggcaccaagcgguucgacaacccggugcugcccuucaacgacggggucuacuucgcgagcaccgagaaguccaacaucauccgcggcuggaucuucgggacgacccucgacagcaagacccagucccugcugaucgugaacaacgccaccaacguggucaucaaggugugcgaguuccaguucugcaacgaccccuuccucggcguguacuaccacaagaacaacaagagcuggauggaguccgaguuccgggucuacagcuccgccaacaacugcacguucgaguacgugagccagcccuuccugauggaccuggagggcaagcaggggaacuucaagaaccuccgcgaguucguguucaagaacaucgacggcuacuucaagaucuacuccaagcacaccccgaucaaccugguccgggaccugccccagggguucagcgcccucgagccccugguggaccugcccaucggcaucaacaucacccgcuuccagacccuccuggcccugcaccgguccuaccucacgccgggggacagcagcuccggcuggaccgcgggcgccgccgccuacuacgugggguaccugcagccccgcaccuuccugcucaaguacaacgagaacggcaccaucacggacgcggucgacugcgcccuggacccccugagcgagaccaagugcacccucaaguccuucaccguggagaaggggaucuaccagacgagcaacuuccgggugcagcccaccgaguccaucguccgcuucccgaacaucaccaaccugugccccuucggcgagguguucaacgccacccgguucgccagcgucuacgccuggaaccgcaagcggaucuccaacugcguggcggacuacagcgugcuguacaacuccgccagcuucuccacguucaagugcuacggcgucagccccaccaagcucaacgaccugugcuucaccaacguguacgccgacuccuucgugauccgcggggacgagguccggcagaucgcccccggccagaccgggaagaucgccgacuacaacuacaagcugccggacgacuucacgggcugcgugaucgcguggaacagcaacaaccucgacuccaaggucgggggcaacuacaacuaccuguaccgccuguuccgcaagagcaaccucaagcccuucgagcgggacaucuccaccgagaucuaccaggccggcagcacccccugcaacggggugaagggcuucaacugcuacuucccccugcaguccuacggguuccagccgaccaacggcgugggguaccagcccuaccggguggucgugcugagcuucgagcuccugcacgcccccgccacggugugcggccccaagaaguccaccaaccuggucaagaacaagugcgugaacuucaacuucaacggccucaccgggaccggcgugcugaccgagagcaacaagaaguuccugccguuccagcaguucgggcgcgacaucgccgacacgaccgacgcgguccgcgacccccagacccuggagauccucgacaucacccccugcagcuucggcgggguguccgugaucacgccgggcaccaacaccagcaaccaggucgccgugcuguaccagggcgugaacugcaccgagguccccguggccauccacgccgaccagcugacgcccaccuggcggguguacuccaccgggagcaacgucuuccagacccgcgccggcugccucaucggggcggagcacgugaacaacuccuacgagugcgacauccccaucggcgccggcaucugcgccagcuaccagacgcagaccaacuccccgcggcgcgcccggagcguggcgucccagagcaucaucgccuacaccaugucccugggggccgagaacagcgucgccuacuccaacaacagcaucgccauccccaccaacuucacgaucuccgugaccaccgagauccugcccgugagcaugaccaagacgagcgucgacugcaccauguacaucugcggcgacuccaccgagugcagcaaccuccugcugcaguacggguccuucugcacccagcucaaccgcgcgcugacgggcaucgccguggagcaggacaagaacacccaggagguguucgcccaggucaagcagaucuacaagacgcccccgaucaaggacuucgggggcuucaacuucagccagauccugcccgaccccuccaagcccagcaagcgguccuucaucgaggaccuccuguucaacaaggugacccuggccgacgccggcuucaucaagcaguacggggacugccucggcgacaucgcggcccgcgaccugaucugcgcccagaaguucaacgggcugaccgugcucccgccccugcugaccgacgagaugaucgcccaguacaccagcgcccuccuggcgggcaccaucacguccggguggaccuucggcgccggcgccgcccugcagauccccuucgcgaugcagauggccuaccgguucaacgggaucggcgucacccagaacgugcucuacgagaaccagaagcugaucgccaaccaguucaacagcgccaucgggaagauccaggacucccugagcuccaccgccagcgcgcucggcaagcugcaggacguggucaaccagaacgcccaggcccugaacacgcucgugaagcagcuguccagcaacuucggggccaucuccagcgugcugaacgacauccucucccgccuggacccgcccgaggccgagguccagaucgaccggcugaucaccggccgccuccagagccugcagaccuacgugacccagcagcugauccgggcggccgagauccgcgccagcgccaaccucgccgcgaccaagauguccgagugcgugcugggccagagcaagcgggucgacuucugcgggaagggcuaccaccugauguccuucccccagagcgcgccccacggggugguguuccuccacgucacguacgugcccgcccaggagaagaacuucaccaccgccccggccaucugccacgacggcaaggcccacuucccccgcgagggggucuucguguccaacggcacccacugguucgugacgcagcggaacuucuacgagccccagaucaucaccaccgacaacaccuucgucagcggcaacugcgacguggugaucgggaucgucaacaacacgguguacgacccccugcagccggagcuggacuccuucaaggaggagcucgacaaguacuucaagaaccacaccagccccgacguggaccugggcgacaucuccgggaucaacgccagcgucgugaacauccagaaggagaucgaccgccugaacgagguggccaagaaccucaacgagucccugaucgaccugcaggagcucggcaaguacgagcaguacaucaaguggcccugguacaucuggcugggcuucaucgccgggcugaucgcgaucgucauggugaccaucaugcucugcugcaugaccagcugcugcuccugccugaagggcugcugcagcugcggguccugcugcaaguucgacgaggacgacagcgagccggugcugaagggcgucaagcuccacuacacgugaggacuagucccuguucccagagcccacuuuuuuuucuuuuuuugaaauaaaauagccugucuuucagaucucaaaggcucuuuucagagccaccaaaaaaaaaaaaaaaaaaaaaaaaaaaaaaaaaaaaaaaaaaaaaaaaaaaaaaaaaaaaaaaaaaaaaaaaaaaaaaaaaaaaaaaaaaaaaaaaaaaaa

SEQ ID NO: 23771 - RNA, 4191 nt, Artificial Sequence
  SARS-CoV-2/Wuhan/WIV05/2019__EPI_ISL_402128 spike protein mRNA gc (1-1273)(K986P_V987P_K986P_V987P_L18F_T20N_P26S_D138Y_R190S_K417T _E484K_N501Y_D614G_H655Y_T1027I)
aggagagggcgcuuggcuugcaaggacccugagcugcggcauugaagcacacccaacccaacucgacugaagucagccucacugaaccggaucugagaaucuucucucucugggcuugccagggcucuccgaaccuagcuagcauccucuucaauuccaacuagaaagcuuaccauguucguguuccugguccuccugccccuggugagcucccagugcgugaacuucaccaaccgcacccagcucccgagcgccuacacgaacuccuucacccggggcgucuacuaccccgacaagguguuccgcagcuccgugcugcacagcacccaggaccuguuccuccccuucuucuccaacgucaccugguuccacgccauccacgugagcgggacgaacggcaccaagcgguucgacaaccccgugcugccguucaacgacggggucuacuucgcguccaccgagaaguccaacaucauccgcggcuggaucuucgggaccacgcuggacuccaagacccagagccuccugaucgugaacaacgccaccaacguggucaucaaggugugcgaguuccaguucugcaacuaccccuuccugggcguguacuaccacaagaacaacaaguccuggauggagagcgaguuccgggucuacuccagcgccaacaacugcaccuucgaguacgugucccagcccuuccucauggaccuggagggcaagcaggggaacuucaagaaccugagcgaguucguguucaagaacaucgacggcuacuucaagaucuacuccaagcacacgcccaucaaccucguccgcgaccugccgcagggguucagcgcccuggagccccucguggaccugcccaucggcaucaacaucacccgguuccagacccugcucgcccugcaccgcagcuaccugacccccggggacuccagcuccggcuggacggcgggcgccgccgccuacuacgugggguaccuccagccgcggaccuuccugcugaaguacaacgagaacggcaccaucaccgacgcggucgacugcgcccucgacccccugagcgagacgaagugcacccugaaguccuucaccguggagaaggggaucuaccagaccagcaacuuccgcgugcagcccacggaguccaucguccgguuccccaacaucaccaaccucugcccguucggcgagguguucaacgccacccgcuucgccagcgucuacgccuggaaccggaagcgcaucuccaacugcguggcggacuacagcgugcuguacaacuccgccagcuucuccaccuucaagugcuacggcgucagccccacgaagcugaacgaccucugcuucaccaacguguacgccgacuccuucgugauccgcggggacgagguccggcagaucgcccccggccagaccgggaccaucgccgacuacaacuacaagcugcccgacgacuucacgggcugcgugaucgcguggaacagcaacaaccuggacuccaaggucgggggcaacuacaacuaccucuaccggcuguuccgcaagagcaaccugaagccguucgagcgggacaucuccaccgagaucuaccaggccggcagcacccccugcaacggggugaagggcuucaacugcuacuucccccuccagagcuacggguuccagcccaccuacggcgugggguaccagccguaccgcguggucgugcuguccuucgagcugcuccacgcccccgccacggugugcggccccaagaaguccaccaaccuggucaagaacaagugcgugaacuucaacuucaacggccugaccgggaccggcgugcucaccgagagcaacaagaaguuccugcccuuccagcaguucgggcgggacaucgccgacacgaccgacgcgguccgcgacccgcagacccuggagauccuggacaucacccccugcagcuucggcgggguguccgugaucacgcccggcaccaacaccagcaaccaggucgccgugcucuaccagggcgugaacugcaccgaggucccgguggccauccacgccgaccagcugacgcccaccuggcgcguguacuccaccgggagcaacgucuuccagacccgggccggcugccugaucggggcggaguacgugaacaacuccuacgagugcgacauccccaucggcgccggcaucugcgccagcuaccagacgcagaccaacagcccccgccgggcccgcagcguggcgucccagagcaucaucgccuacaccaugucccucggggccgagaacagcgucgccuacuccaacaacagcaucgccaucccgaccaacuucacgaucagcgugaccaccgagauccugcccguguccaugaccaagacgagcgucgacugcaccauguacaucugcggcgacuccaccgagugcagcaaccugcuccugcaguacggguccuucugcacccagcugaaccgggcgcucacgggcaucgccguggagcaggacaagaacacccaggagguguucgcccaggucaagcagaucuacaagaccccgcccaucaaggacuucgggggcuucaacuucagccagauccugcccgaccccuccaagcccagcaagcgcuccuucaucgaggaccuccuguucaacaaggugacccuggccgacgccggcuucaucaagcaguacggggacugccugggcgacaucgcggcccgggaccucaucugcgcccagaaguucaacgggcugacggugcugcccccgcuccugaccgacgagaugaucgcccaguacaccagcgcccugcucgcgggcaccaucacguccggguggaccuucggcgccggcgccgcccugcagauccccuucgcgaugcagauggccuaccgcuucaacgggaucggcgucacccagaacgugcuguacgagaaccagaagcucaucgccaaccaguucaacagcgccaucgggaagauccaggacucccugagcuccaccgccagcgcgcugggcaagcuccaggacguggucaaccagaacgcccaggcccugaacacgcuggugaagcagcucuccagcaacuucggggccaucuccagcgugcugaacgacauccugagccggcucgacccgcccgaggccgagguccagaucgaccgccugaucaccggccggcugcagucccuccagaccuacgugacccagcagcugauccgcgcggccgagauccgggccagcgccaaccuggccgcgaucaagauguccgagugcgugcucggccagagcaagcgcgucgacuucugcgggaagggcuaccaccugauguccuucccccagagcgcgccccacggggugguguuccugcacgucaccuacgugcccgcccaggagaagaacuucacgaccgcccccgccaucugccacgacggcaaggcccacuucccgcgggagggggucuucguguccaacggcacccacugguucgugacccagcgcaacuucuacgagccccagaucaucacgaccgacaacaccuucgucagcggcaacugcgacguggugaucgggaucgucaacaacaccguguacgacccccuccagcccgagcuggacuccuucaaggaggagcuggacaaguacuucaagaaccacacgagcccggacguggaccucggcgacaucuccgggaucaacgccagcgucgugaacauccagaaggagaucgaccggcugaacgagguggccaagaaccugaacgagucccucaucgaccugcaggagcugggcaaguacgagcaguacaucaaguggcccugguacaucuggcucggcuucaucgccgggcugaucgcgaucgucauggugaccaucaugcugugcugcaugaccagcugcugcuccugccucaagggcugcugcagcugcggguccugcugcaaguucgacgaggacgacagcgagcccgugcugaagggcgucaagcugcacuacaccugaggacuagucccuguucccagagcccacuuuuuuuucuuuuuuugaaauaaaauagccugucuuucagaucucaaaggcucuuuucagagccaccaaaaaaaaaaaaaaaaaaaaaaaaaaaaaaaaaaaaaaaaaaaaaaaaaaaaaaaaaaaaaaaaaaaaaaaaaaaaaaaaaaaaaaaaaaaaaaaaaaaaa

SEQ ID NO: 23772 - RNA, 4191 nt, Artificial Sequence
  SARS-CoV-2/Wuhan/WIV05/2019__EPI_ISL_402128 spike protein mRNA gc (1-1273)(K986P_V987P_K986P_V987P_S13I_W152C_L452R_D614G)
aggagagggcgcuuggcuugcaaggacccugagcugcggcauugaagcacacccaacccaacucgacugaagucagccucacugaaccggaucugagaaucuucucucucugggcuugccagggcucuccgaaccuagcuagcauccucuucaauuccaacuagaaagcuuaccauguucguguuccugguccuccugccccuggugagcauccagugcgugaaccucaccacccgcacgcagcugccgcccgccuacaccaacuccuucacccggggcgucuacuaccccgacaagguguuccgcagcuccgugcugcacagcacccaggaccucuuccugcccuucuucuccaacgucacgugguuccacgccauccacgugagcgggaccaacggcaccaagcgguucgacaacccggugcugcccuucaacgacggggucuacuucgcguccaccgagaaguccaacaucauccgcggcuggaucuucgggacgacccucgacagcaagacccagagccugcugaucgugaacaacgccaccaacguggucaucaaggugugcgaguuccaguucugcaacgaccccuuccucggcguguacuaccacaagaacaacaaguccugcauggagagcgaguuccgggucuacuccagcgccaacaacugcacguucgaguacgugucccagcccuuccugauggaccuggagggcaagcaggggaacuucaagaaccuccgcgaguucguguucaagaacaucgacggcuacuucaagaucuacagcaagcacaccccgaucaaccugguccgggaccugccccagggguucuccgcccucgagccccugguggaccugcccaucggcaucaacaucacccgcuuccagacccuccuggcccugcaccggagcuaccucacgccgggggacuccagcagcggcuggaccgcgggcgccgccgccuacuacgugggguaccugcagccccgcaccuuccugcucaaguacaacgagaacggcaccaucacggacgcggucgacugcgcccuggacccccuguccgagaccaagugcacccucaagagcuucaccguggagaaggggaucuaccagacguccaacuuccgggugcagcccaccgagagcaucguccgcuucccgaacaucaccaaccugugccccuucggcgagguguucaacgccacccgguucgccuccgucuacgccuggaaccgcaagcggaucagcaacugcguggcggacuacuccgugcuguacaacagcgccuccuucagcacguucaagugcuacggcgucucccccaccaagcucaacgaccugugcuucaccaacguguacgccgacagcuucgugauccgcggggacgagguccggcagaucgcccccggccagaccgggaagaucgccgacuacaacuacaagcugccggacgacuucacgggcugcgugaucgcguggaacuccaacaaccucgacagcaaggucgggggcaacuacaacuaccgcuaccggcuguuccgcaaguccaaccugaagcccuucgagcgggacaucagcaccgagaucuaccaggccggcuccacccccugcaacgggguggagggcuucaacugcuacuucccccuccagagcuacggguuccagccgaccaacggcgugggguaccagcccuaccgcguggucgugcuguccuucgagcugcuccacgcccccgccacggugugcggccccaagaaguccaccaaccuggucaagaacaagugcgugaacuucaacuucaacggccugaccgggaccggcgugcucaccgagagcaacaagaaguuccugccguuccagcaguucgggcgcgacaucgccgacacgaccgacgcgguccgggacccccagacccuggagauccuggacaucacccccugcagcuucggcggggugagcgugaucacgccgggcaccaacaccuccaaccaggucgccgugcucuaccagggcgugaacugcaccgagguccccguggccauccacgccgaccagcugacgcccaccuggcgcguguacagcaccggguccaacgucuuccagacccgggccggcugccugaucggggcggagcacgugaacaacagcuacgagugcgacauccccaucggcgccggcaucugcgccuccuaccagacgcagaccaacagcccgcgccgggcccgcuccguggcgagccaguccaucaucgccuacaccaugagccucggggccgagaacuccgucgccuacagcaacaacuccaucgccauccccaccaacuucacgaucagcgugaccaccgagauccugcccguguccaugaccaagacgagcgucgacugcaccauguacaucugcggcgacagcaccgagugcuccaaccugcuccugcaguacgggagcuucugcacccagcugaaccgggcgcucacgggcaucgccguggagcaggacaagaacacccaggagguguucgcccaggucaagcagaucuacaagacgcccccgaucaaggacuucgggggcuucaacuucucccagauccugcccgaccccagcaagcccuccaagcgcagcuucaucgaggaccuccuguucaacaaggugacccuggccgacgccggcuucaucaagcaguacggggacugccugggcgacaucgcggcccgggaccucaucugcgcccagaaguucaacgggcugaccgugcugccgccccuccugaccgacgagaugaucgcccaguacaccuccgcccugcucgcgggcaccaucacgagcggguggaccuucggcgccggcgccgcccugcagauccccuucgcgaugcagauggccuaccgcuucaacgggaucggcgucacccagaacgugcuguacgagaaccagaagcucaucgccaaccaguucaacuccgccaucgggaagauccaggacagccuguccagcaccgccuccgcgcugggcaagcuccaggacguggucaaccagaacgcccaggcccugaacacgcuggugaagcagcucagcuccaacuucggggccaucagcuccgugcugaacgacauccugagccggcucgacccgcccgaggccgagguccagaucgaccgccugaucaccggccggcugcagucccuccagaccuacgugacccagcagcugauccgcgcggccgagauccgggccagcgccaaccuggccgcgaccaagaugagcgagugcgugcucggccaguccaagcgcgucgacuucugcgggaagggcuaccaccugaugagcuucccccaguccgcgccccacggggugguguuccugcacgucacguacgugcccgcccaggagaagaacuucaccaccgccccggccaucugccacgacggcaaggcccacuucccccgggagggggucuucgugagcaacggcacccacugguucgugacgcagcgcaacuucuacgagccccagaucaucaccaccgacaacaccuucgucuccggcaacugcgacguggugaucgggaucgucaacaacacgguguacgacccccuccagccggagcuggacagcuucaaggaggagcuggacaaguacuucaagaaccacaccucccccgacguggaccucggcgacaucagcgggaucaacgccuccgucgugaacauccagaaggagaucgaccggcugaacgagguggccaagaaccugaacgagagccucaucgaccugcaggagcugggcaaguacgagcaguacaucaaguggcccugguacaucuggcucggcuucaucgccgggcugaucgcgaucgucauggugaccaucaugcugugcugcaugaccuccugcugcagcugccucaagggcugcugcuccugcgggagcugcugcaaguucgacgaggacgacuccgagccggugcugaagggcgucaagcugcacuacacgugaggacuagucccuguucccagagcccacuuuuuuuucuuuuuuugaaauaaaauagccugucuuucagaucucaaaggcucuuuucagagccaccaaaaaaaaaaaaaaaaaaaaaaaaaaaaaaaaaaaaaaaaaaaaaaaaaaaaaaaaaaaaaaaaaaaaaaaaaaaaaaaaaaaaaaaaaaaaaaaaaaaaa

SEQ ID NO: 23773 - RNA, 4191 nt, Artificial Sequence
  SARS-CoV-2/Wuhan/WIV05/2019__EPI_ISL_402128 spike protein mRNA gc (1-1273)(K986P_V987P)
aggagagggcgcuuggcuugcaaggacccugagcugcggcauugaagcacacccaacccaacucgacugaagucagccucacugaaccggaucugagaaucuucucucucugggcuugccagggcucuccgaaccuagcuagcauccucuucaauuccaacuagaaagcuuaccauguucguguuccuggugcugcugccccuggugagcagccagugcgugaaccugaccacccggacccagcugccaccagccuacaccaacagcuucacccggggcgucuacuaccccgacaagguguuccggagcagcguccugcacagcacccaggaccuguuccugcccuucuucagcaacgugaccugguuccacgccauccacgugagcggcaccaacggcaccaagcgguucgacaaccccgugcugcccuucaacgacggcguguacuucgccagcaccgagaagagcaacaucauccggggcuggaucuucggcaccacccuggacagcaagacccagagccugcugaucgugaauaacgccaccaacguggugaucaaggugugcgaguuccaguucugcaacgaccccuuccugggcguguacuaccacaagaacaacaagagcuggauggagagcgaguuccggguguacagcagcgccaacaacugcaccuucgaguacgugagccagcccuuccugauggaccuggagggcaagcagggcaacuucaagaaccugcgggaguucguguucaagaacaucgacggcuacuucaagaucuacagcaagcacaccccaaucaaccuggugcgggaucugccccagggcuucucagcccuggagccccugguggaccugcccaucggcaucaacaucacccgguuccagacccugcuggcccugcaccggagcuaccugaccccaggcgacagcagcagcggguggacagcaggcgcggcugcuuacuacgugggcuaccugcagccccggaccuuccugcugaaguacaacgagaacggcaccaucaccgacgccguggacugcgcccuggacccucugagcgagaccaagugcacccugaagagcuucaccguggagaagggcaucuaccagaccagcaacuuccgggugcagcccaccgagagcaucgugcgguuccccaacaucaccaaccugugccccuucggcgagguguucaacgccacccgguucgccagcguguacgccuggaaccggaagcggaucagcaacugcguggccgacuacagcgugcuguacaacagcgccagcuucagcaccuucaagugcuacggcgugagccccaccaagcugaacgaccugugcuucaccaacguguacgccgacagcuucgugauccguggcgacgaggugcggcagaucgcacccggccagacaggcaagaucgccgacuacaacuacaagcugcccgacgacuucaccggcugcgugaucgccuggaacagcaacaaccucgacagcaaggugggcggcaacuacaacuaccuguaccggcuguuccggaagagcaaccugaagcccuucgagcgggacaucagcaccgagaucuaccaagccggcuccaccccuugcaacggcguggagggcuucaacugcuacuucccucugcagagcuacggcuuccagcccaccaacggcgugggcuaccagcccuaccgggugguggugcugagcuucgagcugcugcacgccccagccaccguguguggccccaagaagagcaccaaccuggugaagaacaagugcgugaacuucaacuucaacggccuuaccggcaccggcgugcugaccgagagcaacaagaaauuccugcccuuucagcaguucggccgggacaucgccgacaccaccgacgcugugcgggauccccagacccuggagauccuggacaucaccccuugcagcuucggcggcgugagcgugaucaccccaggcaccaacaccagcaaccagguggccgugcuguaccaggacgugaacugcaccgaggugcccguggccauccacgccgaccagcugacacccaccuggcgggucuacagcaccggcagcaacguguuccagacccgggccgguugccugaucggcgccgagcacgugaacaacagcuacgagugcgacauccccaucggcgccggcaucugugccagcuaccagacccagaccaauucaccccggagggcaaggagcguggccagccagagcaucaucgccuacaccaugagccugggcgccgagaacagcguggccuacagcaacaacagcaucgccauccccaccaacuucaccaucagcgugaccaccgagauucugcccgugagcaugaccaagaccagcguggacugcaccauguacaucugcggcgacagcaccgagugcagcaaccugcugcugcaguacggcagcuucugcacccagcugaaccgggcccugaccggcaucgccguggagcaggacaagaacacccaggagguguucgcccaggugaagcagaucuacaagaccccucccaucaaggacuucggcggcuucaacuucagccagauccugcccgaccccagcaagcccagcaagcggagcuucaucgaggaccugcuguucaacaaggugacccuagccgacgccggcuucaucaagcaguacggcgacugccucggcgacauagccgcccgggaccugaucugcgcccagaaguucaacggccugaccgugcugccuccccugcugaccgacgagaugaucgcccaguacaccagcgcccuguuagccggaaccaucaccagcggcuggacuuucggcgcuggagccgcucugcagauccccuucgccaugcagauggccuaccgguucaacggcaucggcgugacccagaacgugcuguacgagaaccagaagcugaucgccaaccaguucaacagcgccaucggcaagauccaggacagccugagcagcaccgcuagcgcccugggcaagcugcaggacguggugaaccagaacgcccaggcccugaacacccuggugaagcagcugagcagcaacuucggcgccaucagcagcgugcugaacgacauccugagccggcuggacccucccgaggccgaggugcagaucgaccggcugaucacuggccggcugcagagccugcagaccuacgugacccagcagcugauccgggccgccgagauucgggccagcgccaaccuggccgccaccaagaugagcgagugcgugcugggccagagcaagcggguggacuucugcggcaagggcuaccaccugaugagcuuuccccagagcgcaccccacggagugguguuccugcacgugaccuacgugcccgcccaggagaagaacuucaccaccgccccagccaucugccacgacggcaaggcccacuuuccccgggagggcguguucgugagcaacggcacccacugguucgugacccagcggaacuucuacgagccccagaucaucaccaccgacaacaccuucgugagcggcaacugcgacguggugaucggcaucgugaacaacaccguguacgauccccugcagcccgagcuggacagcuucaaggaggagcuggacaaguacuucaagaaucacaccagccccgacguggaccugggcgacaucagcggcaucaacgccagcguggugaacauccagaaggagaucgaucggcugaacgagguggccaagaaccugaacgagagccugaucgaccugcaggagcugggcaaguacgagcaguacaucaaguggcccugguacaucuggcugggcuucaucgccggccugaucgccaucgugauggugaccaucaugcugugcugcaugaccagcugcugcagcugccugaagggcuguugcagcugcggcagcugcugcaaguucgacgaggacgacagcgagcccgugcugaagggcgugaagcugcacuacaccugaggacuagucccuguucccagagcccacuuuuuuuucuuuuuuugaaauaaaauagccugucuuucagaucucaaaggcucuuuucagagccaccaaaaaaaaaaaaaaaaaaaaaaaaaaaaaaaaaaaaaaaaaaaaaaaaaaaaaaaaaaaaaaaaaaaaaaaaaaaaaaaaaaaaaaaaaaaaaaaaaaaaa

SEQ ID NO: 23774 - RNA, 4191 nt, Artificial Sequence
  SARS-CoV-2/Wuhan/WIV05/2019__EPI_ISL_402128 spike protein mRNA gc (1-1273)(K986P_V987P_ D614G)
aggagagggcgcuuggcuugcaaggacccugagcugcggcauugaagcacacccaacccaacucgacugaagucagccucacugaaccggaucugagaaucuucucucucugggcuugccagggcucuccgaaccuagcuagcauccucuucaauuccaacuagaaagcuuaccauguucguguuccuggugcugcugccccuggugagcagccagugcgugaaccugaccacccggacccagcugccaccagccuacaccaacagcuucacccggggcgucuacuaccccgacaagguguuccggagcagcguccugcacagcacccaggaccuguuccugcccuucuucagcaacgugaccugguuccacgccauccacgugagcggcaccaacggcaccaagcgguucgacaaccccgugcugcccuucaacgacggcguguacuucgccagcaccgagaagagcaacaucauccggggcuggaucuucggcaccacccuggacagcaagacccagagccugcugaucgugaauaacgccaccaacguggugaucaaggugugcgaguuccaguucugcaacgaccccuuccugggcguguacuaccacaagaacaacaagagcuggauggagagcgaguuccggguguacagcagcgccaacaacugcaccuucgaguacgugagccagcccuuccugauggaccuggagggcaagcagggcaacuucaagaaccugcgggaguucguguucaagaacaucgacggcuacuucaagaucuacagcaagcacaccccaaucaaccuggugcgggaucugccccagggcuucucagcccuggagccccugguggaccugcccaucggcaucaacaucacccgguuccagacccugcuggcccugcaccggagcuaccugaccccaggcgacagcagcagcggguggacagcaggcgcggcugcuuacuacgugggcuaccugcagccccggaccuuccugcugaaguacaacgagaacggcaccaucaccgacgccguggacugcgcccuggacccucugagcgagaccaagugcacccugaagagcuucaccguggagaagggcaucuaccagaccagcaacuuccgggugcagcccaccgagagcaucgugcgguuccccaacaucaccaaccugugccccuucggcgagguguucaacgccacccgguucgccagcguguacgccuggaaccggaagcggaucagcaacugcguggccgacuacagcgugcuguacaacagcgccagcuucagcaccuucaagugcuacggcgugagccccaccaagcugaacgaccugugcuucaccaacguguacgccgacagcuucgugauccguggcgacgaggugcggcagaucgcacccggccagacaggcaagaucgccgacuacaacuacaagcugcccgacgacuucaccggcugcgugaucgccuggaacagcaacaaccucgacagcaaggugggcggcaacuacaacuaccuguaccggcuguuccggaagagcaaccugaagcccuucgagcgggacaucagcaccgagaucuaccaagccggcuccaccccuugcaacggcguggagggcuucaacugcuacuucccucugcagagcuacggcuuccagcccaccaacggcgugggcuaccagcccuaccgggugguggugcugagcuucgagcugcugcacgccccagccaccguguguggccccaagaagagcaccaaccuggugaagaacaagugcgugaacuucaacuucaacggccuuaccggcaccggcgugcugaccgagagcaacaagaaauuccugcccuuucagcaguucggccgggacaucgccgacaccaccgacgcugugcgggauccccagacccuggagauccuggacaucaccccuugcagcuucggcggcgugagcgugaucaccccaggcaccaacaccagcaaccagguggccgugcuguaccagggcgugaacugcaccgaggugcccguggccauccacgccgaccagcugacacccaccuggcgggucuacagcaccggcagcaacguguuccagacccgggccgguugccugaucggcgccgagcacgugaacaacagcuacgagugcgacauccccaucggcgccggcaucugugccagcuaccagacccagaccaauucaccccggagggcaaggagcguggccagccagagcaucaucgccuacaccaugagccugggcgccgagaacagcguggccuacagcaacaacagcaucgccauccccaccaacuucaccaucagcgugaccaccgagauucugcccgugagcaugaccaagaccagcguggacugcaccauguacaucugcggcgacagcaccgagugcagcaaccugcugcugcaguacggcagcuucugcacccagcugaaccgggcccugaccggcaucgccguggagcaggacaagaacacccaggagguguucgcccaggugaagcagaucuacaagaccccucccaucaaggacuucggcggcuucaacuucagccagauccugcccgaccccagcaagcccagcaagcggagcuucaucgaggaccugcuguucaacaaggugacccuagccgacgccggcuucaucaagcaguacggcgacugccucggcgacauagccgcccgggaccugaucugcgcccagaaguucaacggccugaccgugcugccuccccugcugaccgacgagaugaucgcccaguacaccagcgcccuguuagccggaaccaucaccagcggcuggacuuucggcgcuggagccgcucugcagauccccuucgccaugcagauggccuaccgguucaacggcaucggcgugacccagaacgugcuguacgagaaccagaagcugaucgccaaccaguucaacagcgccaucggcaagauccaggacagccugagcagcaccgcuagcgcccugggcaagcugcaggacguggugaaccagaacgcccaggcccugaacacccuggugaagcagcugagcagcaacuucggcgccaucagcagcgugcugaacgacauccugagccggcuggacccucccgaggccgaggugcagaucgaccggcugaucacuggccggcugcagagccugcagaccuacgugacccagcagcugauccgggccgccgagauucgggccagcgccaaccuggccgccaccaagaugagcgagugcgugcugggccagagcaagcggguggacuucugcggcaagggcuaccaccugaugagcuuuccccagagcgcaccccacggagugguguuccugcacgugaccuacgugcccgcccaggagaagaacuucaccaccgccccagccaucugccacgacggcaaggcccacuuuccccgggagggcguguucgugagcaacggcacccacugguucgugacccagcggaacuucuacgagccccagaucaucaccaccgacaacaccuucgugagcggcaacugcgacguggugaucggcaucgugaacaacaccguguacgauccccugcagcccgagcuggacagcuucaaggaggagcuggacaaguacuucaagaaucacaccagccccgacguggaccugggcgacaucagcggcaucaacgccagcguggugaacauccagaaggagaucgaucggcugaacgagguggccaagaaccugaacgagagccugaucgaccugcaggagcugggcaaguacgagcaguacaucaaguggcccugguacaucuggcugggcuucaucgccggccugaucgccaucgugauggugaccaucaugcugugcugcaugaccagcugcugcagcugccugaagggcuguugcagcugcggcagcugcugcaaguucgacgaggacgacagcgagcccgugcugaagggcgugaagcugcacuacaccugaggacuagucccuguucccagagcccacuuuuuuuucuuuuuuugaaauaaaauagccugucuuucagaucucaaaggcucuuuucagagccaccaaaaaaaaaaaaaaaaaaaaaaaaaaaaaaaaaaaaaaaaaaaaaaaaaaaaaaaaaaaaaaaaaaaaaaaaaaaaaaaaaaaaaaaaaaaaaaaaaaaaa

SEQ ID NO: 23775 - RNA, 4191 nt, Artificial Sequence
  SARS-CoV-2/Wuhan/WIV05/2019__EPI_ISL_402128 spike protein mRNA gc (1-1273)(K986P_V987P_A222V_D614G)
aggagagggcgcuuggcuugcaaggacccugagcugcggcauugaagcacacccaacccaacucgacugaagucagccucacugaaccggaucugagaaucuucucucucugggcuugccagggcucuccgaaccuagcuagcauccucuucaauuccaacuagaaagcuuaccauguucguguuccuggugcugcugccccuggugagcagccagugcgugaaccugaccacccggacccagcugccaccagccuacaccaacagcuucacccggggcgucuacuaccccgacaagguguuccggagcagcguccugcacagcacccaggaccuguuccugcccuucuucagcaacgugaccugguuccacgccauccacgugagcggcaccaacggcaccaagcgguucgacaaccccgugcugcccuucaacgacggcguguacuucgccagcaccgagaagagcaacaucauccggggcuggaucuucggcaccacccuggacagcaagacccagagccugcugaucgugaauaacgccaccaacguggugaucaaggugugcgaguuccaguucugcaacgaccccuuccugggcguguacuaccacaagaacaacaagagcuggauggagagcgaguuccggguguacagcagcgccaacaacugcaccuucgaguacgugagccagcccuuccugauggaccuggagggcaagcagggcaacuucaagaaccugcgggaguucguguucaagaacaucgacggcuacuucaagaucuacagcaagcacaccccaaucaaccuggugcgggaucugccccagggcuucucagugcuggagccccugguggaccugcccaucggcaucaacaucacccgguuccagacccugcuggcccugcaccggagcuaccugaccccaggcgacagcagcagcggguggacagcaggcgcggcugcuuacuacgugggcuaccugcagccccggaccuuccugcugaaguacaacgagaacggcaccaucaccgacgccguggacugcgcccuggacccucugagcgagaccaagugcacccugaagagcuucaccguggagaagggcaucuaccagaccagcaacuuccgggugcagcccaccgagagcaucgugcgguuccccaacaucaccaaccugugccccuucggcgagguguucaacgccacccgguucgccagcguguacgccuggaaccggaagcggaucagcaacugcguggccgacuacagcgugcuguacaacagcgccagcuucagcaccuucaagugcuacggcgugagccccaccaagcugaacgaccugugcuucaccaacguguacgccgacagcuucgugauccguggcgacgaggugcggcagaucgcacccggccagacaggcaagaucgccgacuacaacuacaagcugcccgacgacuucaccggcugcgugaucgccuggaacagcaacaaccucgacagcaaggugggcggcaacuacaacuaccuguaccggcuguuccggaagagcaaccugaagcccuucgagcgggacaucagcaccgagaucuaccaagccggcuccaccccuugcaacggcguggagggcuucaacugcuacuucccucugcagagcuacggcuuccagcccaccaacggcgugggcuaccagcccuaccgggugguggugcugagcuucgagcugcugcacgccccagccaccguguguggccccaagaagagcaccaaccuggugaagaacaagugcgugaacuucaacuucaacggccuuaccggcaccggcgugcugaccgagagcaacaagaaauuccugcccuuucagcaguucggccgggacaucgccgacaccaccgacgcugugcgggauccccagacccuggagauccuggacaucaccccuugcagcuucggcggcgugagcgugaucaccccaggcaccaacaccagcaaccagguggccgugcuguaccagggcgugaacugcaccgaggugcccguggccauccacgccgaccagcugacacccaccuggcgggucuacagcaccggcagcaacguguuccagacccgggccgguugccugaucggcgccgagcacgugaacaacagcuacgagugcgacauccccaucggcgccggcaucugugccagcuaccagacccagaccaauucaccccggagggcaaggagcguggccagccagagcaucaucgccuacaccaugagccugggcgccgagaacagcguggccuacagcaacaacagcaucgccauccccaccaacuucaccaucagcgugaccaccgagauucugcccgugagcaugaccaagaccagcguggacugcaccauguacaucugcggcgacagcaccgagugcagcaaccugcugcugcaguacggcagcuucugcacccagcugaaccgggcccugaccggcaucgccguggagcaggacaagaacacccaggagguguucgcccaggugaagcagaucuacaagaccccucccaucaaggacuucggcggcuucaacuucagccagauccugcccgaccccagcaagcccagcaagcggagcuucaucgaggaccugcuguucaacaaggugacccuagccgacgccggcuucaucaagcaguacggcgacugccucggcgacauagccgcccgggaccugaucugcgcccagaaguucaacggccugaccgugcugccuccccugcugaccgacgagaugaucgcccaguacaccagcgcccuguuagccggaaccaucaccagcggcuggacuuucggcgcuggagccgcucugcagauccccuucgccaugcagauggccuaccgguucaacggcaucggcgugacccagaacgugcuguacgagaaccagaagcugaucgccaaccaguucaacagcgccaucggcaagauccaggacagccugagcagcaccgcuagcgcccugggcaagcugcaggacguggugaaccagaacgcccaggcccugaacacccuggugaagcagcugagcagcaacuucggcgccaucagcagcgugcugaacgacauccugagccggcuggacccucccgaggccgaggugcagaucgaccggcugaucacuggccggcugcagagccugcagaccuacgugacccagcagcugauccgggccgccgagauucgggccagcgccaaccuggccgccaccaagaugagcgagugcgugcugggccagagcaagcggguggacuucugcggcaagggcuaccaccugaugagcuuuccccagagcgcaccccacggagugguguuccugcacgugaccuacgugcccgcccaggagaagaacuucaccaccgccccagccaucugccacgacggcaaggcccacuuuccccgggagggcguguucgugagcaacggcacccacugguucgugacccagcggaacuucuacgagccccagaucaucaccaccgacaacaccuucgugagcggcaacugcgacguggugaucggcaucgugaacaacaccguguacgauccccugcagcccgagcuggacagcuucaaggaggagcuggacaaguacuucaagaaucacaccagccccgacguggaccugggcgacaucagcggcaucaacgccagcguggugaacauccagaaggagaucgaucggcugaacgagguggccaagaaccugaacgagagccugaucgaccugcaggagcugggcaaguacgagcaguacaucaaguggcccugguacaucuggcugggcuucaucgccggccugaucgccaucgugauggugaccaucaugcugugcugcaugaccagcugcugcagcugccugaagggcuguugcagcugcggcagcugcugcaaguucgacgaggacgacagcgagcccgugcugaagggcgugaagcugcacuacaccugaggacuagucccuguucccagagcccacuuuuuuuucuuuuuuugaaauaaaauagccugucuuucagaucucaaaggcucuuuucagagccaccaaaaaaaaaaaaaaaaaaaaaaaaaaaaaaaaaaaaaaaaaaaaaaaaaaaaaaaaaaaaaaaaaaaaaaaaaaaaaaaaaaaaaaaaaaaaaaaaaaaaa

SEQ ID NO: 23776 - RNA, 4191 nt, Artificial Sequence
  SARS-CoV-2/Wuhan/WIV05/2019__EPI_ISL_402128 spike protein mRNA gc (1-1273)(K986P_V987P_N439K_D614G)
aggagagggcgcuuggcuugcaaggacccugagcugcggcauugaagcacacccaacccaacucgacugaagucagccucacugaaccggaucugagaaucuucucucucugggcuugccagggcucuccgaaccuagcuagcauccucuucaauuccaacuagaaagcuuaccauguucguguuccuggugcugcugccccuggugagcagccagugcgugaaccugaccacccggacccagcugccaccagccuacaccaacagcuucacccggggcgucuacuaccccgacaagguguuccggagcagcguccugcacagcacccaggaccuguuccugcccuucuucagcaacgugaccugguuccacgccauccacgugagcggcaccaacggcaccaagcgguucgacaaccccgugcugcccuucaacgacggcguguacuucgccagcaccgagaagagcaacaucauccggggcuggaucuucggcaccacccuggacagcaagacccagagccugcugaucgugaauaacgccaccaacguggugaucaaggugugcgaguuccaguucugcaacgaccccuuccugggcguguacuaccacaagaacaacaagagcuggauggagagcgaguuccggguguacagcagcgccaacaacugcaccuucgaguacgugagccagcccuuccugauggaccuggagggcaagcagggcaacuucaagaaccugcgggaguucguguucaagaacaucgacggcuacuucaagaucuacagcaagcacaccccaaucaaccuggugcgggaucugccccagggcuucucagcccuggagccccugguggaccugcccaucggcaucaacaucacccgguuccagacccugcuggcccugcaccggagcuaccugaccccaggcgacagcagcagcggguggacagcaggcgcggcugcuuacuacgugggcuaccugcagccccggaccuuccugcugaaguacaacgagaacggcaccaucaccgacgccguggacugcgcccuggacccucugagcgagaccaagugcacccugaagagcuucaccguggagaagggcaucuaccagaccagcaacuuccgggugcagcccaccgagagcaucgugcgguuccccaacaucaccaaccugugccccuucggcgagguguucaacgccacccgguucgccagcguguacgccuggaaccggaagcggaucagcaacugcguggccgacuacagcgugcuguacaacagcgccagcuucagcaccuucaagugcuacggcgugagccccaccaagcugaacgaccugugcuucaccaacguguacgccgacagcuucgugauccguggcgacgaggugcggcagaucgcacccggccagacaggcaagaucgccgacuacaacuacaagcugcccgacgacuucaccggcugcgugaucgccuggaacagcaagaaccucgacagcaaggugggcggcaacuacaacuaccuguaccggcuguuccggaagagcaaccugaagcccuucgagcgggacaucagcaccgagaucuaccaagccggcuccaccccuugcaacggcguggagggcuucaacugcuacuucccucugcagagcuacggcuuccagcccaccaacggcgugggcuaccagcccuaccgggugguggugcugagcuucgagcugcugcacgccccagccaccguguguggccccaagaagagcaccaaccuggugaagaacaagugcgugaacuucaacuucaacggccuuaccggcaccggcgugcugaccgagagcaacaagaaauuccugcccuuucagcaguucggccgggacaucgccgacaccaccgacgcugugcgggauccccagacccuggagauccuggacaucaccccuugcagcuucggcggcgugagcgugaucaccccaggcaccaacaccagcaaccagguggccgugcuguaccagggcgugaacugcaccgaggugcccguggccauccacgccgaccagcugacacccaccuggcgggucuacagcaccggcagcaacguguuccagacccgggccgguugccugaucggcgccgagcacgugaacaacagcuacgagugcgacauccccaucggcgccggcaucugugccagcuaccagacccagaccaauucaccccggagggcaaggagcguggccagccagagcaucaucgccuacaccaugagccugggcgccgagaacagcguggccuacagcaacaacagcaucgccauccccaccaacuucaccaucagcgugaccaccgagauucugcccgugagcaugaccaagaccagcguggacugcaccauguacaucugcggcgacagcaccgagugcagcaaccugcugcugcaguacggcagcuucugcacccagcugaaccgggcccugaccggcaucgccguggagcaggacaagaacacccaggagguguucgcccaggugaagcagaucuacaagaccccucccaucaaggacuucggcggcuucaacuucagccagauccugcccgaccccagcaagcccagcaagcggagcuucaucgaggaccugcuguucaacaaggugacccuagccgacgccggcuucaucaagcaguacggcgacugccucggcgacauagccgcccgggaccugaucugcgcccagaaguucaacggccugaccgugcugccuccccugcugaccgacgagaugaucgcccaguacaccagcgcccuguuagccggaaccaucaccagcggcuggacuuucggcgcuggagccgcucugcagauccccuucgccaugcagauggccuaccgguucaacggcaucggcgugacccagaacgugcuguacgagaaccagaagcugaucgccaaccaguucaacagcgccaucggcaagauccaggacagccugagcagcaccgcuagcgcccugggcaagcugcaggacguggugaaccagaacgcccaggcccugaacacccuggugaagcagcugagcagcaacuucggcgccaucagcagcgugcugaacgacauccugagccggcuggacccucccgaggccgaggugcagaucgaccggcugaucacuggccggcugcagagccugcagaccuacgugacccagcagcugauccgggccgccgagauucgggccagcgccaaccuggccgccaccaagaugagcgagugcgugcugggccagagcaagcggguggacuucugcggcaagggcuaccaccugaugagcuuuccccagagcgcaccccacggagugguguuccugcacgugaccuacgugcccgcccaggagaagaacuucaccaccgccccagccaucugccacgacggcaaggcccacuuuccccgggagggcguguucgugagcaacggcacccacugguucgugacccagcggaacuucuacgagccccagaucaucaccaccgacaacaccuucgugagcggcaacugcgacguggugaucggcaucgugaacaacaccguguacgauccccugcagcccgagcuggacagcuucaaggaggagcuggacaaguacuucaagaaucacaccagccccgacguggaccugggcgacaucagcggcaucaacgccagcguggugaacauccagaaggagaucgaucggcugaacgagguggccaagaaccugaacgagagccugaucgaccugcaggagcugggcaaguacgagcaguacaucaaguggcccugguacaucuggcugggcuucaucgccggccugaucgccaucgugauggugaccaucaugcugugcugcaugaccagcugcugcagcugccugaagggcuguugcagcugcggcagcugcugcaaguucgacgaggacgacagcgagcccgugcugaagggcgugaagcugcacuacaccugaggacuagucccuguucccagagcccacuuuuuuuucuuuuuuugaaauaaaauagccugucuuucagaucucaaaggcucuuuucagagccaccaaaaaaaaaaaaaaaaaaaaaaaaaaaaaaaaaaaaaaaaaaaaaaaaaaaaaaaaaaaaaaaaaaaaaaaaaaaaaaaaaaaaaaaaaaaaaaaaaaaaa

SEQ ID NO: 23777 - RNA, 4191 nt, Artificial Sequence
  SARS-CoV-2/Wuhan/WIV05/2019__EPI_ISL_402128 spike protein mRNA gc (1-1273)(K986P_V987P_S477N_D614G)
aggagagggcgcuuggcuugcaaggacccugagcugcggcauugaagcacacccaacccaacucgacugaagucagccucacugaaccggaucugagaaucuucucucucugggcuugccagggcucuccgaaccuagcuagcauccucuucaauuccaacuagaaagcuuaccauguucguguuccuggugcugcugccccuggugagcagccagugcgugaaccugaccacccggacccagcugccaccagccuacaccaacagcuucacccggggcgucuacuaccccgacaagguguuccggagcagcguccugcacagcacccaggaccuguuccugcccuucuucagcaacgugaccugguuccacgccauccacgugagcggcaccaacggcaccaagcgguucgacaaccccgugcugcccuucaacgacggcguguacuucgccagcaccgagaagagcaacaucauccggggcuggaucuucggcaccacccuggacagcaagacccagagccugcugaucgugaauaacgccaccaacguggugaucaaggugugcgaguuccaguucugcaacgaccccuuccugggcguguacuaccacaagaacaacaagagcuggauggagagcgaguuccggguguacagcagcgccaacaacugcaccuucgaguacgugagccagcccuuccugauggaccuggagggcaagcagggcaacuucaagaaccugcgggaguucguguucaagaacaucgacggcuacuucaagaucuacagcaagcacaccccaaucaaccuggugcgggaucugccccagggcuucucagcccuggagccccugguggaccugcccaucggcaucaacaucacccgguuccagacccugcuggcccugcaccggagcuaccugaccccaggcgacagcagcagcggguggacagcaggcgcggcugcuuacuacgugggcuaccugcagccccggaccuuccugcugaaguacaacgagaacggcaccaucaccgacgccguggacugcgcccuggacccucugagcgagaccaagugcacccugaagagcuucaccguggagaagggcaucuaccagaccagcaacuuccgggugcagcccaccgagagcaucgugcgguuccccaacaucaccaaccugugccccuucggcgagguguucaacgccacccgguucgccagcguguacgccuggaaccggaagcggaucagcaacugcguggccgacuacagcgugcuguacaacagcgccagcuucagcaccuucaagugcuacggcgugagccccaccaagcugaacgaccugugcuucaccaacguguacgccgacagcuucgugauccguggcgacgaggugcggcagaucgcacccggccagacaggcaagaucgccgacuacaacuacaagcugcccgacgacuucaccggcugcgugaucgccuggaacagcaacaaccucgacagcaaggugggcggcaacuacaacuaccuguaccggcuguuccggaagagcaaccugaagcccuucgagcgggacaucagcaccgagaucuaccaagccggcaacaccccuugcaacggcguggagggcuucaacugcuacuucccucugcagagcuacggcuuccagcccaccaacggcgugggcuaccagcccuaccgggugguggugcugagcuucgagcugcugcacgccccagccaccguguguggccccaagaagagcaccaaccuggugaagaacaagugcgugaacuucaacuucaacggccuuaccggcaccggcgugcugaccgagagcaacaagaaauuccugcccuuucagcaguucggccgggacaucgccgacaccaccgacgcugugcgggauccccagacccuggagauccuggacaucaccccuugcagcuucggcggcgugagcgugaucaccccaggcaccaacaccagcaaccagguggccgugcuguaccagggcgugaacugcaccgaggugcccguggccauccacgccgaccagcugacacccaccuggcgggucuacagcaccggcagcaacguguuccagacccgggccgguugccugaucggcgccgagcacgugaacaacagcuacgagugcgacauccccaucggcgccggcaucugugccagcuaccagacccagaccaauucaccccggagggcaaggagcguggccagccagagcaucaucgccuacaccaugagccugggcgccgagaacagcguggccuacagcaacaacagcaucgccauccccaccaacuucaccaucagcgugaccaccgagauucugcccgugagcaugaccaagaccagcguggacugcaccauguacaucugcggcgacagcaccgagugcagcaaccugcugcugcaguacggcagcuucugcacccagcugaaccgggcccugaccggcaucgccguggagcaggacaagaacacccaggagguguucgcccaggugaagcagaucuacaagaccccucccaucaaggacuucggcggcuucaacuucagccagauccugcccgaccccagcaagcccagcaagcggagcuucaucgaggaccugcuguucaacaaggugacccuagccgacgccggcuucaucaagcaguacggcgacugccucggcgacauagccgcccgggaccugaucugcgcccagaaguucaacggccugaccgugcugccuccccugcugaccgacgagaugaucgcccaguacaccagcgcccuguuagccggaaccaucaccagcggcuggacuuucggcgcuggagccgcucugcagauccccuucgccaugcagauggccuaccgguucaacggcaucggcgugacccagaacgugcuguacgagaaccagaagcugaucgccaaccaguucaacagcgccaucggcaagauccaggacagccugagcagcaccgcuagcgcccugggcaagcugcaggacguggugaaccagaacgcccaggcccugaacacccuggugaagcagcugagcagcaacuucggcgccaucagcagcgugcugaacgacauccugagccggcuggacccucccgaggccgaggugcagaucgaccggcugaucacuggccggcugcagagccugcagaccuacgugacccagcagcugauccgggccgccgagauucgggccagcgccaaccuggccgccaccaagaugagcgagugcgugcugggccagagcaagcggguggacuucugcggcaagggcuaccaccugaugagcuuuccccagagcgcaccccacggagugguguuccugcacgugaccuacgugcccgcccaggagaagaacuucaccaccgccccagccaucugccacgacggcaaggcccacuuuccccgggagggcguguucgugagcaacggcacccacugguucgugacccagcggaacuucuacgagccccagaucaucaccaccgacaacaccuucgugagcggcaacugcgacguggugaucggcaucgugaacaacaccguguacgauccccugcagcccgagcuggacagcuucaaggaggagcuggacaaguacuucaagaaucacaccagccccgacguggaccugggcgacaucagcggcaucaacgccagcguggugaacauccagaaggagaucgaucggcugaacgagguggccaagaaccugaacgagagccugaucgaccugcaggagcugggcaaguacgagcaguacaucaaguggcccugguacaucuggcugggcuucaucgccggccugaucgccaucgugauggugaccaucaugcugugcugcaugaccagcugcugcagcugccugaagggcuguugcagcugcggcagcugcugcaaguucgacgaggacgacagcgagcccgugcugaagggcgugaagcugcacuacaccugaggacuagucccuguucccagagcccacuuuuuuuucuuuuuuugaaauaaaauagccugucuuucagaucucaaaggcucuuuucagagccaccaaaaaaaaaaaaaaaaaaaaaaaaaaaaaaaaaaaaaaaaaaaaaaaaaaaaaaaaaaaaaaaaaaaaaaaaaaaaaaaaaaaaaaaaaaaaaaaaaaaaa

SEQ ID NO: 23778 - RNA, 4191 nt, Artificial Sequence
  SARS-CoV-2/Wuhan/WIV05/2019__EPI_ISL_402128 spike protein mRNA gc (1-1273)(K986P_V987P_N501Y_D614G)
aggagagggcgcuuggcuugcaaggacccugagcugcggcauugaagcacacccaacccaacucgacugaagucagccucacugaaccggaucugagaaucuucucucucugggcuugccagggcucuccgaaccuagcuagcauccucuucaauuccaacuagaaagcuuaccauguucguguuccuggugcugcugccccuggugagcagccagugcgugaaccugaccacccggacccagcugccaccagccuacaccaacagcuucacccggggcgucuacuaccccgacaagguguuccggagcagcguccugcacagcacccaggaccuguuccugcccuucuucagcaacgugaccugguuccacgccauccacgugagcggcaccaacggcaccaagcgguucgacaaccccgugcugcccuucaacgacggcguguacuucgccagcaccgagaagagcaacaucauccggggcuggaucuucggcaccacccuggacagcaagacccagagccugcugaucgugaauaacgccaccaacguggugaucaaggugugcgaguuccaguucugcaacgaccccuuccugggcguguacuaccacaagaacaacaagagcuggauggagagcgaguuccggguguacagcagcgccaacaacugcaccuucgaguacgugagccagcccuuccugauggaccuggagggcaagcagggcaacuucaagaaccugcgggaguucguguucaagaacaucgacggcuacuucaagaucuacagcaagcacaccccaaucaaccuggugcgggaucugccccagggcuucucagcccuggagccccugguggaccugcccaucggcaucaacaucacccgguuccagacccugcuggcccugcaccggagcuaccugaccccaggcgacagcagcagcggguggacagcaggcgcggcugcuuacuacgugggcuaccugcagccccggaccuuccugcugaaguacaacgagaacggcaccaucaccgacgccguggacugcgcccuggacccucugagcgagaccaagugcacccugaagagcuucaccguggagaagggcaucuaccagaccagcaacuuccgggugcagcccaccgagagcaucgugcgguuccccaacaucaccaaccugugccccuucggcgagguguucaacgccacccgguucgccagcguguacgccuggaaccggaagcggaucagcaacugcguggccgacuacagcgugcuguacaacagcgccagcuucagcaccuucaagugcuacggcgugagccccaccaagcugaacgaccugugcuucaccaacguguacgccgacagcuucgugauccguggcgacgaggugcggcagaucgcacccggccagacaggcaagaucgccgacuacaacuacaagcugcccgacgacuucaccggcugcgugaucgccuggaacagcaacaaccucgacagcaaggugggcggcaacuacaacuaccuguaccggcuguuccggaagagcaaccugaagcccuucgagcgggacaucagcaccgagaucuaccaagccggcuccaccccuugcaacggcguggagggcuucaacugcuacuucccucugcagagcuacggcuuccagcccaccuacggcgugggcuaccagcccuaccgggugguggugcugagcuucgagcugcugcacgccccagccaccguguguggccccaagaagagcaccaaccuggugaagaacaagugcgugaacuucaacuucaacggccuuaccggcaccggcgugcugaccgagagcaacaagaaauuccugcccuuucagcaguucggccgggacaucgccgacaccaccgacgcugugcgggauccccagacccuggagauccuggacaucaccccuugcagcuucggcggcgugagcgugaucaccccaggcaccaacaccagcaaccagguggccgugcuguaccagggcgugaacugcaccgaggugcccguggccauccacgccgaccagcugacacccaccuggcgggucuacagcaccggcagcaacguguuccagacccgggccgguugccugaucggcgccgagcacgugaacaacagcuacgagugcgacauccccaucggcgccggcaucugugccagcuaccagacccagaccaauucaccccggagggcaaggagcguggccagccagagcaucaucgccuacaccaugagccugggcgccgagaacagcguggccuacagcaacaacagcaucgccauccccaccaacuucaccaucagcgugaccaccgagauucugcccgugagcaugaccaagaccagcguggacugcaccauguacaucugcggcgacagcaccgagugcagcaaccugcugcugcaguacggcagcuucugcacccagcugaaccgggcccugaccggcaucgccguggagcaggacaagaacacccaggagguguucgcccaggugaagcagaucuacaagaccccucccaucaaggacuucggcggcuucaacuucagccagauccugcccgaccccagcaagcccagcaagcggagcuucaucgaggaccugcuguucaacaaggugacccuagccgacgccggcuucaucaagcaguacggcgacugccucggcgacauagccgcccgggaccugaucugcgcccagaaguucaacggccugaccgugcugccuccccugcugaccgacgagaugaucgcccaguacaccagcgcccuguuagccggaaccaucaccagcggcuggacuuucggcgcuggagccgcucugcagauccccuucgccaugcagauggccuaccgguucaacggcaucggcgugacccagaacgugcuguacgagaaccagaagcugaucgccaaccaguucaacagcgccaucggcaagauccaggacagccugagcagcaccgcuagcgcccugggcaagcugcaggacguggugaaccagaacgcccaggcccugaacacccuggugaagcagcugagcagcaacuucggcgccaucagcagcgugcugaacgacauccugagccggcuggacccucccgaggccgaggugcagaucgaccggcugaucacuggccggcugcagagccugcagaccuacgugacccagcagcugauccgggccgccgagauucgggccagcgccaaccuggccgccaccaagaugagcgagugcgugcugggccagagcaagcggguggacuucugcggcaagggcuaccaccugaugagcuuuccccagagcgcaccccacggagugguguuccugcacgugaccuacgugcccgcccaggagaagaacuucaccaccgccccagccaucugccacgacggcaaggcccacuuuccccgggagggcguguucgugagcaacggcacccacugguucgugacccagcggaacuucuacgagccccagaucaucaccaccgacaacaccuucgugagcggcaacugcgacguggugaucggcaucgugaacaacaccguguacgauccccugcagcccgagcuggacagcuucaaggaggagcuggacaaguacuucaagaaucacaccagccccgacguggaccugggcgacaucagcggcaucaacgccagcguggugaacauccagaaggagaucgaucggcugaacgagguggccaagaaccugaacgagagccugaucgaccugcaggagcugggcaaguacgagcaguacaucaaguggcccugguacaucuggcugggcuucaucgccggccugaucgccaucgugauggugaccaucaugcugugcugcaugaccagcugcugcagcugccugaagggcuguugcagcugcggcagcugcugcaaguucgacgaggacgacagcgagcccgugcugaagggcgugaagcugcacuacaccugaggacuagucccuguucccagagcccacuuuuuuuucuuuuuuugaaauaaaauagccugucuuucagaucucaaaggcucuuuucagagccaccaaaaaaaaaaaaaaaaaaaaaaaaaaaaaaaaaaaaaaaaaaaaaaaaaaaaaaaaaaaaaaaaaaaaaaaaaaaaaaaaaaaaaaaaaaaaaaaaaaaaa

SEQ ID NO: 23779 - RNA, 4185 nt, Artificial Sequence
  SARS-CoV-2/Wuhan/WIV05/2019__EPI_ISL_402128 spike protein mRNA gc (1-1273)(K986P_V987P_H69del_V70del_D614G)
aggagagggcgcuuggcuugcaaggacccugagcugcggcauugaagcacacccaacccaacucgacugaagucagccucacugaaccggaucugagaaucuucucucucugggcuugccagggcucuccgaaccuagcuagcauccucuucaauuccaacuagaaagcuuaccauguucguguuccuggugcugcugccccuggugagcagccagugcgugaaccugaccacccggacccagcugccaccagccuacaccaacagcuucacccggggcgucuacuaccccgacaagguguuccggagcagcguccugcacagcacccaggaccuguuccugcccuucuucagcaacgugaccugguuccacgccaucagcggcaccaacggcaccaagcgguucgacaaccccgugcugcccuucaacgacggcguguacuucgccagcaccgagaagagcaacaucauccggggcuggaucuucggcaccacccuggacagcaagacccagagccugcugaucgugaauaacgccaccaacguggugaucaaggugugcgaguuccaguucugcaacgaccccuuccugggcguguacuaccacaagaacaacaagagcuggauggagagcgaguuccggguguacagcagcgccaacaacugcaccuucgaguacgugagccagcccuuccugauggaccuggagggcaagcagggcaacuucaagaaccugcgggaguucguguucaagaacaucgacggcuacuucaagaucuacagcaagcacaccccaaucaaccuggugcgggaucugccccagggcuucucagcccuggagccccugguggaccugcccaucggcaucaacaucacccgguuccagacccugcuggcccugcaccggagcuaccugaccccaggcgacagcagcagcggguggacagcaggcgcggcugcuuacuacgugggcuaccugcagccccggaccuuccugcugaaguacaacgagaacggcaccaucaccgacgccguggacugcgcccuggacccucugagcgagaccaagugcacccugaagagcuucaccguggagaagggcaucuaccagaccagcaacuuccgggugcagcccaccgagagcaucgugcgguuccccaacaucaccaaccugugccccuucggcgagguguucaacgccacccgguucgccagcguguacgccuggaaccggaagcggaucagcaacugcguggccgacuacagcgugcuguacaacagcgccagcuucagcaccuucaagugcuacggcgugagccccaccaagcugaacgaccugugcuucaccaacguguacgccgacagcuucgugauccguggcgacgaggugcggcagaucgcacccggccagacaggcaagaucgccgacuacaacuacaagcugcccgacgacuucaccggcugcgugaucgccuggaacagcaacaaccucgacagcaaggugggcggcaacuacaacuaccuguaccggcuguuccggaagagcaaccugaagcccuucgagcgggacaucagcaccgagaucuaccaagccggcuccaccccuugcaacggcguggagggcuucaacugcuacuucccucugcagagcuacggcuuccagcccaccaacggcgugggcuaccagcccuaccgggugguggugcugagcuucgagcugcugcacgccccagccaccguguguggccccaagaagagcaccaaccuggugaagaacaagugcgugaacuucaacuucaacggccuuaccggcaccggcgugcugaccgagagcaacaagaaauuccugcccuuucagcaguucggccgggacaucgccgacaccaccgacgcugugcgggauccccagacccuggagauccuggacaucaccccuugcagcuucggcggcgugagcgugaucaccccaggcaccaacaccagcaaccagguggccgugcuguaccagggcgugaacugcaccgaggugcccguggccauccacgccgaccagcugacacccaccuggcgggucuacagcaccggcagcaacguguuccagacccgggccgguugccugaucggcgccgagcacgugaacaacagcuacgagugcgacauccccaucggcgccggcaucugugccagcuaccagacccagaccaauucaccccggagggcaaggagcguggccagccagagcaucaucgccuacaccaugagccugggcgccgagaacagcguggccuacagcaacaacagcaucgccauccccaccaacuucaccaucagcgugaccaccgagauucugcccgugagcaugaccaagaccagcguggacugcaccauguacaucugcggcgacagcaccgagugcagcaaccugcugcugcaguacggcagcuucugcacccagcugaaccgggcccugaccggcaucgccguggagcaggacaagaacacccaggagguguucgcccaggugaagcagaucuacaagaccccucccaucaaggacuucggcggcuucaacuucagccagauccugcccgaccccagcaagcccagcaagcggagcuucaucgaggaccugcuguucaacaaggugacccuagccgacgccggcuucaucaagcaguacggcgacugccucggcgacauagccgcccgggaccugaucugcgcccagaaguucaacggccugaccgugcugccuccccugcugaccgacgagaugaucgcccaguacaccagcgcccuguuagccggaaccaucaccagcggcuggacuuucggcgcuggagccgcucugcagauccccuucgccaugcagauggccuaccgguucaacggcaucggcgugacccagaacgugcuguacgagaaccagaagcugaucgccaaccaguucaacagcgccaucggcaagauccaggacagccugagcagcaccgcuagcgcccugggcaagcugcaggacguggugaaccagaacgcccaggcccugaacacccuggugaagcagcugagcagcaacuucggcgccaucagcagcgugcugaacgacauccugagccggcuggacccucccgaggccgaggugcagaucgaccggcugaucacuggccggcugcagagccugcagaccuacgugacccagcagcugauccgggccgccgagauucgggccagcgccaaccuggccgccaccaagaugagcgagugcgugcugggccagagcaagcggguggacuucugcggcaagggcuaccaccugaugagcuuuccccagagcgcaccccacggagugguguuccugcacgugaccuacgugcccgcccaggagaagaacuucaccaccgccccagccaucugccacgacggcaaggcccacuuuccccgggagggcguguucgugagcaacggcacccacugguucgugacccagcggaacuucuacgagccccagaucaucaccaccgacaacaccuucgugagcggcaacugcgacguggugaucggcaucgugaacaacaccguguacgauccccugcagcccgagcuggacagcuucaaggaggagcuggacaaguacuucaagaaucacaccagccccgacguggaccugggcgacaucagcggcaucaacgccagcguggugaacauccagaaggagaucgaucggcugaacgagguggccaagaaccugaacgagagccugaucgaccugcaggagcugggcaaguacgagcaguacaucaaguggcccugguacaucuggcugggcuucaucgccggccugaucgccaucgugauggugaccaucaugcugugcugcaugaccagcugcugcagcugccugaagggcuguugcagcugcggcagcugcugcaaguucgacgaggacgacagcgagcccgugcugaagggcgugaagcugcacuacaccugaggacuagucccuguucccagagcccacuuuuuuuucuuuuuuugaaauaaaauagccugucuuucagaucucaaaggcucuuuucagagccaccaaaaaaaaaaaaaaaaaaaaaaaaaaaaaaaaaaaaaaaaaaaaaaaaaaaaaaaaaaaaaaaaaaaaaaaaaaaaaaaaaaaaaaaaaaaaaaaaaaaaa

SEQ ID NO: 23780 - RNA, 4191 nt, Artificial Sequence
  SARS-CoV-2/Wuhan/WIV05/2019__EPI_ISL_402128 spike protein mRNA gc (1-1273)(K986P_V987P_Y453F_D614G)
aggagagggcgcuuggcuugcaaggacccugagcugcggcauugaagcacacccaacccaacucgacugaagucagccucacugaaccggaucugagaaucuucucucucugggcuugccagggcucuccgaaccuagcuagcauccucuucaauuccaacuagaaagcuuaccauguucguguuccuggugcugcugccccuggugagcagccagugcgugaaccugaccacccggacccagcugccaccagccuacaccaacagcuucacccggggcgucuacuaccccgacaagguguuccggagcagcguccugcacagcacccaggaccuguuccugcccuucuucagcaacgugaccugguuccacgccauccacgugagcggcaccaacggcaccaagcgguucgacaaccccgugcugcccuucaacgacggcguguacuucgccagcaccgagaagagcaacaucauccggggcuggaucuucggcaccacccuggacagcaagacccagagccugcugaucgugaauaacgccaccaacguggugaucaaggugugcgaguuccaguucugcaacgaccccuuccugggcguguacuaccacaagaacaacaagagcuggauggagagcgaguuccggguguacagcagcgccaacaacugcaccuucgaguacgugagccagcccuuccugauggaccuggagggcaagcagggcaacuucaagaaccugcgggaguucguguucaagaacaucgacggcuacuucaagaucuacagcaagcacaccccaaucaaccuggugcgggaucugccccagggcuucucagcccuggagccccugguggaccugcccaucggcaucaacaucacccgguuccagacccugcuggcccugcaccggagcuaccugaccccaggcgacagcagcagcggguggacagcaggcgcggcugcuuacuacgugggcuaccugcagccccggaccuuccugcugaaguacaacgagaacggcaccaucaccgacgccguggacugcgcccuggacccucugagcgagaccaagugcacccugaagagcuucaccguggagaagggcaucuaccagaccagcaacuuccgggugcagcccaccgagagcaucgugcgguuccccaacaucaccaaccugugccccuucggcgagguguucaacgccacccgguucgccagcguguacgccuggaaccggaagcggaucagcaacugcguggccgacuacagcgugcuguacaacagcgccagcuucagcaccuucaagugcuacggcgugagccccaccaagcugaacgaccugugcuucaccaacguguacgccgacagcuucgugauccguggcgacgaggugcggcagaucgcacccggccagacaggcaagaucgccgacuacaacuacaagcugcccgacgacuucaccggcugcgugaucgccuggaacagcaacaaccucgacagcaaggugggcggcaacuacaacuaccuguuccggcuguuccggaagagcaaccugaagcccuucgagcgggacaucagcaccgagaucuaccaagccggcuccaccccuugcaacggcguggagggcuucaacugcuacuucccucugcagagcuacggcuuccagcccaccaacggcgugggcuaccagcccuaccgggugguggugcugagcuucgagcugcugcacgccccagccaccguguguggccccaagaagagcaccaaccuggugaagaacaagugcgugaacuucaacuucaacggccuuaccggcaccggcgugcugaccgagagcaacaagaaauuccugcccuuucagcaguucggccgggacaucgccgacaccaccgacgcugugcgggauccccagacccuggagauccuggacaucaccccuugcagcuucggcggcgugagcgugaucaccccaggcaccaacaccagcaaccagguggccgugcuguaccagggcgugaacugcaccgaggugcccguggccauccacgccgaccagcugacacccaccuggcgggucuacagcaccggcagcaacguguuccagacccgggccgguugccugaucggcgccgagcacgugaacaacagcuacgagugcgacauccccaucggcgccggcaucugugccagcuaccagacccagaccaauucaccccggagggcaaggagcguggccagccagagcaucaucgccuacaccaugagccugggcgccgagaacagcguggccuacagcaacaacagcaucgccauccccaccaacuucaccaucagcgugaccaccgagauucugcccgugagcaugaccaagaccagcguggacugcaccauguacaucugcggcgacagcaccgagugcagcaaccugcugcugcaguacggcagcuucugcacccagcugaaccgggcccugaccggcaucgccguggagcaggacaagaacacccaggagguguucgcccaggugaagcagaucuacaagaccccucccaucaaggacuucggcggcuucaacuucagccagauccugcccgaccccagcaagcccagcaagcggagcuucaucgaggaccugcuguucaacaaggugacccuagccgacgccggcuucaucaagcaguacggcgacugccucggcgacauagccgcccgggaccugaucugcgcccagaaguucaacggccugaccgugcugccuccccugcugaccgacgagaugaucgcccaguacaccagcgcccuguuagccggaaccaucaccagcggcuggacuuucggcgcuggagccgcucugcagauccccuucgccaugcagauggccuaccgguucaacggcaucggcgugacccagaacgugcuguacgagaaccagaagcugaucgccaaccaguucaacagcgccaucggcaagauccaggacagccugagcagcaccgcuagcgcccugggcaagcugcaggacguggugaaccagaacgcccaggcccugaacacccuggugaagcagcugagcagcaacuucggcgccaucagcagcgugcugaacgacauccugagccggcuggacccucccgaggccgaggugcagaucgaccggcugaucacuggccggcugcagagccugcagaccuacgugacccagcagcugauccgggccgccgagauucgggccagcgccaaccuggccgccaccaagaugagcgagugcgugcugggccagagcaagcggguggacuucugcggcaagggcuaccaccugaugagcuuuccccagagcgcaccccacggagugguguuccugcacgugaccuacgugcccgcccaggagaagaacuucaccaccgccccagccaucugccacgacggcaaggcccacuuuccccgggagggcguguucgugagcaacggcacccacugguucgugacccagcggaacuucuacgagccccagaucaucaccaccgacaacaccuucgugagcggcaacugcgacguggugaucggcaucgugaacaacaccguguacgauccccugcagcccgagcuggacagcuucaaggaggagcuggacaaguacuucaagaaucacaccagccccgacguggaccugggcgacaucagcggcaucaacgccagcguggugaacauccagaaggagaucgaucggcugaacgagguggccaagaaccugaacgagagccugaucgaccugcaggagcugggcaaguacgagcaguacaucaaguggcccugguacaucuggcugggcuucaucgccggccugaucgccaucgugauggugaccaucaugcugugcugcaugaccagcugcugcagcugccugaagggcuguugcagcugcggcagcugcugcaaguucgacgaggacgacagcgagcccgugcugaagggcgugaagcugcacuacaccugaggacuagucccuguucccagagcccacuuuuuuuucuuuuuuugaaauaaaauagccugucuuucagaucucaaaggcucuuuucagagccaccaaaaaaaaaaaaaaaaaaaaaaaaaaaaaaaaaaaaaaaaaaaaaaaaaaaaaaaaaaaaaaaaaaaaaaaaaaaaaaaaaaaaaaaaaaaaaaaaaaaaa

SEQ ID NO: 23781 - RNA, 4191 nt, Artificial Sequence
  SARS-CoV-2/Wuhan/WIV05/2019__EPI_ISL_402128 spike protein mRNA gc (1-1273)(K986P_V987P_D614G_I692V)
aggagagggcgcuuggcuugcaaggacccugagcugcggcauugaagcacacccaacccaacucgacugaagucagccucacugaaccggaucugagaaucuucucucucugggcuugccagggcucuccgaaccuagcuagcauccucuucaauuccaacuagaaagcuuaccauguucguguuccuggugcugcugccccuggugagcagccagugcgugaaccugaccacccggacccagcugccaccagccuacaccaacagcuucacccggggcgucuacuaccccgacaagguguuccggagcagcguccugcacagcacccaggaccuguuccugcccuucuucagcaacgugaccugguuccacgccauccacgugagcggcaccaacggcaccaagcgguucgacaaccccgugcugcccuucaacgacggcguguacuucgccagcaccgagaagagcaacaucauccggggcuggaucuucggcaccacccuggacagcaagacccagagccugcugaucgugaauaacgccaccaacguggugaucaaggugugcgaguuccaguucugcaacgaccccuuccugggcguguacuaccacaagaacaacaagagcuggauggagagcgaguuccggguguacagcagcgccaacaacugcaccuucgaguacgugagccagcccuuccugauggaccuggagggcaagcagggcaacuucaagaaccugcgggaguucguguucaagaacaucgacggcuacuucaagaucuacagcaagcacaccccaaucaaccuggugcgggaucugccccagggcuucucagcccuggagccccugguggaccugcccaucggcaucaacaucacccgguuccagacccugcuggcccugcaccggagcuaccugaccccaggcgacagcagcagcggguggacagcaggcgcggcugcuuacuacgugggcuaccugcagccccggaccuuccugcugaaguacaacgagaacggcaccaucaccgacgccguggacugcgcccuggacccucugagcgagaccaagugcacccugaagagcuucaccguggagaagggcaucuaccagaccagcaacuuccgggugcagcccaccgagagcaucgugcgguuccccaacaucaccaaccugugccccuucggcgagguguucaacgccacccgguucgccagcguguacgccuggaaccggaagcggaucagcaacugcguggccgacuacagcgugcuguacaacagcgccagcuucagcaccuucaagugcuacggcgugagccccaccaagcugaacgaccugugcuucaccaacguguacgccgacagcuucgugauccguggcgacgaggugcggcagaucgcacccggccagacaggcaagaucgccgacuacaacuacaagcugcccgacgacuucaccggcugcgugaucgccuggaacagcaacaaccucgacagcaaggugggcggcaacuacaacuaccuguaccggcuguuccggaagagcaaccugaagcccuucgagcgggacaucagcaccgagaucuaccaagccggcuccaccccuugcaacggcguggagggcuucaacugcuacuucccucugcagagcuacggcuuccagcccaccaacggcgugggcuaccagcccuaccgggugguggugcugagcuucgagcugcugcacgccccagccaccguguguggccccaagaagagcaccaaccuggugaagaacaagugcgugaacuucaacuucaacggccuuaccggcaccggcgugcugaccgagagcaacaagaaauuccugcccuuucagcaguucggccgggacaucgccgacaccaccgacgcugugcgggauccccagacccuggagauccuggacaucaccccuugcagcuucggcggcgugagcgugaucaccccaggcaccaacaccagcaaccagguggccgugcuguaccagggcgugaacugcaccgaggugcccguggccauccacgccgaccagcugacacccaccuggcgggucuacagcaccggcagcaacguguuccagacccgggccgguugccugaucggcgccgagcacgugaacaacagcuacgagugcgacauccccaucggcgccggcaucugugccagcuaccagacccagaccaauucaccccggagggcaaggagcguggccagccagagcgugaucgccuacaccaugagccugggcgccgagaacagcguggccuacagcaacaacagcaucgccauccccaccaacuucaccaucagcgugaccaccgagauucugcccgugagcaugaccaagaccagcguggacugcaccauguacaucugcggcgacagcaccgagugcagcaaccugcugcugcaguacggcagcuucugcacccagcugaaccgggcccugaccggcaucgccguggagcaggacaagaacacccaggagguguucgcccaggugaagcagaucuacaagaccccucccaucaaggacuucggcggcuucaacuucagccagauccugcccgaccccagcaagcccagcaagcggagcuucaucgaggaccugcuguucaacaaggugacccuagccgacgccggcuucaucaagcaguacggcgacugccucggcgacauagccgcccgggaccugaucugcgcccagaaguucaacggccugaccgugcugccuccccugcugaccgacgagaugaucgcccaguacaccagcgcccuguuagccggaaccaucaccagcggcuggacuuucggcgcuggagccgcucugcagauccccuucgccaugcagauggccuaccgguucaacggcaucggcgugacccagaacgugcuguacgagaaccagaagcugaucgccaaccaguucaacagcgccaucggcaagauccaggacagccugagcagcaccgcuagcgcccugggcaagcugcaggacguggugaaccagaacgcccaggcccugaacacccuggugaagcagcugagcagcaacuucggcgccaucagcagcgugcugaacgacauccugagccggcuggacccucccgaggccgaggugcagaucgaccggcugaucacuggccggcugcagagccugcagaccuacgugacccagcagcugauccgggccgccgagauucgggccagcgccaaccuggccgccaccaagaugagcgagugcgugcugggccagagcaagcggguggacuucugcggcaagggcuaccaccugaugagcuuuccccagagcgcaccccacggagugguguuccugcacgugaccuacgugcccgcccaggagaagaacuucaccaccgccccagccaucugccacgacggcaaggcccacuuuccccgggagggcguguucgugagcaacggcacccacugguucgugacccagcggaacuucuacgagccccagaucaucaccaccgacaacaccuucgugagcggcaacugcgacguggugaucggcaucgugaacaacaccguguacgauccccugcagcccgagcuggacagcuucaaggaggagcuggacaaguacuucaagaaucacaccagccccgacguggaccugggcgacaucagcggcaucaacgccagcguggugaacauccagaaggagaucgaucggcugaacgagguggccaagaaccugaacgagagccugaucgaccugcaggagcugggcaaguacgagcaguacaucaaguggcccugguacaucuggcugggcuucaucgccggccugaucgccaucgugauggugaccaucaugcugugcugcaugaccagcugcugcagcugccugaagggcuguugcagcugcggcagcugcugcaaguucgacgaggacgacagcgagcccgugcugaagggcgugaagcugcacuacaccugaggacuagucccuguucccagagcccacuuuuuuuucuuuuuuugaaauaaaauagccugucuuucagaucucaaaggcucuuuucagagccaccaaaaaaaaaaaaaaaaaaaaaaaaaaaaaaaaaaaaaaaaaaaaaaaaaaaaaaaaaaaaaaaaaaaaaaaaaaaaaaaaaaaaaaaaaaaaaaaaaaaaa

SEQ ID NO: 23782 - RNA, 4191 nt, Artificial Sequence
  SARS-CoV-2/Wuhan/WIV05/2019__EPI_ISL_402128 spike protein mRNA gc (1-1273)(K986P_V987P_D614G_M1229I)
aggagagggcgcuuggcuugcaaggacccugagcugcggcauugaagcacacccaacccaacucgacugaagucagccucacugaaccggaucugagaaucuucucucucugggcuugccagggcucuccgaaccuagcuagcauccucuucaauuccaacuagaaagcuuaccauguucguguuccuggugcugcugccccuggugagcagccagugcgugaaccugaccacccggacccagcugccaccagccuacaccaacagcuucacccggggcgucuacuaccccgacaagguguuccggagcagcguccugcacagcacccaggaccuguuccugcccuucuucagcaacgugaccugguuccacgccauccacgugagcggcaccaacggcaccaagcgguucgacaaccccgugcugcccuucaacgacggcguguacuucgccagcaccgagaagagcaacaucauccggggcuggaucuucggcaccacccuggacagcaagacccagagccugcugaucgugaauaacgccaccaacguggugaucaaggugugcgaguuccaguucugcaacgaccccuuccugggcguguacuaccacaagaacaacaagagcuggauggagagcgaguuccggguguacagcagcgccaacaacugcaccuucgaguacgugagccagcccuuccugauggaccuggagggcaagcagggcaacuucaagaaccugcgggaguucguguucaagaacaucgacggcuacuucaagaucuacagcaagcacaccccaaucaaccuggugcgggaucugccccagggcuucucagcccuggagccccugguggaccugcccaucggcaucaacaucacccgguuccagacccugcuggcccugcaccggagcuaccugaccccaggcgacagcagcagcggguggacagcaggcgcggcugcuuacuacgugggcuaccugcagccccggaccuuccugcugaaguacaacgagaacggcaccaucaccgacgccguggacugcgcccuggacccucugagcgagaccaagugcacccugaagagcuucaccguggagaagggcaucuaccagaccagcaacuuccgggugcagcccaccgagagcaucgugcgguuccccaacaucaccaaccugugccccuucggcgagguguucaacgccacccgguucgccagcguguacgccuggaaccggaagcggaucagcaacugcguggccgacuacagcgugcuguacaacagcgccagcuucagcaccuucaagugcuacggcgugagccccaccaagcugaacgaccugugcuucaccaacguguacgccgacagcuucgugauccguggcgacgaggugcggcagaucgcacccggccagacaggcaagaucgccgacuacaacuacaagcugcccgacgacuucaccggcugcgugaucgccuggaacagcaacaaccucgacagcaaggugggcggcaacuacaacuaccuguaccggcuguuccggaagagcaaccugaagcccuucgagcgggacaucagcaccgagaucuaccaagccggcuccaccccuugcaacggcguggagggcuucaacugcuacuucccucugcagagcuacggcuuccagcccaccaacggcgugggcuaccagcccuaccgggugguggugcugagcuucgagcugcugcacgccccagccaccguguguggccccaagaagagcaccaaccuggugaagaacaagugcgugaacuucaacuucaacggccuuaccggcaccggcgugcugaccgagagcaacaagaaauuccugcccuuucagcaguucggccgggacaucgccgacaccaccgacgcugugcgggauccccagacccuggagauccuggacaucaccccuugcagcuucggcggcgugagcgugaucaccccaggcaccaacaccagcaaccagguggccgugcuguaccagggcgugaacugcaccgaggugcccguggccauccacgccgaccagcugacacccaccuggcgggucuacagcaccggcagcaacguguuccagacccgggccgguugccugaucggcgccgagcacgugaacaacagcuacgagugcgacauccccaucggcgccggcaucugugccagcuaccagacccagaccaauucaccccggagggcaaggagcguggccagccagagcaucaucgccuacaccaugagccugggcgccgagaacagcguggccuacagcaacaacagcaucgccauccccaccaacuucaccaucagcgugaccaccgagauucugcccgugagcaugaccaagaccagcguggacugcaccauguacaucugcggcgacagcaccgagugcagcaaccugcugcugcaguacggcagcuucugcacccagcugaaccgggcccugaccggcaucgccguggagcaggacaagaacacccaggagguguucgcccaggugaagcagaucuacaagaccccucccaucaaggacuucggcggcuucaacuucagccagauccugcccgaccccagcaagcccagcaagcggagcuucaucgaggaccugcuguucaacaaggugacccuagccgacgccggcuucaucaagcaguacggcgacugccucggcgacauagccgcccgggaccugaucugcgcccagaaguucaacggccugaccgugcugccuccccugcugaccgacgagaugaucgcccaguacaccagcgcccuguuagccggaaccaucaccagcggcuggacuuucggcgcuggagccgcucugcagauccccuucgccaugcagauggccuaccgguucaacggcaucggcgugacccagaacgugcuguacgagaaccagaagcugaucgccaaccaguucaacagcgccaucggcaagauccaggacagccugagcagcaccgcuagcgcccugggcaagcugcaggacguggugaaccagaacgcccaggcccugaacacccuggugaagcagcugagcagcaacuucggcgccaucagcagcgugcugaacgacauccugagccggcuggacccucccgaggccgaggugcagaucgaccggcugaucacuggccggcugcagagccugcagaccuacgugacccagcagcugauccgggccgccgagauucgggccagcgccaaccuggccgccaccaagaugagcgagugcgugcugggccagagcaagcggguggacuucugcggcaagggcuaccaccugaugagcuuuccccagagcgcaccccacggagugguguuccugcacgugaccuacgugcccgcccaggagaagaacuucaccaccgccccagccaucugccacgacggcaaggcccacuuuccccgggagggcguguucgugagcaacggcacccacugguucgugacccagcggaacuucuacgagccccagaucaucaccaccgacaacaccuucgugagcggcaacugcgacguggugaucggcaucgugaacaacaccguguacgauccccugcagcccgagcuggacagcuucaaggaggagcuggacaaguacuucaagaaucacaccagccccgacguggaccugggcgacaucagcggcaucaacgccagcguggugaacauccagaaggagaucgaucggcugaacgagguggccaagaaccugaacgagagccugaucgaccugcaggagcugggcaaguacgagcaguacaucaaguggcccugguacaucuggcugggcuucaucgccggccugaucgccaucgugaucgugaccaucaugcugugcugcaugaccagcugcugcagcugccugaagggcuguugcagcugcggcagcugcugcaaguucgacgaggacgacagcgagcccgugcugaagggcgugaagcugcacuacaccugaggacuagucccuguucccagagcccacuuuuuuuucuuuuuuugaaauaaaauagccugucuuucagaucucaaaggcucuuuucagagccaccaaaaaaaaaaaaaaaaaaaaaaaaaaaaaaaaaaaaaaaaaaaaaaaaaaaaaaaaaaaaaaaaaaaaaaaaaaaaaaaaaaaaaaaaaaaaaaaaaaaaa

SEQ ID NO: 23783 - RNA, 4185 nt, Artificial Sequence
  SARS-CoV-2/Wuhan/WIV05/2019__EPI_ISL_402128 spike protein mRNA gc (1-1273)(K986P_V987P_H69del_V70del_A222V_Y453F_S477N_D614G_I692V)
aggagagggcgcuuggcuugcaaggacccugagcugcggcauugaagcacacccaacccaacucgacugaagucagccucacugaaccggaucugagaaucuucucucucugggcuugccagggcucuccgaaccuagcuagcauccucuucaauuccaacuagaaagcuuaccauguucguguuccuggugcugcugccccuggugagcagccagugcgugaaccugaccacccggacccagcugccaccagccuacaccaacagcuucacccggggcgucuacuaccccgacaagguguuccggagcagcguccugcacagcacccaggaccuguuccugcccuucuucagcaacgugaccugguuccacgccaucagcggcaccaacggcaccaagcgguucgacaaccccgugcugcccuucaacgacggcguguacuucgccagcaccgagaagagcaacaucauccggggcuggaucuucggcaccacccuggacagcaagacccagagccugcugaucgugaauaacgccaccaacguggugaucaaggugugcgaguuccaguucugcaacgaccccuuccugggcguguacuaccacaagaacaacaagagcuggauggagagcgaguuccggguguacagcagcgccaacaacugcaccuucgaguacgugagccagcccuuccugauggaccuggagggcaagcagggcaacuucaagaaccugcgggaguucguguucaagaacaucgacggcuacuucaagaucuacagcaagcacaccccaaucaaccuggugcgggaucugccccagggcuucucagugcuggagccccugguggaccugcccaucggcaucaacaucacccgguuccagacccugcuggcccugcaccggagcuaccugaccccaggcgacagcagcagcggguggacagcaggcgcggcugcuuacuacgugggcuaccugcagccccggaccuuccugcugaaguacaacgagaacggcaccaucaccgacgccguggacugcgcccuggacccucugagcgagaccaagugcacccugaagagcuucaccguggagaagggcaucuaccagaccagcaacuuccgggugcagcccaccgagagcaucgugcgguuccccaacaucaccaaccugugccccuucggcgagguguucaacgccacccgguucgccagcguguacgccuggaaccggaagcggaucagcaacugcguggccgacuacagcgugcuguacaacagcgccagcuucagcaccuucaagugcuacggcgugagccccaccaagcugaacgaccugugcuucaccaacguguacgccgacagcuucgugauccguggcgacgaggugcggcagaucgcacccggccagacaggcaagaucgccgacuacaacuacaagcugcccgacgacuucaccggcugcgugaucgccuggaacagcaacaaccucgacagcaaggugggcggcaacuacaacuaccuguuccggcuguuccggaagagcaaccugaagcccuucgagcgggacaucagcaccgagaucuaccaagccggcaacaccccuugcaacggcguggagggcuucaacugcuacuucccucugcagagcuacggcuuccagcccaccaacggcgugggcuaccagcccuaccgggugguggugcugagcuucgagcugcugcacgccccagccaccguguguggccccaagaagagcaccaaccuggugaagaacaagugcgugaacuucaacuucaacggccuuaccggcaccggcgugcugaccgagagcaacaagaaauuccugcccuuucagcaguucggccgggacaucgccgacaccaccgacgcugugcgggauccccagacccuggagauccuggacaucaccccuugcagcuucggcggcgugagcgugaucaccccaggcaccaacaccagcaaccagguggccgugcuguaccagggcgugaacugcaccgaggugcccguggccauccacgccgaccagcugacacccaccuggcgggucuacagcaccggcagcaacguguuccagacccgggccgguugccugaucggcgccgagcacgugaacaacagcuacgagugcgacauccccaucggcgccggcaucugugccagcuaccagacccagaccaauucaccccggagggcaaggagcguggccagccagagcgugaucgccuacaccaugagccugggcgccgagaacagcguggccuacagcaacaacagcaucgccauccccaccaacuucaccaucagcgugaccaccgagauucugcccgugagcaugaccaagaccagcguggacugcaccauguacaucugcggcgacagcaccgagugcagcaaccugcugcugcaguacggcagcuucugcacccagcugaaccgggcccugaccggcaucgccguggagcaggacaagaacacccaggagguguucgcccaggugaagcagaucuacaagaccccucccaucaaggacuucggcggcuucaacuucagccagauccugcccgaccccagcaagcccagcaagcggagcuucaucgaggaccugcuguucaacaaggugacccuagccgacgccggcuucaucaagcaguacggcgacugccucggcgacauagccgcccgggaccugaucugcgcccagaaguucaacggccugaccgugcugccuccccugcugaccgacgagaugaucgcccaguacaccagcgcccuguuagccggaaccaucaccagcggcuggacuuucggcgcuggagccgcucugcagauccccuucgccaugcagauggccuaccgguucaacggcaucggcgugacccagaacgugcuguacgagaaccagaagcugaucgccaaccaguucaacagcgccaucggcaagauccaggacagccugagcagcaccgcuagcgcccugggcaagcugcaggacguggugaaccagaacgcccaggcccugaacacccuggugaagcagcugagcagcaacuucggcgccaucagcagcgugcugaacgacauccugagccggcuggacccucccgaggccgaggugcagaucgaccggcugaucacuggccggcugcagagccugcagaccuacgugacccagcagcugauccgggccgccgagauucgggccagcgccaaccuggccgccaccaagaugagcgagugcgugcugggccagagcaagcggguggacuucugcggcaagggcuaccaccugaugagcuuuccccagagcgcaccccacggagugguguuccugcacgugaccuacgugcccgcccaggagaagaacuucaccaccgccccagccaucugccacgacggcaaggcccacuuuccccgggagggcguguucgugagcaacggcacccacugguucgugacccagcggaacuucuacgagccccagaucaucaccaccgacaacaccuucgugagcggcaacugcgacguggugaucggcaucgugaacaacaccguguacgauccccugcagcccgagcuggacagcuucaaggaggagcuggacaaguacuucaagaaucacaccagccccgacguggaccugggcgacaucagcggcaucaacgccagcguggugaacauccagaaggagaucgaucggcugaacgagguggccaagaaccugaacgagagccugaucgaccugcaggagcugggcaaguacgagcaguacaucaaguggcccugguacaucuggcugggcuucaucgccggccugaucgccaucgugauggugaccaucaugcugugcugcaugaccagcugcugcagcugccugaagggcuguugcagcugcggcagcugcugcaaguucgacgaggacgacagcgagcccgugcugaagggcgugaagcugcacuacaccugaggacuagucccuguucccagagcccacuuuuuuuucuuuuuuugaaauaaaauagccugucuuucagaucucaaaggcucuuuucagagccaccaaaaaaaaaaaaaaaaaaaaaaaaaaaaaaaaaaaaaaaaaaaaaaaaaaaaaaaaaaaaaaaaaaaaaaaaaaaaaaaaaaaaaaaaaaaaaaaaaaaaa

SEQ ID NO: 23784 - RNA, 4185 nt, Artificial Sequence
  SARS-CoV-2/Wuhan/WIV05/2019__EPI_ISL_402128 spike protein mRNA gc (1-1273)(K986P_V987P_H69del_V70del_Y453F_D614G_I692V_M1229I)
aggagagggcgcuuggcuugcaaggacccugagcugcggcauugaagcacacccaacccaacucgacugaagucagccucacugaaccggaucugagaaucuucucucucugggcuugccagggcucuccgaaccuagcuagcauccucuucaauuccaacuagaaagcuuaccauguucguguuccuggugcugcugccccuggugagcagccagugcgugaaccugaccacccggacccagcugccaccagccuacaccaacagcuucacccggggcgucuacuaccccgacaagguguuccggagcagcguccugcacagcacccaggaccuguuccugcccuucuucagcaacgugaccugguuccacgccaucagcggcaccaacggcaccaagcgguucgacaaccccgugcugcccuucaacgacggcguguacuucgccagcaccgagaagagcaacaucauccggggcuggaucuucggcaccacccuggacagcaagacccagagccugcugaucgugaauaacgccaccaacguggugaucaaggugugcgaguuccaguucugcaacgaccccuuccugggcguguacuaccacaagaacaacaagagcuggauggagagcgaguuccggguguacagcagcgccaacaacugcaccuucgaguacgugagccagcccuuccugauggaccuggagggcaagcagggcaacuucaagaaccugcgggaguucguguucaagaacaucgacggcuacuucaagaucuacagcaagcacaccccaaucaaccuggugcgggaucugccccagggcuucucagcccuggagccccugguggaccugcccaucggcaucaacaucacccgguuccagacccugcuggcccugcaccggagcuaccugaccccaggcgacagcagcagcggguggacagcaggcgcggcugcuuacuacgugggcuaccugcagccccggaccuuccugcugaaguacaacgagaacggcaccaucaccgacgccguggacugcgcccuggacccucugagcgagaccaagugcacccugaagagcuucaccguggagaagggcaucuaccagaccagcaacuuccgggugcagcccaccgagagcaucgugcgguuccccaacaucaccaaccugugccccuucggcgagguguucaacgccacccgguucgccagcguguacgccuggaaccggaagcggaucagcaacugcguggccgacuacagcgugcuguacaacagcgccagcuucagcaccuucaagugcuacggcgugagccccaccaagcugaacgaccugugcuucaccaacguguacgccgacagcuucgugauccguggcgacgaggugcggcagaucgcacccggccagacaggcaagaucgccgacuacaacuacaagcugcccgacgacuucaccggcugcgugaucgccuggaacagcaacaaccucgacagcaaggugggcggcaacuacaacuaccuguuccggcuguuccggaagagcaaccugaagcccuucgagcgggacaucagcaccgagaucuaccaagccggcuccaccccuugcaacggcguggagggcuucaacugcuacuucccucugcagagcuacggcuuccagcccaccaacggcgugggcuaccagcccuaccgggugguggugcugagcuucgagcugcugcacgccccagccaccguguguggccccaagaagagcaccaaccuggugaagaacaagugcgugaacuucaacuucaacggccuuaccggcaccggcgugcugaccgagagcaacaagaaauuccugcccuuucagcaguucggccgggacaucgccgacaccaccgacgcugugcgggauccccagacccuggagauccuggacaucaccccuugcagcuucggcggcgugagcgugaucaccccaggcaccaacaccagcaaccagguggccgugcuguaccagggcgugaacugcaccgaggugcccguggccauccacgccgaccagcugacacccaccuggcgggucuacagcaccggcagcaacguguuccagacccgggccgguugccugaucggcgccgagcacgugaacaacagcuacgagugcgacauccccaucggcgccggcaucugugccagcuaccagacccagaccaauucaccccggagggcaaggagcguggccagccagagcgugaucgccuacaccaugagccugggcgccgagaacagcguggccuacagcaacaacagcaucgccauccccaccaacuucaccaucagcgugaccaccgagauucugcccgugagcaugaccaagaccagcguggacugcaccauguacaucugcggcgacagcaccgagugcagcaaccugcugcugcaguacggcagcuucugcacccagcugaaccgggcccugaccggcaucgccguggagcaggacaagaacacccaggagguguucgcccaggugaagcagaucuacaagaccccucccaucaaggacuucggcggcuucaacuucagccagauccugcccgaccccagcaagcccagcaagcggagcuucaucgaggaccugcuguucaacaaggugacccuagccgacgccggcuucaucaagcaguacggcgacugccucggcgacauagccgcccgggaccugaucugcgcccagaaguucaacggccugaccgugcugccuccccugcugaccgacgagaugaucgcccaguacaccagcgcccuguuagccggaaccaucaccagcggcuggacuuucggcgcuggagccgcucugcagauccccuucgccaugcagauggccuaccgguucaacggcaucggcgugacccagaacgugcuguacgagaaccagaagcugaucgccaaccaguucaacagcgccaucggcaagauccaggacagccugagcagcaccgcuagcgcccugggcaagcugcaggacguggugaaccagaacgcccaggcccugaacacccuggugaagcagcugagcagcaacuucggcgccaucagcagcgugcugaacgacauccugagccggcuggacccucccgaggccgaggugcagaucgaccggcugaucacuggccggcugcagagccugcagaccuacgugacccagcagcugauccgggccgccgagauucgggccagcgccaaccuggccgccaccaagaugagcgagugcgugcugggccagagcaagcggguggacuucugcggcaagggcuaccaccugaugagcuuuccccagagcgcaccccacggagugguguuccugcacgugaccuacgugcccgcccaggagaagaacuucaccaccgccccagccaucugccacgacggcaaggcccacuuuccccgggagggcguguucgugagcaacggcacccacugguucgugacccagcggaacuucuacgagccccagaucaucaccaccgacaacaccuucgugagcggcaacugcgacguggugaucggcaucgugaacaacaccguguacgauccccugcagcccgagcuggacagcuucaaggaggagcuggacaaguacuucaagaaucacaccagccccgacguggaccugggcgacaucagcggcaucaacgccagcguggugaacauccagaaggagaucgaucggcugaacgagguggccaagaaccugaacgagagccugaucgaccugcaggagcugggcaaguacgagcaguacaucaaguggcccugguacaucuggcugggcuucaucgccggccugaucgccaucgugaucgugaccaucaugcugugcugcaugaccagcugcugcagcugccugaagggcuguugcagcugcggcagcugcugcaaguucgacgaggacgacagcgagcccgugcugaagggcgugaagcugcacuacaccugaggacuagucccuguucccagagcccacuuuuuuuucuuuuuuugaaauaaaauagccugucuuucagaucucaaaggcucuuuucagagccaccaaaaaaaaaaaaaaaaaaaaaaaaaaaaaaaaaaaaaaaaaaaaaaaaaaaaaaaaaaaaaaaaaaaaaaaaaaaaaaaaaaaaaaaaaaaaaaaaaaaaa

SEQ ID NO: 23785 - RNA, 4182 nt, Artificial Sequence
  SARS-CoV-2/Wuhan/WIV05/2019__EPI_ISL_402128 spike protein mRNA gc (1-1273)(K986P_V987P_K986P_V987P_H69del_V70del_Y144del_N501Y_A570 D_D614G_P681H_T716I_S982A_D1118H)
aggagagggcgcuuggcuugcaaggacccugagcugcggcauugaagcacacccaacccaacucgacugaagucagccucacugaaccggaucugagaaucuucucucucugggcuugccagggcucuccgaaccuagcuagcauccucuucaauuccaacuagaaagcuuaccauguucguguuccuggugcugcugccccuggugagcagccagugcgugaaccugaccacccggacccagcugccaccagccuacaccaacagcuucacccggggcgucuacuaccccgacaagguguuccggagcagcguccugcacagcacccaggaccuguuccugcccuucuucagcaacgugaccugguuccacgccaucagcggcaccaacggcaccaagcgguucgacaaccccgugcugcccuucaacgacggcguguacuucgccagcaccgagaagagcaacaucauccggggcuggaucuucggcaccacccuggacagcaagacccagagccugcugaucgugaauaacgccaccaacguggugaucaaggugugcgaguuccaguucugcaacgaccccuuccugggcguguaccacaagaacaacaagagcuggauggagagcgaguuccggguguacagcagcgccaacaacugcaccuucgaguacgugagccagcccuuccugauggaccuggagggcaagcagggcaacuucaagaaccugcgggaguucguguucaagaacaucgacggcuacuucaagaucuacagcaagcacaccccaaucaaccuggugcgggaucugccccagggcuucucagcccuggagccccugguggaccugcccaucggcaucaacaucacccgguuccagacccugcuggcccugcaccggagcuaccugaccccaggcgacagcagcagcggguggacagcaggcgcggcugcuuacuacgugggcuaccugcagccccggaccuuccugcugaaguacaacgagaacggcaccaucaccgacgccguggacugcgcccuggacccucugagcgagaccaagugcacccugaagagcuucaccguggagaagggcaucuaccagaccagcaacuuccgggugcagcccaccgagagcaucgugcgguuccccaacaucaccaaccugugccccuucggcgagguguucaacgccacccgguucgccagcguguacgccuggaaccggaagcggaucagcaacugcguggccgacuacagcgugcuguacaacagcgccagcuucagcaccuucaagugcuacggcgugagccccaccaagcugaacgaccugugcuucaccaacguguacgccgacagcuucgugauccguggcgacgaggugcggcagaucgcacccggccagacaggcaagaucgccgacuacaacuacaagcugcccgacgacuucaccggcugcgugaucgccuggaacagcaacaaccucgacagcaaggugggcggcaacuacaacuaccuguaccggcuguuccggaagagcaaccugaagcccuucgagcgggacaucagcaccgagaucuaccaagccggcuccaccccuugcaacggcguggagggcuucaacugcuacuucccucugcagagcuacggcuuccagcccaccuacggcgugggcuaccagcccuaccgggugguggugcugagcuucgagcugcugcacgccccagccaccguguguggccccaagaagagcaccaaccuggugaagaacaagugcgugaacuucaacuucaacggccuuaccggcaccggcgugcugaccgagagcaacaagaaauuccugcccuuucagcaguucggccgggacaucgacgacaccaccgacgcugugcgggauccccagacccuggagauccuggacaucaccccuugcagcuucggcggcgugagcgugaucaccccaggcaccaacaccagcaaccagguggccgugcuguaccagggcgugaacugcaccgaggugcccguggccauccacgccgaccagcugacacccaccuggcgggucuacagcaccggcagcaacguguuccagacccgggccgguugccugaucggcgccgagcacgugaacaacagcuacgagugcgacauccccaucggcgccggcaucugugccagcuaccagacccagaccaauucacaccggagggcaaggagcguggccagccagagcaucaucgccuacaccaugagccugggcgccgagaacagcguggccuacagcaacaacagcaucgccauccccaucaacuucaccaucagcgugaccaccgagauucugcccgugagcaugaccaagaccagcguggacugcaccauguacaucugcggcgacagcaccgagugcagcaaccugcugcugcaguacggcagcuucugcacccagcugaaccgggcccugaccggcaucgccguggagcaggacaagaacacccaggagguguucgcccaggugaagcagaucuacaagaccccucccaucaaggacuucggcggcuucaacuucagccagauccugcccgaccccagcaagcccagcaagcggagcuucaucgaggaccugcuguucaacaaggugacccuagccgacgccggcuucaucaagcaguacggcgacugccucggcgacauagccgcccgggaccugaucugcgcccagaaguucaacggccugaccgugcugccuccccugcugaccgacgagaugaucgcccaguacaccagcgcccuguuagccggaaccaucaccagcggcuggacuuucggcgcuggagccgcucugcagauccccuucgccaugcagauggccuaccgguucaacggcaucggcgugacccagaacgugcuguacgagaaccagaagcugaucgccaaccaguucaacagcgccaucggcaagauccaggacagccugagcagcaccgcuagcgcccugggcaagcugcaggacguggugaaccagaacgcccaggcccugaacacccuggugaagcagcugagcagcaacuucggcgccaucagcagcgugcugaacgacauccuggcccggcuggacccucccgaggccgaggugcagaucgaccggcugaucacuggccggcugcagagccugcagaccuacgugacccagcagcugauccgggccgccgagauucgggccagcgccaaccuggccgccaccaagaugagcgagugcgugcugggccagagcaagcggguggacuucugcggcaagggcuaccaccugaugagcuuuccccagagcgcaccccacggagugguguuccugcacgugaccuacgugcccgcccaggagaagaacuucaccaccgccccagccaucugccacgacggcaaggcccacuuuccccgggagggcguguucgugagcaacggcacccacugguucgugacccagcggaacuucuacgagccccagaucaucaccacccacaacaccuucgugagcggcaacugcgacguggugaucggcaucgugaacaacaccguguacgauccccugcagcccgagcuggacagcuucaaggaggagcuggacaaguacuucaagaaucacaccagccccgacguggaccugggcgacaucagcggcaucaacgccagcguggugaacauccagaaggagaucgaucggcugaacgagguggccaagaaccugaacgagagccugaucgaccugcaggagcugggcaaguacgagcaguacaucaaguggcccugguacaucuggcugggcuucaucgccggccugaucgccaucgugauggugaccaucaugcugugcugcaugaccagcugcugcagcugccugaagggcuguugcagcugcggcagcugcugcaaguucgacgaggacgacagcgagcccgugcugaagggcgugaagcugcacuacaccugaggacuagucccuguucccagagcccacuuuuuuuucuuuuuuugaaauaaaauagccugucuuucagaucucaaaggcucuuuucagagccaccaaaaaaaaaaaaaaaaaaaaaaaaaaaaaaaaaaaaaaaaaaaaaaaaaaaaaaaaaaaaaaaaaaaaaaaaaaaaaaaaaaaaaaaaaaaaaaaaaaaaa

SEQ ID NO: 23786 - RNA, 4191 nt, Artificial Sequence
  SARS-CoV-2/Wuhan/WIV05/2019__EPI_ISL_402128 spike protein mRNA gc (1-1273)(K986P_V987P_K986P_V987P_K417N_E484K_N501Y_D614G)
aggagagggcgcuuggcuugcaaggacccugagcugcggcauugaagcacacccaacccaacucgacugaagucagccucacugaaccggaucugagaaucuucucucucugggcuugccagggcucuccgaaccuagcuagcauccucuucaauuccaacuagaaagcuuaccauguucguguuccuggugcugcugccccuggugagcagccagugcgugaaccugaccacccggacccagcugccaccagccuacaccaacagcuucacccggggcgucuacuaccccgacaagguguuccggagcagcguccugcacagcacccaggaccuguuccugcccuucuucagcaacgugaccugguuccacgccauccacgugagcggcaccaacggcaccaagcgguucgacaaccccgugcugcccuucaacgacggcguguacuucgccagcaccgagaagagcaacaucauccggggcuggaucuucggcaccacccuggacagcaagacccagagccugcugaucgugaauaacgccaccaacguggugaucaaggugugcgaguuccaguucugcaacgaccccuuccugggcguguacuaccacaagaacaacaagagcuggauggagagcgaguuccggguguacagcagcgccaacaacugcaccuucgaguacgugagccagcccuuccugauggaccuggagggcaagcagggcaacuucaagaaccugcgggaguucguguucaagaacaucgacggcuacuucaagaucuacagcaagcacaccccaaucaaccuggugcgggaucugccccagggcuucucagcccuggagccccugguggaccugcccaucggcaucaacaucacccgguuccagacccugcuggcccugcaccggagcuaccugaccccaggcgacagcagcagcggguggacagcaggcgcggcugcuuacuacgugggcuaccugcagccccggaccuuccugcugaaguacaacgagaacggcaccaucaccgacgccguggacugcgcccuggacccucugagcgagaccaagugcacccugaagagcuucaccguggagaagggcaucuaccagaccagcaacuuccgggugcagcccaccgagagcaucgugcgguuccccaacaucaccaaccugugccccuucggcgagguguucaacgccacccgguucgccagcguguacgccuggaaccggaagcggaucagcaacugcguggccgacuacagcgugcuguacaacagcgccagcuucagcaccuucaagugcuacggcgugagccccaccaagcugaacgaccugugcuucaccaacguguacgccgacagcuucgugauccguggcgacgaggugcggcagaucgcacccggccagacaggcaacaucgccgacuacaacuacaagcugcccgacgacuucaccggcugcgugaucgccuggaacagcaacaaccucgacagcaaggugggcggcaacuacaacuaccuguaccggcuguuccggaagagcaaccugaagcccuucgagcgggacaucagcaccgagaucuaccaagccggcuccaccccuugcaacggcgugaagggcuucaacugcuacuucccucugcagagcuacggcuuccagcccaccuacggcgugggcuaccagcccuaccgggugguggugcugagcuucgagcugcugcacgccccagccaccguguguggccccaagaagagcaccaaccuggugaagaacaagugcgugaacuucaacuucaacggccuuaccggcaccggcgugcugaccgagagcaacaagaaauuccugcccuuucagcaguucggccgggacaucgccgacaccaccgacgcugugcgggauccccagacccuggagauccuggacaucaccccuugcagcuucggcggcgugagcgugaucaccccaggcaccaacaccagcaaccagguggccgugcuguaccagggcgugaacugcaccgaggugcccguggccauccacgccgaccagcugacacccaccuggcgggucuacagcaccggcagcaacguguuccagacccgggccgguugccugaucggcgccgagcacgugaacaacagcuacgagugcgacauccccaucggcgccggcaucugugccagcuaccagacccagaccaauucaccccggagggcaaggagcguggccagccagagcaucaucgccuacaccaugagccugggcgccgagaacagcguggccuacagcaacaacagcaucgccauccccaccaacuucaccaucagcgugaccaccgagauucugcccgugagcaugaccaagaccagcguggacugcaccauguacaucugcggcgacagcaccgagugcagcaaccugcugcugcaguacggcagcuucugcacccagcugaaccgggcccugaccggcaucgccguggagcaggacaagaacacccaggagguguucgcccaggugaagcagaucuacaagaccccucccaucaaggacuucggcggcuucaacuucagccagauccugcccgaccccagcaagcccagcaagcggagcuucaucgaggaccugcuguucaacaaggugacccuagccgacgccggcuucaucaagcaguacggcgacugccucggcgacauagccgcccgggaccugaucugcgcccagaaguucaacggccugaccgugcugccuccccugcugaccgacgagaugaucgcccaguacaccagcgcccuguuagccggaaccaucaccagcggcuggacuuucggcgcuggagccgcucugcagauccccuucgccaugcagauggccuaccgguucaacggcaucggcgugacccagaacgugcuguacgagaaccagaagcugaucgccaaccaguucaacagcgccaucggcaagauccaggacagccugagcagcaccgcuagcgcccugggcaagcugcaggacguggugaaccagaacgcccaggcccugaacacccuggugaagcagcugagcagcaacuucggcgccaucagcagcgugcugaacgacauccugagccggcuggacccucccgaggccgaggugcagaucgaccggcugaucacuggccggcugcagagccugcagaccuacgugacccagcagcugauccgggccgccgagauucgggccagcgccaaccuggccgccaccaagaugagcgagugcgugcugggccagagcaagcggguggacuucugcggcaagggcuaccaccugaugagcuuuccccagagcgcaccccacggagugguguuccugcacgugaccuacgugcccgcccaggagaagaacuucaccaccgccccagccaucugccacgacggcaaggcccacuuuccccgggagggcguguucgugagcaacggcacccacugguucgugacccagcggaacuucuacgagccccagaucaucaccaccgacaacaccuucgugagcggcaacugcgacguggugaucggcaucgugaacaacaccguguacgauccccugcagcccgagcuggacagcuucaaggaggagcuggacaaguacuucaagaaucacaccagccccgacguggaccugggcgacaucagcggcaucaacgccagcguggugaacauccagaaggagaucgaucggcugaacgagguggccaagaaccugaacgagagccugaucgaccugcaggagcugggcaaguacgagcaguacaucaaguggcccugguacaucuggcugggcuucaucgccggccugaucgccaucgugauggugaccaucaugcugugcugcaugaccagcugcugcagcugccugaagggcuguugcagcugcggcagcugcugcaaguucgacgaggacgacagcgagcccgugcugaagggcgugaagcugcacuacaccugaggacuagucccuguucccagagcccacuuuuuuuucuuuuuuugaaauaaaauagccugucuuucagaucucaaaggcucuuuucagagccaccaaaaaaaaaaaaaaaaaaaaaaaaaaaaaaaaaaaaaaaaaaaaaaaaaaaaaaaaaaaaaaaaaaaaaaaaaaaaaaaaaaaaaaaaaaaaaaaaaaaaa

SEQ ID NO: 23787 - RNA, 4182 nt, Artificial Sequence
  SARS-CoV-2/Wuhan/WIV05/2019__EPI_ISL_402128 spike protein mRNA gc (1-1273)(K986P_V987P_K986P_V987P_L18F_D80A_D215G_L242del_A243del_ L244del_R246I_K417N_E484K_N501Y_D614G_A701V)
aggagagggcgcuuggcuugcaaggacccugagcugcggcauugaagcacacccaacccaacucgacugaagucagccucacugaaccggaucugagaaucuucucucucugggcuugccagggcucuccgaaccuagcuagcauccucuucaauuccaacuagaaagcuuaccauguucguguuccuggugcugcugccccuggugagcagccagugcgugaacuucaccacccggacccagcugccaccagccuacaccaacagcuucacccggggcgucuacuaccccgacaagguguuccggagcagcguccugcacagcacccaggaccuguuccugcccuucuucagcaacgugaccugguuccacgccauccacgugagcggcaccaacggcaccaagcgguucgccaaccccgugcugcccuucaacgacggcguguacuucgccagcaccgagaagagcaacaucauccggggcuggaucuucggcaccacccuggacagcaagacccagagccugcugaucgugaauaacgccaccaacguggugaucaaggugugcgaguuccaguucugcaacgaccccuuccugggcguguacuaccacaagaacaacaagagcuggauggagagcgaguuccggguguacagcagcgccaacaacugcaccuucgaguacgugagccagcccuuccugauggaccuggagggcaagcagggcaacuucaagaaccugcgggaguucguguucaagaacaucgacggcuacuucaagaucuacagcaagcacaccccaaucaaccuggugcggggccugccccagggcuucucagcccuggagccccugguggaccugcccaucggcaucaacaucacccgguuccagacccugcacaucagcuaccugaccccaggcgacagcagcagcggguggacagcaggcgcggcugcuuacuacgugggcuaccugcagccccggaccuuccugcugaaguacaacgagaacggcaccaucaccgacgccguggacugcgcccuggacccucugagcgagaccaagugcacccugaagagcuucaccguggagaagggcaucuaccagaccagcaacuuccgggugcagcccaccgagagcaucgugcgguuccccaacaucaccaaccugugccccuucggcgagguguucaacgccacccgguucgccagcguguacgccuggaaccggaagcggaucagcaacugcguggccgacuacagcgugcuguacaacagcgccagcuucagcaccuucaagugcuacggcgugagccccaccaagcugaacgaccugugcuucaccaacguguacgccgacagcuucgugauccguggcgacgaggugcggcagaucgcacccggccagacaggcaacaucgccgacuacaacuacaagcugcccgacgacuucaccggcugcgugaucgccuggaacagcaacaaccucgacagcaaggugggcggcaacuacaacuaccuguaccggcuguuccggaagagcaaccugaagcccuucgagcgggacaucagcaccgagaucuaccaagccggcuccaccccuugcaacggcgugaagggcuucaacugcuacuucccucugcagagcuacggcuuccagcccaccuacggcgugggcuaccagcccuaccgggugguggugcugagcuucgagcugcugcacgccccagccaccguguguggccccaagaagagcaccaaccuggugaagaacaagugcgugaacuucaacuucaacggccuuaccggcaccggcgugcugaccgagagcaacaagaaauuccugcccuuucagcaguucggccgggacaucgccgacaccaccgacgcugugcgggauccccagacccuggagauccuggacaucaccccuugcagcuucggcggcgugagcgugaucaccccaggcaccaacaccagcaaccagguggccgugcuguaccagggcgugaacugcaccgaggugcccguggccauccacgccgaccagcugacacccaccuggcgggucuacagcaccggcagcaacguguuccagacccgggccgguugccugaucggcgccgagcacgugaacaacagcuacgagugcgacauccccaucggcgccggcaucugugccagcuaccagacccagaccaauucaccccggagggcaaggagcguggccagccagagcaucaucgccuacaccaugagccugggcguggagaacagcguggccuacagcaacaacagcaucgccauccccaccaacuucaccaucagcgugaccaccgagauucugcccgugagcaugaccaagaccagcguggacugcaccauguacaucugcggcgacagcaccgagugcagcaaccugcugcugcaguacggcagcuucugcacccagcugaaccgggcccugaccggcaucgccguggagcaggacaagaacacccaggagguguucgcccaggugaagcagaucuacaagaccccucccaucaaggacuucggcggcuucaacuucagccagauccugcccgaccccagcaagcccagcaagcggagcuucaucgaggaccugcuguucaacaaggugacccuagccgacgccggcuucaucaagcaguacggcgacugccucggcgacauagccgcccgggaccugaucugcgcccagaaguucaacggccugaccgugcugccuccccugcugaccgacgagaugaucgcccaguacaccagcgcccuguuagccggaaccaucaccagcggcuggacuuucggcgcuggagccgcucugcagauccccuucgccaugcagauggccuaccgguucaacggcaucggcgugacccagaacgugcuguacgagaaccagaagcugaucgccaaccaguucaacagcgccaucggcaagauccaggacagccugagcagcaccgcuagcgcccugggcaagcugcaggacguggugaaccagaacgcccaggcccugaacacccuggugaagcagcugagcagcaacuucggcgccaucagcagcgugcugaacgacauccugagccggcuggacccucccgaggccgaggugcagaucgaccggcugaucacuggccggcugcagagccugcagaccuacgugacccagcagcugauccgggccgccgagauucgggccagcgccaaccuggccgccaccaagaugagcgagugcgugcugggccagagcaagcggguggacuucugcggcaagggcuaccaccugaugagcuuuccccagagcgcaccccacggagugguguuccugcacgugaccuacgugcccgcccaggagaagaacuucaccaccgccccagccaucugccacgacggcaaggcccacuuuccccgggagggcguguucgugagcaacggcacccacugguucgugacccagcggaacuucuacgagccccagaucaucaccaccgacaacaccuucgugagcggcaacugcgacguggugaucggcaucgugaacaacaccguguacgauccccugcagcccgagcuggacagcuucaaggaggagcuggacaaguacuucaagaaucacaccagccccgacguggaccugggcgacaucagcggcaucaacgccagcguggugaacauccagaaggagaucgaucggcugaacgagguggccaagaaccugaacgagagccugaucgaccugcaggagcugggcaaguacgagcaguacaucaaguggcccugguacaucuggcugggcuucaucgccggccugaucgccaucgugauggugaccaucaugcugugcugcaugaccagcugcugcagcugccugaagggcuguugcagcugcggcagcugcugcaaguucgacgaggacgacagcgagcccgugcugaagggcgugaagcugcacuacaccugaggacuagucccuguucccagagcccacuuuuuuuucuuuuuuugaaauaaaauagccugucuuucagaucucaaaggcucuuuucagagccaccaaaaaaaaaaaaaaaaaaaaaaaaaaaaaaaaaaaaaaaaaaaaaaaaaaaaaaaaaaaaaaaaaaaaaaaaaaaaaaaaaaaaaaaaaaaaaaaaaaaaa

SEQ ID NO: 23788 - RNA, 4191 nt, Artificial Sequence
  SARS-CoV-2/Wuhan/WIV05/2019__EPI_ISL_402128 spike protein mRNA gc (1-1273)(K986P_V987P_K986P_V987P_E484K_D614G)
aggagagggcgcuuggcuugcaaggacccugagcugcggcauugaagcacacccaacccaacucgacugaagucagccucacugaaccggaucugagaaucuucucucucugggcuugccagggcucuccgaaccuagcuagcauccucuucaauuccaacuagaaagcuuaccauguucguguuccuggugcugcugccccuggugagcagccagugcgugaaccugaccacccggacccagcugccaccagccuacaccaacagcuucacccggggcgucuacuaccccgacaagguguuccggagcagcguccugcacagcacccaggaccuguuccugcccuucuucagcaacgugaccugguuccacgccauccacgugagcggcaccaacggcaccaagcgguucgacaaccccgugcugcccuucaacgacggcguguacuucgccagcaccgagaagagcaacaucauccggggcuggaucuucggcaccacccuggacagcaagacccagagccugcugaucgugaauaacgccaccaacguggugaucaaggugugcgaguuccaguucugcaacgaccccuuccugggcguguacuaccacaagaacaacaagagcuggauggagagcgaguuccggguguacagcagcgccaacaacugcaccuucgaguacgugagccagcccuuccugauggaccuggagggcaagcagggcaacuucaagaaccugcgggaguucguguucaagaacaucgacggcuacuucaagaucuacagcaagcacaccccaaucaaccuggugcgggaucugccccagggcuucucagcccuggagccccugguggaccugcccaucggcaucaacaucacccgguuccagacccugcuggcccugcaccggagcuaccugaccccaggcgacagcagcagcggguggacagcaggcgcggcugcuuacuacgugggcuaccugcagccccggaccuuccugcugaaguacaacgagaacggcaccaucaccgacgccguggacugcgcccuggacccucugagcgagaccaagugcacccugaagagcuucaccguggagaagggcaucuaccagaccagcaacuuccgggugcagcccaccgagagcaucgugcgguuccccaacaucaccaaccugugccccuucggcgagguguucaacgccacccgguucgccagcguguacgccuggaaccggaagcggaucagcaacugcguggccgacuacagcgugcuguacaacagcgccagcuucagcaccuucaagugcuacggcgugagccccaccaagcugaacgaccugugcuucaccaacguguacgccgacagcuucgugauccguggcgacgaggugcggcagaucgcacccggccagacaggcaagaucgccgacuacaacuacaagcugcccgacgacuucaccggcugcgugaucgccuggaacagcaacaaccucgacagcaaggugggcggcaacuacaacuaccuguaccggcuguuccggaagagcaaccugaagcccuucgagcgggacaucagcaccgagaucuaccaagccggcuccaccccuugcaacggcgugaagggcuucaacugcuacuucccucugcagagcuacggcuuccagcccaccaacggcgugggcuaccagcccuaccgggugguggugcugagcuucgagcugcugcacgccccagccaccguguguggccccaagaagagcaccaaccuggugaagaacaagugcgugaacuucaacuucaacggccuuaccggcaccggcgugcugaccgagagcaacaagaaauuccugcccuuucagcaguucggccgggacaucgccgacaccaccgacgcugugcgggauccccagacccuggagauccuggacaucaccccuugcagcuucggcggcgugagcgugaucaccccaggcaccaacaccagcaaccagguggccgugcuguaccagggcgugaacugcaccgaggugcccguggccauccacgccgaccagcugacacccaccuggcgggucuacagcaccggcagcaacguguuccagacccgggccgguugccugaucggcgccgagcacgugaacaacagcuacgagugcgacauccccaucggcgccggcaucugugccagcuaccagacccagaccaauucaccccggagggcaaggagcguggccagccagagcaucaucgccuacaccaugagccugggcgccgagaacagcguggccuacagcaacaacagcaucgccauccccaccaacuucaccaucagcgugaccaccgagauucugcccgugagcaugaccaagaccagcguggacugcaccauguacaucugcggcgacagcaccgagugcagcaaccugcugcugcaguacggcagcuucugcacccagcugaaccgggcccugaccggcaucgccguggagcaggacaagaacacccaggagguguucgcccaggugaagcagaucuacaagaccccucccaucaaggacuucggcggcuucaacuucagccagauccugcccgaccccagcaagcccagcaagcggagcuucaucgaggaccugcuguucaacaaggugacccuagccgacgccggcuucaucaagcaguacggcgacugccucggcgacauagccgcccgggaccugaucugcgcccagaaguucaacggccugaccgugcugccuccccugcugaccgacgagaugaucgcccaguacaccagcgcccuguuagccggaaccaucaccagcggcuggacuuucggcgcuggagccgcucugcagauccccuucgccaugcagauggccuaccgguucaacggcaucggcgugacccagaacgugcuguacgagaaccagaagcugaucgccaaccaguucaacagcgccaucggcaagauccaggacagccugagcagcaccgcuagcgcccugggcaagcugcaggacguggugaaccagaacgcccaggcccugaacacccuggugaagcagcugagcagcaacuucggcgccaucagcagcgugcugaacgacauccugagccggcuggacccucccgaggccgaggugcagaucgaccggcugaucacuggccggcugcagagccugcagaccuacgugacccagcagcugauccgggccgccgagauucgggccagcgccaaccuggccgccaccaagaugagcgagugcgugcugggccagagcaagcggguggacuucugcggcaagggcuaccaccugaugagcuuuccccagagcgcaccccacggagugguguuccugcacgugaccuacgugcccgcccaggagaagaacuucaccaccgccccagccaucugccacgacggcaaggcccacuuuccccgggagggcguguucgugagcaacggcacccacugguucgugacccagcggaacuucuacgagccccagaucaucaccaccgacaacaccuucgugagcggcaacugcgacguggugaucggcaucgugaacaacaccguguacgauccccugcagcccgagcuggacagcuucaaggaggagcuggacaaguacuucaagaaucacaccagccccgacguggaccugggcgacaucagcggcaucaacgccagcguggugaacauccagaaggagaucgaucggcugaacgagguggccaagaaccugaacgagagccugaucgaccugcaggagcugggcaaguacgagcaguacaucaaguggcccugguacaucuggcugggcuucaucgccggccugaucgccaucgugauggugaccaucaugcugugcugcaugaccagcugcugcagcugccugaagggcuguugcagcugcggcagcugcugcaaguucgacgaggacgacagcgagcccgugcugaagggcgugaagcugcacuacaccugaggacuagucccuguucccagagcccacuuuuuuuucuuuuuuugaaauaaaauagccugucuuucagaucucaaaggcucuuuucagagccaccaaaaaaaaaaaaaaaaaaaaaaaaaaaaaaaaaaaaaaaaaaaaaaaaaaaaaaaaaaaaaaaaaaaaaaaaaaaaaaaaaaaaaaaaaaaaaaaaaaaaa

SEQ ID NO: 23789 - RNA, 4191 nt, Artificial Sequence
  SARS-CoV-2/Wuhan/WIV05/2019__EPI_ISL_402128 spike protein mRNA gc (1-1273)(K986P_V987P_K986P_V987P_L18F_T20N_P26S_D138Y_R190S_K417T _E484K_N501Y_D614G_H655Y_T1027I)
aggagagggcgcuuggcuugcaaggacccugagcugcggcauugaagcacacccaacccaacucgacugaagucagccucacugaaccggaucugagaaucuucucucucugggcuugccagggcucuccgaaccuagcuagcauccucuucaauuccaacuagaaagcuuaccauguucguguuccuggugcugcugccccuggugagcagccagugcgugaacuucaccaaccggacccagcugccaagcgccuacaccaacagcuucacccggggcgucuacuaccccgacaagguguuccggagcagcguccugcacagcacccaggaccuguuccugcccuucuucagcaacgugaccugguuccacgccauccacgugagcggcaccaacggcaccaagcgguucgacaaccccgugcugcccuucaacgacggcguguacuucgccagcaccgagaagagcaacaucauccggggcuggaucuucggcaccacccuggacagcaagacccagagccugcugaucgugaauaacgccaccaacguggugaucaaggugugcgaguuccaguucugcaacuaccccuuccugggcguguacuaccacaagaacaacaagagcuggauggagagcgaguuccggguguacagcagcgccaacaacugcaccuucgaguacgugagccagcccuuccugauggaccuggagggcaagcagggcaacuucaagaaccugagcgaguucguguucaagaacaucgacggcuacuucaagaucuacagcaagcacaccccaaucaaccuggugcgggaucugccccagggcuucucagcccuggagccccugguggaccugcccaucggcaucaacaucacccgguuccagacccugcuggcccugcaccggagcuaccugaccccaggcgacagcagcagcggguggacagcaggcgcggcugcuuacuacgugggcuaccugcagccccggaccuuccugcugaaguacaacgagaacggcaccaucaccgacgccguggacugcgcccuggacccucugagcgagaccaagugcacccugaagagcuucaccguggagaagggcaucuaccagaccagcaacuuccgggugcagcccaccgagagcaucgugcgguuccccaacaucaccaaccugugccccuucggcgagguguucaacgccacccgguucgccagcguguacgccuggaaccggaagcggaucagcaacugcguggccgacuacagcgugcuguacaacagcgccagcuucagcaccuucaagugcuacggcgugagccccaccaagcugaacgaccugugcuucaccaacguguacgccgacagcuucgugauccguggcgacgaggugcggcagaucgcacccggccagacaggcaccaucgccgacuacaacuacaagcugcccgacgacuucaccggcugcgugaucgccuggaacagcaacaaccucgacagcaaggugggcggcaacuacaacuaccuguaccggcuguuccggaagagcaaccugaagcccuucgagcgggacaucagcaccgagaucuaccaagccggcuccaccccuugcaacggcgugaagggcuucaacugcuacuucccucugcagagcuacggcuuccagcccaccuacggcgugggcuaccagcccuaccgggugguggugcugagcuucgagcugcugcacgccccagccaccguguguggccccaagaagagcaccaaccuggugaagaacaagugcgugaacuucaacuucaacggccuuaccggcaccggcgugcugaccgagagcaacaagaaauuccugcccuuucagcaguucggccgggacaucgccgacaccaccgacgcugugcgggauccccagacccuggagauccuggacaucaccccuugcagcuucggcggcgugagcgugaucaccccaggcaccaacaccagcaaccagguggccgugcuguaccagggcgugaacugcaccgaggugcccguggccauccacgccgaccagcugacacccaccuggcgggucuacagcaccggcagcaacguguuccagacccgggccgguugccugaucggcgccgaguacgugaacaacagcuacgagugcgacauccccaucggcgccggcaucugugccagcuaccagacccagaccaauucaccccggagggcaaggagcguggccagccagagcaucaucgccuacaccaugagccugggcgccgagaacagcguggccuacagcaacaacagcaucgccauccccaccaacuucaccaucagcgugaccaccgagauucugcccgugagcaugaccaagaccagcguggacugcaccauguacaucugcggcgacagcaccgagugcagcaaccugcugcugcaguacggcagcuucugcacccagcugaaccgggcccugaccggcaucgccguggagcaggacaagaacacccaggagguguucgcccaggugaagcagaucuacaagaccccucccaucaaggacuucggcggcuucaacuucagccagauccugcccgaccccagcaagcccagcaagcggagcuucaucgaggaccugcuguucaacaaggugacccuagccgacgccggcuucaucaagcaguacggcgacugccucggcgacauagccgcccgggaccugaucugcgcccagaaguucaacggccugaccgugcugccuccccugcugaccgacgagaugaucgcccaguacaccagcgcccuguuagccggaaccaucaccagcggcuggacuuucggcgcuggagccgcucugcagauccccuucgccaugcagauggccuaccgguucaacggcaucggcgugacccagaacgugcuguacgagaaccagaagcugaucgccaaccaguucaacagcgccaucggcaagauccaggacagccugagcagcaccgcuagcgcccugggcaagcugcaggacguggugaaccagaacgcccaggcccugaacacccuggugaagcagcugagcagcaacuucggcgccaucagcagcgugcugaacgacauccugagccggcuggacccucccgaggccgaggugcagaucgaccggcugaucacuggccggcugcagagccugcagaccuacgugacccagcagcugauccgggccgccgagauucgggccagcgccaaccuggccgccaucaagaugagcgagugcgugcugggccagagcaagcggguggacuucugcggcaagggcuaccaccugaugagcuuuccccagagcgcaccccacggagugguguuccugcacgugaccuacgugcccgcccaggagaagaacuucaccaccgccccagccaucugccacgacggcaaggcccacuuuccccgggagggcguguucgugagcaacggcacccacugguucgugacccagcggaacuucuacgagccccagaucaucaccaccgacaacaccuucgugagcggcaacugcgacguggugaucggcaucgugaacaacaccguguacgauccccugcagcccgagcuggacagcuucaaggaggagcuggacaaguacuucaagaaucacaccagccccgacguggaccugggcgacaucagcggcaucaacgccagcguggugaacauccagaaggagaucgaucggcugaacgagguggccaagaaccugaacgagagccugaucgaccugcaggagcugggcaaguacgagcaguacaucaaguggcccugguacaucuggcugggcuucaucgccggccugaucgccaucgugauggugaccaucaugcugugcugcaugaccagcugcugcagcugccugaagggcuguugcagcugcggcagcugcugcaaguucgacgaggacgacagcgagcccgugcugaagggcgugaagcugcacuacaccugaggacuagucccuguucccagagcccacuuuuuuuucuuuuuuugaaauaaaauagccugucuuucagaucucaaaggcucuuuucagagccaccaaaaaaaaaaaaaaaaaaaaaaaaaaaaaaaaaaaaaaaaaaaaaaaaaaaaaaaaaaaaaaaaaaaaaaaaaaaaaaaaaaaaaaaaaaaaaaaaaaaaa

SEQ ID NO: 23790 - RNA, 4191 nt, Artificial Sequence
  SARS-CoV-2/Wuhan/WIV05/2019__EPI_ISL_402128 spike protein mRNA gc (1-1273)(K986P_V987P_K986P_V987P_S13I_W152C_L452R_D614G)
aggagagggcgcuuggcuugcaaggacccugagcugcggcauugaagcacacccaacccaacucgacugaagucagccucacugaaccggaucugagaaucuucucucucugggcuugccagggcucuccgaaccuagcuagcauccucuucaauuccaacuagaaagcuuaccauguucguguuccuggugcugcugccccuggugagcauccagugcgugaaccugaccacccggacccagcugccaccagccuacaccaacagcuucacccggggcgucuacuaccccgacaagguguuccggagcagcguccugcacagcacccaggaccuguuccugcccuucuucagcaacgugaccugguuccacgccauccacgugagcggcaccaacggcaccaagcgguucgacaaccccgugcugcccuucaacgacggcguguacuucgccagcaccgagaagagcaacaucauccggggcuggaucuucggcaccacccuggacagcaagacccagagccugcugaucgugaauaacgccaccaacguggugaucaaggugugcgaguuccaguucugcaacgaccccuuccugggcguguacuaccacaagaacaacaagagcugcauggagagcgaguuccggguguacagcagcgccaacaacugcaccuucgaguacgugagccagcccuuccugauggaccuggagggcaagcagggcaacuucaagaaccugcgggaguucguguucaagaacaucgacggcuacuucaagaucuacagcaagcacaccccaaucaaccuggugcgggaucugccccagggcuucucagcccuggagccccugguggaccugcccaucggcaucaacaucacccgguuccagacccugcuggcccugcaccggagcuaccugaccccaggcgacagcagcagcggguggacagcaggcgcggcugcuuacuacgugggcuaccugcagccccggaccuuccugcugaaguacaacgagaacggcaccaucaccgacgccguggacugcgcccuggacccucugagcgagaccaagugcacccugaagagcuucaccguggagaagggcaucuaccagaccagcaacuuccgggugcagcccaccgagagcaucgugcgguuccccaacaucaccaaccugugccccuucggcgagguguucaacgccacccgguucgccagcguguacgccuggaaccggaagcggaucagcaacugcguggccgacuacagcgugcuguacaacagcgccagcuucagcaccuucaagugcuacggcgugagccccaccaagcugaacgaccugugcuucaccaacguguacgccgacagcuucgugauccguggcgacgaggugcggcagaucgcacccggccagacaggcaagaucgccgacuacaacuacaagcugcccgacgacuucaccggcugcgugaucgccuggaacagcaacaaccucgacagcaaggugggcggcaacuacaacuaccgcuaccggcuguuccggaagagcaaccugaagcccuucgagcgggacaucagcaccgagaucuaccaagccggcuccaccccuugcaacggcguggagggcuucaacugcuacuucccucugcagagcuacggcuuccagcccaccaacggcgugggcuaccagcccuaccgggugguggugcugagcuucgagcugcugcacgccccagccaccguguguggccccaagaagagcaccaaccuggugaagaacaagugcgugaacuucaacuucaacggccuuaccggcaccggcgugcugaccgagagcaacaagaaauuccugcccuuucagcaguucggccgggacaucgccgacaccaccgacgcugugcgggauccccagacccuggagauccuggacaucaccccuugcagcuucggcggcgugagcgugaucaccccaggcaccaacaccagcaaccagguggccgugcuguaccagggcgugaacugcaccgaggugcccguggccauccacgccgaccagcugacacccaccuggcgggucuacagcaccggcagcaacguguuccagacccgggccgguugccugaucggcgccgagcacgugaacaacagcuacgagugcgacauccccaucggcgccggcaucugugccagcuaccagacccagaccaauucaccccggagggcaaggagcguggccagccagagcaucaucgccuacaccaugagccugggcgccgagaacagcguggccuacagcaacaacagcaucgccauccccaccaacuucaccaucagcgugaccaccgagauucugcccgugagcaugaccaagaccagcguggacugcaccauguacaucugcggcgacagcaccgagugcagcaaccugcugcugcaguacggcagcuucugcacccagcugaaccgggcccugaccggcaucgccguggagcaggacaagaacacccaggagguguucgcccaggugaagcagaucuacaagaccccucccaucaaggacuucggcggcuucaacuucagccagauccugcccgaccccagcaagcccagcaagcggagcuucaucgaggaccugcuguucaacaaggugacccuagccgacgccggcuucaucaagcaguacggcgacugccucggcgacauagccgcccgggaccugaucugcgcccagaaguucaacggccugaccgugcugccuccccugcugaccgacgagaugaucgcccaguacaccagcgcccuguuagccggaaccaucaccagcggcuggacuuucggcgcuggagccgcucugcagauccccuucgccaugcagauggccuaccgguucaacggcaucggcgugacccagaacgugcuguacgagaaccagaagcugaucgccaaccaguucaacagcgccaucggcaagauccaggacagccugagcagcaccgcuagcgcccugggcaagcugcaggacguggugaaccagaacgcccaggcccugaacacccuggugaagcagcugagcagcaacuucggcgccaucagcagcgugcugaacgacauccugagccggcuggacccucccgaggccgaggugcagaucgaccggcugaucacuggccggcugcagagccugcagaccuacgugacccagcagcugauccgggccgccgagauucgggccagcgccaaccuggccgccaccaagaugagcgagugcgugcugggccagagcaagcggguggacuucugcggcaagggcuaccaccugaugagcuuuccccagagcgcaccccacggagugguguuccugcacgugaccuacgugcccgcccaggagaagaacuucaccaccgccccagccaucugccacgacggcaaggcccacuuuccccgggagggcguguucgugagcaacggcacccacugguucgugacccagcggaacuucuacgagccccagaucaucaccaccgacaacaccuucgugagcggcaacugcgacguggugaucggcaucgugaacaacaccguguacgauccccugcagcccgagcuggacagcuucaaggaggagcuggacaaguacuucaagaaucacaccagccccgacguggaccugggcgacaucagcggcaucaacgccagcguggugaacauccagaaggagaucgaucggcugaacgagguggccaagaaccugaacgagagccugaucgaccugcaggagcugggcaaguacgagcaguacaucaaguggcccugguacaucuggcugggcuucaucgccggccugaucgccaucgugauggugaccaucaugcugugcugcaugaccagcugcugcagcugccugaagggcuguugcagcugcggcagcugcugcaaguucgacgaggacgacagcgagcccgugcugaagggcgugaagcugcacuacaccugaggacuagucccuguucccagagcccacuuuuuuuucuuuuuuugaaauaaaauagccugucuuucagaucucaaaggcucuuuucagagccaccaaaaaaaaaaaaaaaaaaaaaaaaaaaaaaaaaaaaaaaaaaaaaaaaaaaaaaaaaaaaaaaaaaaaaaaaaaaaaaaaaaaaaaaaaaaaaaaaaaaaa

SEQ ID NO: 23791 - RNA, 4191 nt, Artificial Sequence
  SARS-CoV-2/Wuhan/WIV05/2019__EPI_ISL_402128 spike protein mRNA gc (1-1273)(K986P_V987P)
aggagagggcgcuuggcuugcaaggacccugagcugcggcauugaagcacacccaacccaacucgacugaagucagccucacugaaccggaucugagaaucuucucucucugggcuugccagggcucuccgaaccuagcuagcauccucuucaauuccaacuagaaagcuuaccauguucguguuccuggugcugcugccccuggugagcagccagugcgugaaccugaccacccggacccagcugcccccugccuacaccaacagcuucacccggggcguguacuaccccgacaagguguuccggagcagcgugcugcacagcacccaggaccuguuccugcccuucuucagcaacgugaccugguuccacgccauccacgugagcggcaccaacggcaccaagcgguucgacaacccagugcugcccuucaacgacggcguguacuucgccagcaccgagaagucaaacaucauccggggcuggaucuucggcaccacccuggacagcaagacacagagccugcugaucgugaacaacgccaccaacguggugaucaaggugugcgaguuucaguucugcaacgaccccuuccugggcguguacuaccacaagaacaacaagagcuggauggagagcgaguuccgggucuacagcagcgcuaacaauugcaccuucgaguacgugagccagcccuuccugauggaccucgagggcaagcagggcaacuucaagaaccugcgggaguucguguucaagaacaucgauggcuacuucaagaucuacagcaagcacacccccaucaaccuggugcgggaccugccccagggauucagcgcccuggagccucugguggaccugcccaucggcaucaacaucaccagguuccagacccugcuggcccugcaccggagcuaccugacccccggcgacagcagcagcggcuggaccgccggcgccgccgcauacuacgugggcuaccugcagccacggaccuuccugcugaaguacaacgagaacggcaccaucaccgacgccguggacugcgcccuggacccccugagcgagaccaagugcacccuaaagagcuucaccguggagaagggcaucuaccagaccagcaacuuccgggugcagcccacugagagcaucgugcgguuccccaacauuaccaaccugugucccuucggcgagguguucaacgccacccgguucgccagcguguacgccuggaaccggaagcggaucagcaacugcguggccgacuacagcgugcuguacaacagcgccagcuucagcaccuucaagugcuacggcgugagcccuaccaagcugaacgaccugugcuucaccaacguguacgcugacagcuucgugauccggggcgacgaggugcggcagaucgcccccggccagaccggcaagaucgccgacuacaacuacaagcugcccgacgacuucaccggcugcgugaucgccuggaacagcaacaaccuggacagcaaggugggcggcaacuacaacuaccuguaccggcuguuccguaagagcaaccugaagccauucgagcgggacaucagcaccgagaucuaccaggccggcagcacccccugcaacgguguggagggcuuuaacugcuacuucccccugcagagcuacggcuuccagcccaccaacggcgugggcuaccagcccuaccgggugguggugcugagcuucgagcugcugcacgcccccgccaccgugugcggcccuaaaaagagcaccaaccuggugaagaacaagugcgugaacuucaauuucaacggccugaccggcaccggcgugcugaccgagagcaacaagaaguuccugcccuuccagcaguucggccgggauaucgccgacaccaccgacgcagugcgggacccccagacccuggagauccuggacaucaccccaugcagcuucggcggcgugagcgucaucacccccggcacaaacaccagcaaccagguggccgugcuguaccaggacgugaacugcaccgaggugcccguggccauccacgccgaccagcugacccccaccuggcggguguacagcaccggaagcaacguguuccagacccgggccggcugccugaucggcgccgagcacgugaacaacuccuacgagugcgacauccccaucggcgcuggcaucugcgccagcuaccagacccagaccaacagcccccggcgggcccggagcguggccagccagagcaucaucgccuacaccaugagcuuaggcgccgagaacagcguggccuacagcaacaacagcaucgcgaucccuaccaacuucaccaucagcgugaccaccgagauacugcccgugagcaugaccaagaccagcguggacuguaccauguacaucugcggcgacagcaccgagugcagcaaccugcugcugcaguacggcagcuucugcacccagcugaaccgggcccugaccggcaucgccguggagcaggacaagaacacccaagagguguucgcccaggugaagcagaucuacaagacucccccaaucaaggacuucggcggcuucaacuucagccagauccugcccgaccccagcaagcccagcaagcggagcuucaucgaggaccugcuguucaacaaggugacccuggccgacgccggcuucaucaagcaguacggcgauugccugggcgacaucgccgcucgggaccugaucugcgcccagaaguucaacgggcugaccgugcugcccccucugcugaccgacgagaugaucgcccaguacaccagcgcccugcuugccggcaccaucaccagcggcuggaccuucggcgccggcgcagcccugcagauccccuucgccaugcagauggccuaccgguucaacggcaucggcgugacccagaacgugcuguacgagaaccagaagcugaucgccaaccaguucaacagcgccaucggcaagauccaggacagccugagcagcaccgccagcgcccugggcaagcugcaggacguggugaaccagaacgcucaggcccugaacacccuggugaagcagcugagcagcaacuucggcgccaucagcucagugcugaaugacauccugagcaggcuggaucccccagaggccgaggugcagaucgaccggcugaucaccggccggcugcagagccugcagaccuacgugacccagcagcugauccgggccgccgagauccgggccagcgccaaccuggcagccaccaagaugagcgagugcgugcugggccagagcaagcggguggacuuuugcggcaagggcuaccaccugaugagcuucccccagagcgcuccccacggcgugguguuccuccacgugacauacguccccgcccaggagaagaacuucaccaccgcccccgccauuugccacgacggcaaggcccacuucccccgggagggcguguucgugagcaacggaacccacugguucgugacccagcggaacuucuacgagccucagaucaucaccaccgacaacaccuucgugagcggcaacugcgacguggugaucggcaucgugaacaacaccguguacgacccccugcagcccgagcuggacagcuucaaggaggagcuggacaaguacuucaagaaccacaccagcccagacguggaccugggcgacaucagcggcaucaacgccagcguggugaacauccagaaggagaucgaccggcugaacgagguggccaagaaccugaacgagagccugaucgaccugcaggagcugggcaaguacgagcaguacaucaaguggcccugguacaucuggcugggcuucaucgccggccugaucgccaucgugauggugaccaucaugcugugcugcaugaccagcugcuguagcugccugaagggcugcugcagcugcggcagcugcugcaaguucgacgaggacgacagcgagcccgugcugaagggcgugaagcugcacuacaccugaggacuagucccuguucccagagcccacuuuuuuuucuuuuuuugaaauaaaauagccugucuuucagaucucaaaggcucuuuucagagccaccaaaaaaaaaaaaaaaaaaaaaaaaaaaaaaaaaaaaaaaaaaaaaaaaaaaaaaaaaaaaaaaaaaaaaaaaaaaaaaaaaaaaaaaaaaaaaaaaaaaaa

SEQ ID NO: 23792 - RNA, 4191 nt, Artificial Sequence
  SARS-CoV-2/Wuhan/WIV05/2019__EPI_ISL_402128 spike protein mRNA gc (1-1273)(K986P_V987P_ D614G)
aggagagggcgcuuggcuugcaaggacccugagcugcggcauugaagcacacccaacccaacucgacugaagucagccucacugaaccggaucugagaaucuucucucucugggcuugccagggcucuccgaaccuagcuagcauccucuucaauuccaacuagaaagcuuaccauguucguguuccuggugcugcugccccuggugagcagccagugcgugaaccugaccacccggacccagcugcccccugccuacaccaacagcuucacccggggcguguacuaccccgacaagguguuccggagcagcgugcugcacagcacccaggaccuguuccugcccuucuucagcaacgugaccugguuccacgccauccacgugagcggcaccaacggcaccaagcgguucgacaacccagugcugcccuucaacgacggcguguacuucgccagcaccgagaagucaaacaucauccggggcuggaucuucggcaccacccuggacagcaagacacagagccugcugaucgugaacaacgccaccaacguggugaucaaggugugcgaguuucaguucugcaacgaccccuuccugggcguguacuaccacaagaacaacaagagcuggauggagagcgaguuccgggucuacagcagcgcuaacaauugcaccuucgaguacgugagccagcccuuccugauggaccucgagggcaagcagggcaacuucaagaaccugcgggaguucguguucaagaacaucgauggcuacuucaagaucuacagcaagcacacccccaucaaccuggugcgggaccugccccagggauucagcgcccuggagccucugguggaccugcccaucggcaucaacaucaccagguuccagacccugcuggcccugcaccggagcuaccugacccccggcgacagcagcagcggcuggaccgccggcgccgccgcauacuacgugggcuaccugcagccacggaccuuccugcugaaguacaacgagaacggcaccaucaccgacgccguggacugcgcccuggacccccugagcgagaccaagugcacccuaaagagcuucaccguggagaagggcaucuaccagaccagcaacuuccgggugcagcccacugagagcaucgugcgguuccccaacauuaccaaccugugucccuucggcgagguguucaacgccacccgguucgccagcguguacgccuggaaccggaagcggaucagcaacugcguggccgacuacagcgugcuguacaacagcgccagcuucagcaccuucaagugcuacggcgugagcccuaccaagcugaacgaccugugcuucaccaacguguacgcugacagcuucgugauccggggcgacgaggugcggcagaucgcccccggccagaccggcaagaucgccgacuacaacuacaagcugcccgacgacuucaccggcugcgugaucgccuggaacagcaacaaccuggacagcaaggugggcggcaacuacaacuaccuguaccggcuguuccguaagagcaaccugaagccauucgagcgggacaucagcaccgagaucuaccaggccggcagcacccccugcaacgguguggagggcuuuaacugcuacuucccccugcagagcuacggcuuccagcccaccaacggcgugggcuaccagcccuaccgggugguggugcugagcuucgagcugcugcacgcccccgccaccgugugcggcccuaaaaagagcaccaaccuggugaagaacaagugcgugaacuucaauuucaacggccugaccggcaccggcgugcugaccgagagcaacaagaaguuccugcccuuccagcaguucggccgggauaucgccgacaccaccgacgcagugcgggacccccagacccuggagauccuggacaucaccccaugcagcuucggcggcgugagcgucaucacccccggcacaaacaccagcaaccagguggccgugcuguaccagggagugaacugcaccgaggugcccguggccauccacgccgaccagcugacccccaccuggcggguguacagcaccggcagcaacguguuccagacccgggccggcugccugaucggcgccgagcacgugaacaacuccuacgagugcgacauccccaucggcgcuggcaucugcgccagcuaccagacccagaccaacagcccccggcgggcccggagcguggccagccagagcaucaucgccuacaccaugagcuuaggcgccgagaacagcguggccuacagcaacaacagcaucgcgaucccuaccaacuucaccaucagcgugaccaccgagauacugcccgugagcaugaccaagaccagcguggacuguaccauguacaucugcggcgacagcaccgagugcagcaaccugcugcugcaguacggcagcuucugcacccagcugaaccgggcccugaccggcaucgccguggagcaggacaagaacacccaagagguguucgcccaggugaagcagaucuacaagacucccccaaucaaggacuucggcggcuucaacuucagccagauccugcccgaccccagcaagcccagcaagcggagcuucaucgaggaccugcuguucaacaaggugacccuggccgacgccggcuucaucaagcaguacggcgacugccugggggauaucgccgcucgggaccugaucugcgcccagaaguucaacggccugaccgugcugcccccucugcugaccgacgagaugaucgcccaguacaccagcgcccugcuugccggcaccaucaccagcggcuggaccuucggcgccggcgcagcccugcagauccccuucgccaugcagauggccuaccgguucaacggcaucggcgugacccagaacgugcuguacgagaaccagaagcugaucgccaaccaguucaacagcgccaucggcaagauccaggacagccugagcagcaccgccagcgcccugggcaagcugcaggacguggugaaccagaacgcucaggcccugaacacccuggugaagcagcugagcagcaacuucggcgccaucagcucagugcugaaugacauccugagcaggcuggaucccccagaggccgaggugcagaucgaccggcugaucaccggccggcugcagagccugcagaccuacgugacccagcagcugauccgggccgccgagauccgggccagcgccaaccuggcagccaccaagaugagcgagugcgugcugggccagagcaagcggguggacuuuugcggcaagggcuaccaccugaugagcuucccccagagcgcuccccacggcgugguguuccuccacgugacauacguccccgcccaggagaagaacuucaccaccgcccccgccauuugccacgacggcaaggcccacuucccccgggagggaguguucgugagcaacggcacccacugguucgugacccagcggaacuucuacgagccucagaucaucaccaccgacaacaccuucgugagcggcaacugcgacguggugaucggcaucgugaacaacaccguguacgacccccugcagcccgagcuggacagcuucaaggaggagcuggacaaguacuucaagaaccacaccagcccagacguggaccugggcgacaucagcggcaucaacgccagcguggugaacauccagaaggagaucgaccggcugaacgagguggccaagaaccugaacgagagccugaucgaccugcaggagcugggcaaguacgagcaguacaucaaguggcccugguacaucuggcugggcuucaucgccggccugaucgccaucgugauggugaccaucaugcugugcugcaugaccagcugcuguagcugccugaagggcugcugcagcugcggcagcugcugcaaguucgacgaggacgacagcgagcccgugcugaagggcgugaagcugcacuacaccugaggacuagucccuguucccagagcccacuuuuuuuucuuuuuuugaaauaaaauagccugucuuucagaucucaaaggcucuuuucagagccaccaaaaaaaaaaaaaaaaaaaaaaaaaaaaaaaaaaaaaaaaaaaaaaaaaaaaaaaaaaaaaaaaaaaaaaaaaaaaaaaaaaaaaaaaaaaaaaaaaaaaa

SEQ ID NO: 23793 - RNA, 4191 nt, Artificial Sequence
  SARS-CoV-2/Wuhan/WIV05/2019__EPI_ISL_402128 spike protein mRNA gc (1-1273)(K986P_V987P_A222V_D614G)
aggagagggcgcuuggcuugcaaggacccugagcugcggcauugaagcacacccaacccaacucgacugaagucagccucacugaaccggaucugagaaucuucucucucugggcuugccagggcucuccgaaccuagcuagcauccucuucaauuccaacuagaaagcuuaccauguucguguuccuggugcugcugccccuggugagcagccagugcgugaaccugaccacccggacccagcugcccccugccuacaccaacagcuucacccggggcguguacuaccccgacaagguguuccggagcagcgugcugcacagcacccaggaccuguuccugcccuucuucagcaacgugaccugguuccacgccauccacgugagcggcaccaacggcaccaagcgguucgacaacccagugcugcccuucaacgacggcguguacuucgccagcaccgagaagucaaacaucauccggggcuggaucuucggcaccacccuggacagcaagacacagagccugcugaucgugaacaacgccaccaacguggugaucaaggugugcgaguuucaguucugcaacgaccccuuccugggcguguacuaccacaagaacaacaagagcuggauggagagcgaguuccgggucuacagcagcgcuaacaauugcaccuucgaguacgugagccagcccuuccugauggaccucgagggcaagcagggcaacuucaagaaccugcgggaguucguguucaagaacaucgauggcuacuucaagaucuacagcaagcacacccccaucaaccuggugcgggaccugccccagggauucagcgugcuggagccucugguggaccugcccaucggcaucaacaucaccagguuccagacccugcuggcccugcaccggagcuaccugacccccggcgacagcagcagcggcuggaccgccggcgccgccgccuacuacgugggcuaccugcagccacggaccuuccugcugaaguacaacgagaacggcaccaucaccgacgcaguggacugcgcccuggacccccugagcgagaccaagugcacccuaaagagcuucaccguggagaagggcaucuaccagaccagcaacuuccgggugcagcccacugagagcaucgugcgguuccccaacauuaccaaccugugucccuucggcgagguguucaacgccacccgguucgccagcguguacgccuggaaccggaagcggaucagcaacugcguggccgacuacagcgugcuguacaacagcgccagcuucagcaccuucaagugcuacggcgugagcccuaccaagcugaacgaccugugcuucaccaacguguacgccgacagcuucgugauccggggcgacgaggugcggcagaucgcucccggccagaccggcaagaucgccgacuacaacuacaagcugcccgacgacuucaccggcugcgugaucgccuggaacagcaacaaccuggacagcaaggugggcggcaacuacaacuaccuguaccggcuguuccguaagagcaaccugaagccauucgagcgggacaucagcaccgagaucuaccaggccggcagcacccccugcaacgguguggagggcuuuaacugcuacuucccccugcagagcuacggcuuccagcccaccaacggcgugggcuaccagcccuaccgggugguggugcugagcuucgagcugcugcacgcccccgccaccgugugcggcccuaaaaagagcaccaaccuggugaagaacaagugcgugaacuucaauuucaacggccugaccggcaccggcgugcugaccgagagcaacaagaaguuccugcccuuccagcaguucggccgggauaucgccgacaccaccgacgccgugcgggacccccagacccuggagauccuggacaucaccccaugcagcuucggcggcgucagcgugaucacccccggcacaaacaccagcaaccagguggcagugcuguaccagggagugaacugcaccgaggugcccguggccauccacgccgaccagcugacccccaccuggcggguguacagcaccggcagcaacguguuccagacccgggccggcugccugaucggcgccgagcacgugaacaacuccuacgagugcgacauccccaucggcgccggcaucugcgcuagcuaccagacccagaccaacagcccccggcgggcccggagcguggccagccagagcaucaucgccuacaccaugagcuuaggcgccgagaacagcguggccuacagcaacaacagcaucgccaucccuaccaacuucaccaucagcgugaccaccgagauacugcccgugagcaugaccaagaccagcguggacuguaccauguacaucugcggcgacagcaccgagugcagcaaccugcugcugcaguacggcagcuucugcacccagcugaaccgggcgcugaccggcaucgccguggagcaggacaagaacacccaagagguguucgcccaggugaagcagaucuacaagacucccccaaucaaggacuucggcggcuucaacuucagccagauccugcccgaccccagcaagcccagcaagcggagcuucaucgaggaccugcuguucaacaaggugacccuggccgacgccggcuucaucaagcaguacggcgacugccugggggauaucgccgcccgggaccugaucugcgcucagaaguucaacggccugaccgugcugcccccucugcugaccgacgagaugaucgcccaguacaccagcgcccugcuugccggcaccaucaccagcggcuggaccuucggcgccggcgccgcacugcagauccccuucgccaugcagauggccuaccgguucaacggcaucggcgugacccagaacgugcuguacgagaaccagaagcugaucgccaaccaguucaacagcgccaucggcaagauccaggacagccugagcagcaccgccagcgcccugggcaagcugcaggacguggugaaccagaacgcccaggcucugaacacccuggugaagcagcugagcagcaacuucggcgccaucagcucagugcugaaugacauccugagcaggcuggaucccccagaggccgaggugcagaucgaccggcugaucaccggccggcugcagagccugcagaccuacgugacccagcagcugauccgggccgccgagauccgggccagcgccaaccuggccgcaaccaagaugagcgagugcgugcugggccagagcaagcggguggacuuuugcggcaagggcuaccaccugaugagcuucccccagagcgcuccccacggcgugguguuccuccacgucacauacgugcccgcccaggagaagaacuucaccaccgcccccgccauuugccacgacggcaaggcccacuucccccgggagggaguguucgugagcaacggcacccacugguucgugacccagcggaacuucuacgagccucagaucaucaccaccgacaacaccuucgugagcggcaacugcgacguggugaucggcaucgugaacaacaccguguacgacccccugcagcccgagcuggacagcuucaaggaggagcuggacaaguacuucaagaaccacaccagcccagacguggaccugggcgacaucagcggcaucaacgccagcguggugaacauccagaaggagaucgaccggcugaacgagguggccaagaaccugaacgagagccugaucgaccugcaggagcugggcaaguacgagcaguacaucaaguggcccugguacaucuggcugggcuucaucgccggccugaucgccaucgugauggugaccaucaugcugugcugcaugaccagcugcuguagcugccugaagggcugcugcagcugcggcagcugcugcaaguucgacgaggacgacagcgagcccgugcugaagggcgugaagcugcacuacaccugaggacuagucccuguucccagagcccacuuuuuuuucuuuuuuugaaauaaaauagccugucuuucagaucucaaaggcucuuuucagagccaccaaaaaaaaaaaaaaaaaaaaaaaaaaaaaaaaaaaaaaaaaaaaaaaaaaaaaaaaaaaaaaaaaaaaaaaaaaaaaaaaaaaaaaaaaaaaaaaaaaaaa

SEQ ID NO: 23794 - RNA, 4191 nt, Artificial Sequence
  SARS-CoV-2/Wuhan/WIV05/2019__EPI_ISL_402128 spike protein mRNA gc (1-1273)(K986P_V987P_N439K_D614G)
aggagagggcgcuuggcuugcaaggacccugagcugcggcauugaagcacacccaacccaacucgacugaagucagccucacugaaccggaucugagaaucuucucucucugggcuugccagggcucuccgaaccuagcuagcauccucuucaauuccaacuagaaagcuuaccauguucguguuccuggugcugcugccccuggugagcagccagugcgugaaccugaccacccggacccagcugcccccugccuacaccaacagcuucacccggggcguguacuaccccgacaagguguuccggagcagcgugcugcacagcacccaggaccuguuccugcccuucuucagcaacgugaccugguuccacgccauccacgugagcggcaccaacggcaccaagcgguucgacaacccagugcugcccuucaacgacggcguguacuucgccagcaccgagaagucaaacaucauccggggcuggaucuucggcaccacccuggacagcaagacacagagccugcugaucgugaacaacgccaccaacguggugaucaaggugugcgaguuucaguucugcaacgaccccuuccugggcguguacuaccacaagaacaacaagagcuggauggagagcgaguuccgggucuacagcagcgcuaacaauugcaccuucgaguacgugagccagcccuuccugauggaccucgagggcaagcagggcaacuucaagaaccugcgggaguucguguucaagaacaucgauggcuacuucaagaucuacagcaagcacacccccaucaaccuggugcgggaccugccccagggauucagcgcccuggagccucugguggaccugcccaucggcaucaacaucaccagguuccagacccugcuggcccugcaccggagcuaccugacccccggcgacagcagcagcggcuggaccgccggcgccgccgcauacuacgugggcuaccugcagccacggaccuuccugcugaaguacaacgagaacggcaccaucaccgacgccguggacugcgcccuggacccccugagcgagaccaagugcacccuaaagagcuucaccguggagaagggcaucuaccagaccagcaacuuccgggugcagcccacugagagcaucgugcgguuccccaacauuaccaaccugugucccuucggcgagguguucaacgccacccgguucgccagcguguacgccuggaaccggaagcggaucagcaacugcguggccgacuacagcgugcuguacaacagcgccagcuucagcaccuucaagugcuacggcgugagcccuaccaagcugaacgaccugugcuucaccaacguguacgcugacagcuucgugauccggggcgacgaggugcggcagaucgcccccggccagaccggcaagaucgccgacuacaacuacaagcugcccgacgacuucaccggcugcgugaucgccuggaacagcaagaaccuggacagcaaggugggcggcaacuacaacuaccuguaccggcuguuccguaagagcaaccugaagccauucgagcgggacaucagcaccgagaucuaccaggccggcagcacccccugcaacgguguggagggcuuuaacugcuacuucccccugcagagcuacggcuuccagcccaccaacggcgugggcuaccagcccuaccgggugguggugcugagcuucgagcugcugcacgcccccgccaccgugugcggcccuaaaaagagcaccaaccuggugaagaacaagugcgugaacuucaacuucaauggccugaccggcaccggcgugcugaccgagagcaacaagaaguuccugcccuuccagcaguucggccgggauaucgccgacaccaccgacgcagugcgggacccccagacccuggagauccuggacaucaccccaugcagcuucggcggcgugagcgucaucacccccggcacaaacaccagcaaccagguggccgugcuguaccagggagugaacugcaccgaggugcccguggccauccacgccgaccagcugacccccaccuggcggguguacagcaccggcagcaacguguuccagacccgggccggcugccugaucggcgccgagcacgugaacaacuccuacgagugcgacauccccaucggcgcuggcaucugcgccagcuaccagacccagaccaacagcccccggcgggcccggagcguggccagccagagcaucaucgccuacaccaugagcuuaggcgccgagaacagcguggccuacagcaacaacagcaucgcgaucccuaccaacuucaccaucagcgugaccaccgagauacugcccgugagcaugaccaagaccagcguggacuguaccauguacaucugcggcgacagcaccgagugcagcaaccugcugcugcaguacggcagcuucugcacccagcugaaccgggcccugaccggcaucgccguggagcaggacaagaacacccaagagguguucgcccaggugaagcagaucuacaagacucccccaaucaaggacuucggcggcuucaacuucagccagauccugcccgaccccagcaagcccagcaagcggagcuucaucgaggaccugcuguucaacaaggugacccuggccgacgccggcuucaucaagcaguacggcgacugccugggggauaucgccgcucgggaccugaucugcgcccagaaguucaacggccugaccgugcugcccccucugcugaccgacgagaugaucgcccaguacaccagcgcccugcuugccggcaccaucaccagcggcuggaccuucggcgccggcgcagcccugcagauccccuucgccaugcagauggccuaccgguucaacggcaucggcgugacccagaacgugcuguacgagaaccagaagcugaucgccaaccaguucaacagcgccaucggcaagauccaggacagccugagcagcaccgccagcgcccugggcaagcugcaggacguggugaaccagaacgcucaggcccugaacacccuggugaagcagcugagcagcaacuucggcgccaucagcucagugcugaacgacauccugagcaggcuggaucccccagaggccgaggugcagaucgaccggcugaucaccggccggcugcagagccugcagaccuacgugacccagcagcugauccgggccgccgagauccgggccagcgccaaucuggcagccaccaagaugagcgagugcgugcugggccagagcaagcggguggacuuuugcggcaagggcuaccaccugaugagcuucccccagagcgcuccccacggcgugguguuccuccacgugacauacguccccgcccaggagaagaacuucaccaccgcccccgccauuugccacgacggcaaggcccacuucccccgggagggaguguucgugagcaacggcacccacugguucgugacccagcggaacuucuacgagccucagaucaucaccaccgacaacaccuucgugagcggcaacugcgacguggugaucggcaucgugaacaacaccguguacgacccccugcagcccgagcuggacagcuucaaggaggagcuggacaaguacuucaagaaccacaccagcccagacguggaccugggcgacaucagcggcaucaacgccagcguggugaacauccagaaggagaucgaccggcugaacgagguggccaagaaccugaacgagagccugaucgaccugcaggagcugggcaaguacgagcaguacaucaaguggcccugguacaucuggcugggcuucaucgccggccugaucgccaucgugauggugaccaucaugcugugcugcaugaccagcugcuguagcugccugaagggcugcugcagcugcggcagcugcugcaaguucgacgaggacgacagcgagcccgugcugaagggcgugaagcugcacuacaccugaggacuagucccuguucccagagcccacuuuuuuuucuuuuuuugaaauaaaauagccugucuuucagaucucaaaggcucuuuucagagccaccaaaaaaaaaaaaaaaaaaaaaaaaaaaaaaaaaaaaaaaaaaaaaaaaaaaaaaaaaaaaaaaaaaaaaaaaaaaaaaaaaaaaaaaaaaaaaaaaaaaaa

SEQ ID NO: 23795 - RNA, 4191 nt, Artificial Sequence
  SARS-CoV-2/Wuhan/WIV05/2019__EPI_ISL_402128 spike protein mRNA gc (1-1273)(K986P_V987P_S477N_D614G)
aggagagggcgcuuggcuugcaaggacccugagcugcggcauugaagcacacccaacccaacucgacugaagucagccucacugaaccggaucugagaaucuucucucucugggcuugccagggcucuccgaaccuagcuagcauccucuucaauuccaacuagaaagcuuaccauguucguguuccuggugcugcugccccuggugagcagccagugcgugaaccugaccacccggacccagcugcccccugccuacaccaacagcuucacccggggcguguacuaccccgacaagguguuccggagcagcgugcugcacagcacccaggaccuguuccugcccuucuucagcaacgugaccugguuccacgccauccacgugagcggcaccaacggcaccaagcgguucgacaacccagugcugcccuucaacgacggcguguacuucgccagcaccgagaagucaaacaucauccggggcuggaucuucggcaccacccuggacagcaagacacagagccugcugaucgugaacaacgccaccaacguggugaucaaggugugcgaguuucaguucugcaacgaccccuuccugggcguguacuaccacaagaacaacaagagcuggauggagagcgaguuccgggucuacagcagcgcuaacaauugcaccuucgaguacgugagccagcccuuccugauggaccucgagggcaagcagggcaacuucaagaaccugcgggaguucguguucaagaacaucgauggcuacuucaagaucuacagcaagcacacccccaucaaccuggugcgggaccugccccagggauucagcgcccuggagccucugguggaccugcccaucggcaucaacaucaccagguuccagacccugcuggcccugcaccggagcuaccugacccccggcgacagcagcagcggcuggaccgccggcgccgccgcauacuacgugggcuaccugcagccacggaccuuccugcugaaguacaacgagaacggcaccaucaccgacgccguggacugcgcccuggacccccugagcgagaccaagugcacccuaaagagcuucaccguggagaagggcaucuaccagaccagcaacuuccgggugcagcccacugagagcaucgugcgguuccccaacauuaccaaccugugucccuucggcgagguguucaacgccacccgguucgccagcguguacgccuggaaccggaagcggaucagcaacugcguggccgacuacagcgugcuguacaacagcgccagcuucagcaccuucaagugcuacggcgugagcccuaccaagcugaacgaccugugcuucaccaacguguacgcugacagcuucgugauccggggcgacgaggugcggcagaucgcccccggccagaccggcaagaucgccgacuacaacuacaagcugcccgacgacuucaccggcugcgugaucgccuggaacagcaacaaccuggacagcaaggugggcggcaacuacaacuaccuguaccggcuguuccguaagagcaaccugaagccauucgagcgggacaucagcaccgagaucuaccaggccggcaacacccccugcaacgguguggagggcuuuaacugcuacuucccccugcagagcuacggcuuccagcccaccaacggcgugggcuaccagcccuaccgggugguggugcugagcuucgagcugcugcacgcccccgccaccgugugcggcccuaaaaagagcaccaaccuggugaagaacaagugcgugaauuucaacuucaacggccugaccggcaccggcgugcugaccgagagcaacaagaaguuccugcccuuccagcaguucggccgggauaucgccgacaccaccgacgcagugcgggacccccagacccuggagauccuggacaucaccccaugcagcuucggcggcgugagcgucaucacccccggcacaaacaccagcaaccagguggccgugcuguaccagggagugaacugcaccgaggugcccguggccauccacgccgaccagcugacccccaccuggcggguguacagcaccggcagcaacguguuccagacccgggccggcugccugaucggcgccgagcacgugaacaacagcuacgagugcgacauccccaucggcgcuggcaucugcgccuccuaccagacccagaccaacagcccccggcgggcccggagcguggccagccagagcaucaucgccuacaccaugagcuuaggcgccgagaacagcguggccuacagcaacaacagcaucgcgaucccuaccaacuucaccaucagcgugaccaccgagauacugcccgugagcaugaccaagaccagcguggacuguaccauguacaucugcggcgacagcaccgagugcagcaaccugcugcugcaguacggcagcuucugcacccagcugaaccgggcccugaccggcaucgccguggagcaggacaagaacacccaagagguguucgcccaggugaagcagaucuacaagacucccccaaucaaggacuucggcggcuucaacuucagccagauccugcccgaccccagcaagcccagcaagcggagcuucaucgaggaccugcuguucaacaaggugacccuggccgacgccggcuucaucaagcaguacggcgacugccugggggauaucgccgcucgggaccugaucugcgcccagaaguucaacggccugaccgugcugcccccucugcugaccgacgagaugaucgcccaguacaccagcgcccugcuugccggcaccaucaccagcggcuggaccuucggcgccggcgcagcccugcagauccccuucgccaugcagauggccuaccgguucaacggcaucggcgugacccagaacgugcuguacgagaaccagaagcugaucgccaaccaguucaacagcgccaucggcaagauccaggacagccugagcagcaccgccagcgcccugggcaagcugcaggacguggugaaccagaacgcucaggcccugaacacccuggugaagcagcugagcagcaauuucggcgccaucagcagcgugcugaacgacauccugucaaggcuggaucccccagaggccgaggugcagaucgaccggcugaucaccggccggcugcagagccugcagaccuacgugacccagcagcugauccgggccgccgagauccgggccagcgccaaccuggcagccaccaagaugagcgagugcgugcugggccagagcaagcggguggacuuuugcggcaagggcuaccaccugaugagcuucccccagagcgcuccccacggcgugguguuccuccacgugacauacguccccgcccaggagaagaacuucaccaccgcccccgccauuugccacgacggcaaggcccacuucccccgggagggaguguucgugagcaacggcacccacugguucgugacccagcggaacuucuacgagccucagaucaucaccaccgacaacaccuucgugagcggcaacugcgacguggugaucggcaucgugaacaacaccguguacgacccccugcagcccgagcuggacagcuucaaggaggagcuggacaaguacuucaagaaccacaccagcccagacguggaccugggcgacaucagcggcaucaacgccagcguggugaacauccagaaggagaucgaccggcugaacgagguggccaagaaccugaacgagagccugaucgaccugcaggagcugggcaaguacgagcaguacaucaaguggcccugguacaucuggcugggcuucaucgccggccugaucgccaucgugauggugaccaucaugcugugcugcaugaccagcugcuguagcugccugaagggcugcugcagcugcggcagcugcugcaaguucgacgaggacgacagcgagcccgugcugaagggcgugaagcugcacuacaccugaggacuagucccuguucccagagcccacuuuuuuuucuuuuuuugaaauaaaauagccugucuuucagaucucaaaggcucuuuucagagccaccaaaaaaaaaaaaaaaaaaaaaaaaaaaaaaaaaaaaaaaaaaaaaaaaaaaaaaaaaaaaaaaaaaaaaaaaaaaaaaaaaaaaaaaaaaaaaaaaaaaaa

SEQ ID NO: 23796 - RNA, 4191 nt, Artificial Sequence
  SARS-CoV-2/Wuhan/WIV05/2019__EPI_ISL_402128 spike protein mRNA gc (1-1273)(K986P_V987P_N501Y_D614G)
aggagagggcgcuuggcuugcaaggacccugagcugcggcauugaagcacacccaacccaacucgacugaagucagccucacugaaccggaucugagaaucuucucucucugggcuugccagggcucuccgaaccuagcuagcauccucuucaauuccaacuagaaagcuuaccauguucguguuccuggugcugcugccccuggugagcagccagugcgugaaccugaccacccggacccagcugcccccugccuacaccaacagcuucacccggggcguguacuaccccgacaagguguuccggagcagcgugcugcacagcacccaggaccuguuccugcccuucuucagcaacgugaccugguuccacgccauccacgugagcggcaccaacggcaccaagcgguucgacaacccagugcugcccuucaacgacggcguguacuucgccagcaccgagaagucaaacaucauccggggcuggaucuucggcaccacccuggacagcaagacacagagccugcugaucgugaacaacgccaccaacguggugaucaaggugugcgaguuucaguucugcaacgaccccuuccugggcguguacuaccacaagaacaacaagagcuggauggagagcgaguuccgggucuacagcagcgcuaacaauugcaccuucgaguacgugagccagcccuuccugauggaccucgagggcaagcagggcaacuucaagaaccugcgggaguucguguucaagaacaucgauggcuacuucaagaucuacagcaagcacacccccaucaaccuggugcgggaccugccccagggauucagcgcccuggagccucugguggaccugcccaucggcaucaacaucaccagguuccagacccugcuggcccugcaccggagcuaccugacccccggcgacagcagcagcggcuggaccgccggcgccgccgcauacuacgugggcuaccugcagccacggaccuuccugcugaaguacaacgagaacggcaccaucaccgacgccguggacugcgcccuggacccccugagcgagaccaagugcacccuaaagagcuucaccguggagaagggcaucuaccagaccagcaacuuccgggugcagcccacugagagcaucgugcgguuccccaacauuaccaaccugugucccuucggcgagguguucaacgccacccgguucgccagcguguacgccuggaaccggaagcggaucagcaacugcguggccgacuacagcgugcuguacaacagcgccagcuucagcaccuucaagugcuacggcgugagcccuaccaagcugaacgaccugugcuucaccaacguguacgcugacagcuucgugauccggggcgacgaggugcggcagaucgcccccggccagaccggcaagaucgccgacuacaacuacaagcugcccgacgacuucaccggcugcgugaucgccuggaacagcaacaaccuggacagcaaggugggcggcaacuacaacuaccuguaccggcuguuccguaagagcaaccugaagccauucgagcgggacaucagcaccgagaucuaccaggccggcagcacccccugcaacgguguggagggcuuuaacugcuacuucccccugcagagcuacggcuuccagcccaccuacggcgugggcuaccagcccuaccgggugguggugcugagcuucgagcugcugcacgcccccgccaccgugugcggcccuaaaaagagcaccaaccuggugaagaacaagugcgugaacuucaacuucaauggccugaccggcaccggcgugcugaccgagagcaacaagaaguuccugcccuuccagcaguucggccgggauaucgccgacaccaccgacgcagugcgggacccccagacccuggagauccuggacaucaccccaugcagcuucggcggcgugagcgucaucacccccggcacaaacaccagcaaccagguggccgugcuguaccagggagugaacugcaccgaggugcccguggccauccacgccgaccagcugacccccaccuggcggguguacagcaccggcagcaacguguuccagacccgggccggcugccugaucggcgccgagcacgugaacaacuccuacgagugcgacauccccaucggcgcuggcaucugcgccagcuaccagacccagaccaacagcccccggcgggcccggagcguggccagccagagcaucaucgccuacaccaugagcuuaggcgccgagaacagcguggccuacagcaacaacagcaucgcgaucccuaccaacuucaccaucagcgugaccaccgagauacugcccgugagcaugaccaagaccagcguggacuguaccauguacaucugcggcgacagcaccgagugcagcaaccugcugcugcaguacggcagcuucugcacccagcugaaccgggcccugaccggcaucgccguggagcaggacaagaacacccaagagguguucgcccaggugaagcagaucuacaagacucccccaaucaaggacuucggcggcuucaacuucagccagauccugcccgaccccagcaagcccagcaagcggagcuucaucgaggaccugcuguucaacaaggugacccuggccgacgccggcuucaucaagcaguacggcgacugccugggggauaucgccgcucgggaccugaucugcgcccagaaguucaacggccugaccgugcugcccccucugcugaccgacgagaugaucgcccaguacaccagcgcccugcuugccggcaccaucaccagcggcuggaccuucggcgccggcgcagcccugcagauccccuucgccaugcagauggccuaccgguucaacggcaucggcgugacccagaacgugcuguacgagaaccagaagcugaucgccaaccaguucaacagcgccaucggcaagauccaggacagccugagcagcaccgccagcgcccugggcaagcugcaggacguggugaaccagaacgcucaggcccugaacacccuggugaagcagcugagcagcaacuucggcgccaucagcucagugcugaacgacauccugagcaggcuggaucccccagaggccgaggugcagaucgaccggcugaucaccggccggcugcagagccugcagaccuacgugacccagcagcugauccgggccgccgagauccgggccagcgccaaucuggcagccaccaagaugagcgagugcgugcugggccagagcaagcggguggacuuuugcggcaagggcuaccaccugaugagcuucccccagagcgcuccccacggcgugguguuccuccacgugacauacguccccgcccaggagaagaacuucaccaccgcccccgccauuugccacgacggcaaggcccacuucccccgggagggaguguucgugagcaacggcacccacugguucgugacccagcggaacuucuacgagccucagaucaucaccaccgacaacaccuucgugagcggcaacugcgacguggugaucggcaucgugaacaacaccguguacgacccccugcagcccgagcuggacagcuucaaggaggagcuggacaaguacuucaagaaccacaccagcccagacguggaccugggcgacaucagcggcaucaacgccagcguggugaacauccagaaggagaucgaccggcugaacgagguggccaagaaccugaacgagagccugaucgaccugcaggagcugggcaaguacgagcaguacaucaaguggcccugguacaucuggcugggcuucaucgccggccugaucgccaucgugauggugaccaucaugcugugcugcaugaccagcugcuguagcugccugaagggcugcugcagcugcggcagcugcugcaaguucgacgaggacgacagcgagcccgugcugaagggcgugaagcugcacuacaccugaggacuagucccuguucccagagcccacuuuuuuuucuuuuuuugaaauaaaauagccugucuuucagaucucaaaggcucuuuucagagccaccaaaaaaaaaaaaaaaaaaaaaaaaaaaaaaaaaaaaaaaaaaaaaaaaaaaaaaaaaaaaaaaaaaaaaaaaaaaaaaaaaaaaaaaaaaaaaaaaaaaaa

SEQ ID NO: 23797 - RNA, 4185 nt, Artificial Sequence
  SARS-CoV-2/Wuhan/WIV05/2019__EPI_ISL_402128 spike protein mRNA gc (1-1273)(K986P_V987P_H69del_V70del_D614G)
aggagagggcgcuuggcuugcaaggacccugagcugcggcauugaagcacacccaacccaacucgacugaagucagccucacugaaccggaucugagaaucuucucucucugggcuugccagggcucuccgaaccuagcuagcauccucuucaauuccaacuagaaagcuuaccauguucguguuccuggugcugcugccccuggugagcagccagugcgugaaccugaccacccggacccagcugcccccugccuacaccaacagcuucacccggggcguguacuaccccgacaagguguuccggagcagcgugcugcacagcacccaggaccuguuccugcccuucuucagcaacgugaccugguuccacgccaucagcggcaccaacggcaccaagcgguucgacaacccagugcugcccuucaacgacggcguguacuucgccagcaccgagaagucaaacaucauccggggcuggaucuucggcaccacccuggacagcaagacacagagccugcugaucgugaacaacgccaccaacguggugaucaaggugugcgaguuucaguucugcaacgaccccuuccugggcguguacuaccacaagaacaacaagagcuggauggagagcgaguuccggguguacagcagcgcuaacaauugcaccuucgaguacgucagccagcccuuccugauggaccucgagggcaagcagggcaacuucaagaaccugcgggaguucguguucaagaacaucgauggcuacuucaagaucuacagcaagcacacccccaucaaccuggugcgggaccugccccagggauucagcgcccuggagccucugguggaccugcccaucggcaucaacaucaccagguuccagacccugcuggcccugcaccggagcuaccugacccccggcgacagcagcagcggcuggaccgccggcgccgccgcauacuacgugggcuaccugcagccacggaccuuccugcugaaguacaacgagaacggcaccaucaccgacgccguggacugcgcccuggacccccugagcgagaccaagugcacccuaaagagcuucaccguggagaagggcaucuaccagaccagcaacuuccgggugcagcccacugagagcaucgugcgguuccccaacauuaccaaccugugucccuucggcgagguguucaacgccacccgguucgccagcguguacgccuggaaccggaagcggaucagcaacugcguggccgacuacagcgugcuguacaacagcgccagcuucagcaccuucaagugcuacggcgugagcccuaccaagcugaacgaccugugcuucaccaacguguacgcugacagcuucgugauccggggcgacgaggugcggcagaucgcccccggccagaccggcaagaucgccgacuacaacuacaagcugcccgacgacuucaccggcugcgugaucgccuggaacagcaacaaccuggacagcaaggugggcggcaacuacaacuaccuguaccggcuguuccguaagagcaaccugaagccauucgagcgggacaucagcaccgagaucuaccaggccggcagcacccccugcaacgguguggagggcuuuaacugcuacuucccccugcagagcuacggcuuccagcccaccaacggcgugggcuaccagcccuaccgggugguggugcugagcuucgagcugcugcacgcccccgccaccgugugcggcccuaaaaagagcaccaaccuggugaagaacaagugcgugaacuucaauuucaacggccugaccggcaccggcgugcugaccgagagcaacaagaaguuccugcccuuccagcaguucggccgggauaucgccgacaccaccgacgcagugcgggacccccagacccuggagauccuggacaucaccccaugcagcuucggcggcgugagcgugaucacccccggcacaaacaccagcaaccaggucgccgugcuguaccagggagugaacugcaccgaggugcccguggccauccacgccgaccagcugacccccaccuggcggguguacagcaccggcagcaacguguuccagacccgggccggcugccugaucggcgccgagcacgugaacaacuccuacgagugcgacauccccaucggcgcuggcaucugcgccagcuaccagacccagaccaacagcccccggcgggcccggagcguggccagccagagcaucaucgccuacaccaugagcuuaggcgccgagaacagcguggccuacagcaacaacagcaucgcgaucccuaccaacuucaccaucagcgugaccaccgagauacugcccgugagcaugaccaagaccagcguggacuguaccauguacaucugcggcgacagcaccgagugcagcaaccugcugcugcaguacggcagcuucugcacccagcugaaccgggcccugaccggcaucgccguggagcaggacaagaacacccaagagguguucgcccaggugaagcagaucuacaagacucccccaaucaaggacuucggcggcuucaacuucagccagauccugcccgaccccagcaagcccagcaagcggagcuucaucgaggaccugcuguucaacaaggugacccuggccgacgccggcuucaucaagcaguacggcgacugccugggggauaucgccgcucgggaccugaucugcgcccagaaguucaacggccugaccgugcugcccccucugcugaccgacgagaugaucgcccaguacaccagcgcccugcuugccggcaccaucaccagcggcuggaccuucggcgccggcgcagcccugcagauccccuucgccaugcagauggccuaccgguucaacggcaucggcgugacccagaacgugcuguacgagaaccagaagcugaucgccaaccaguucaacagcgccaucggcaagauccaggacagccugagcagcaccgccagcgcccugggcaagcugcaggacguggugaaccagaacgcucaggcccugaacacccuggugaagcagcugagcagcaacuucggcgccaucagcucagugcugaaugacauccugagcaggcuggaucccccagaggccgaggugcagaucgaccggcugaucaccggccggcugcagagccugcagaccuacgugacccagcagcugauccgggccgccgagauccgggccagcgccaaccuggcagccaccaagaugagcgagugcgugcugggccagagcaagcggguggacuuuugcggcaagggcuaccaccugaugagcuucccccagagcgcuccccacggcgugguguuccuccacgugacauacgugcccgcccaggagaagaacuucaccaccgcccccgccauuugccacgacggcaaggcccacuucccccgggagggagucuucgugagcaacggcacccacugguucgugacccagcggaacuucuacgagccucagaucaucaccaccgacaacaccuucgugagcggcaacugcgacguggugaucggcaucgugaacaacaccguguacgacccccugcagcccgagcuggacagcuucaaggaggagcuggacaaguacuucaagaaccacaccagcccagacguggaccugggcgacaucagcggcaucaacgccagcguggugaacauccagaaggagaucgaccggcugaacgagguggccaagaaccugaacgagagccugaucgaccugcaggagcugggcaaguacgagcaguacaucaaguggcccugguacaucuggcugggcuucaucgccggccugaucgccaucgugauggugaccaucaugcugugcugcaugaccagcugcuguagcugccugaagggcugcugcagcugcggcagcugcugcaaguucgacgaggacgacagcgagcccgugcugaagggcgugaagcugcacuacaccugaggacuagucccuguucccagagcccacuuuuuuuucuuuuuuugaaauaaaauagccugucuuucagaucucaaaggcucuuuucagagccaccaaaaaaaaaaaaaaaaaaaaaaaaaaaaaaaaaaaaaaaaaaaaaaaaaaaaaaaaaaaaaaaaaaaaaaaaaaaaaaaaaaaaaaaaaaaaaaaaaaaaa

SEQ ID NO: 23798 - RNA, 4191 nt, Artificial Sequence
  SARS-CoV-2/Wuhan/WIV05/2019__EPI_ISL_402128 spike protein mRNA gc (1-1273)(K986P_V987P_Y453F_D614G)
aggagagggcgcuuggcuugcaaggacccugagcugcggcauugaagcacacccaacccaacucgacugaagucagccucacugaaccggaucugagaaucuucucucucugggcuugccagggcucuccgaaccuagcuagcauccucuucaauuccaacuagaaagcuuaccauguucguguuccuggugcugcugccccuggugagcagccagugcgugaaccugaccacccggacccagcugcccccugccuacaccaacagcuucacccggggcguguacuaccccgacaagguguuccggagcagcgugcugcacagcacccaggaccuguuccugcccuucuucagcaacgugaccugguuccacgccauccacgugagcggcaccaacggcaccaagcgguucgacaacccagugcugcccuucaacgacggcguguacuucgccagcaccgagaagucaaacaucauccggggcuggaucuucggcaccacccuggacagcaagacacagagccugcugaucgugaacaacgccaccaacguggugaucaaggugugcgaguuucaguucugcaacgaccccuuccugggcguguacuaccacaagaacaacaagagcuggauggagagcgaguuccgggucuacagcagcgcuaacaauugcaccuucgaguacgugagccagcccuuccugauggaccucgagggcaagcagggcaacuucaagaaccugcgggaguucguguucaagaacaucgauggcuacuucaagaucuacagcaagcacacccccaucaaccuggugcgggaccugccccagggauucagcgcccuggagccucugguggaccugcccaucggcaucaacaucaccagguuccagacccugcuggcccugcaccggagcuaccugacccccggcgacagcagcagcggcuggaccgccggcgccgccgcauacuacgugggcuaccugcagccacggaccuuccugcugaaguacaacgagaacggcaccaucaccgacgccguggacugcgcccuggacccccugagcgagaccaagugcacccuaaagagcuucaccguggagaagggcaucuaccagaccagcaacuuccgggugcagcccacugagagcaucgugcgguuccccaacauuaccaaccugugucccuucggcgagguguucaacgccacccgguucgccagcguguacgccuggaaccggaagcggaucagcaacugcguggccgacuacagcgugcuguacaacagcgccagcuucagcaccuucaagugcuacggcgugagcccuaccaagcugaacgaccugugcuucaccaacguguacgcugacagcuucgugauccggggcgacgaggugcggcagaucgcccccggccagaccggcaagaucgccgacuacaacuacaagcugcccgacgacuucaccggcugcgugaucgccuggaacagcaacaaccuggacagcaaggugggcggcaacuacaacuaccuguuccggcuguuccguaagagcaaccugaagccauuugagcgggacaucagcaccgagaucuaccaggccggcagcacccccugcaacgguguggagggcuucaacugcuacuucccccugcagagcuacggcuuccagcccaccaacggcgugggcuaccagcccuaccgggugguggugcugagcuucgagcugcugcacgcccccgccaccgugugcggcccuaaaaagagcaccaaccuggugaagaacaagugcgugaacuucaauuucaacggccugaccggcaccggcgugcugaccgagagcaacaagaaguuccugcccuuccagcaguucggccgggauaucgccgacaccaccgacgcagugcgggacccccagacccuggagauccuggacaucaccccaugcagcuucggcggcgugagcgucaucacccccggcacaaacaccagcaaccagguggccgugcuguaccagggagugaacugcaccgaggugcccguggccauccacgccgaccagcugacccccaccuggcggguguacagcaccggcagcaacguguuccagacccgggccggcugccugaucggcgccgagcacgugaacaacuccuacgagugcgacauccccaucggcgcuggcaucugcgccagcuaccagacccagaccaacagcccccggcgggcccggagcguggccagccagagcaucaucgccuacaccaugagcuuaggcgccgagaacagcguggccuacagcaacaacagcaucgcgaucccuaccaacuucaccaucagcgugaccaccgagauacugcccgugagcaugaccaagaccagcguggacuguaccauguacaucugcggcgacagcaccgagugcagcaaccugcugcugcaguacggcagcuucugcacccagcugaaccgggcccugaccggcaucgccguggagcaggacaagaacacccaagagguguucgcccaggugaagcagaucuacaagacucccccaaucaaggacuucggcggcuucaacuucagccagauccugcccgaccccagcaagcccagcaagcggagcuucaucgaggaccugcuguucaacaaggugacccuggccgacgccggcuucaucaagcaguacggcgacugccugggggauaucgccgcucgggaccugaucugcgcccagaaguucaacggccugaccgugcugcccccucugcugaccgacgagaugaucgcccaguacaccagcgcccugcuugccggcaccaucaccagcggcuggaccuucggcgccggcgcagcccugcagauccccuucgccaugcagauggccuaccgguucaacggcaucggcgugacccagaacgugcuguacgagaaccagaagcugaucgccaaccaguucaacagcgccaucggcaagauccaggacagccugagcagcaccgccagcgcccugggcaagcugcaggacguggugaaccagaacgcucaggcccugaacacccuggugaagcagcugagcagcaacuuuggcgccaucagcucagugcugaaugacauccugagcaggcuggaucccccagaggccgaggugcagaucgaccggcugaucaccggccggcugcagagccugcagaccuacgugacccagcagcugauccgggccgccgagauccgggccagcgccaaccuggcagccaccaagaugagcgagugcgugcugggccagagcaagcggguggacuucugcggcaagggcuaccaccugaugagcuucccccagagcgcuccccacggcgugguguuccuccacgugacauacguccccgcccaggagaagaacuucaccaccgcccccgccauuugccacgacggcaaggcccacuucccccgggagggaguguucgugagcaacggcacccacugguucgugacccagcggaacuucuacgagccucagaucaucaccaccgacaacaccuucgugagcggcaacugcgacguggugaucggcaucgugaacaacaccguguacgacccccugcagcccgagcuggacagcuucaaggaggagcuggacaaguacuucaagaaccacaccagcccagacguggaccugggcgacaucagcggcaucaacgccagcguggugaacauccagaaggagaucgaccggcugaacgagguggccaagaaccugaacgagagccugaucgaccugcaggagcugggcaaguacgagcaguacaucaaguggcccugguacaucuggcugggcuucaucgccggccugaucgccaucgugauggugaccaucaugcugugcugcaugaccagcugcuguagcugccugaagggcugcugcagcugcggcagcugcugcaaguucgacgaggacgacagcgagcccgugcugaagggcgugaagcugcacuacaccugaggacuagucccuguucccagagcccacuuuuuuuucuuuuuuugaaauaaaauagccugucuuucagaucucaaaggcucuuuucagagccaccaaaaaaaaaaaaaaaaaaaaaaaaaaaaaaaaaaaaaaaaaaaaaaaaaaaaaaaaaaaaaaaaaaaaaaaaaaaaaaaaaaaaaaaaaaaaaaaaaaaaa

SEQ ID NO: 23799 - RNA, 4191 nt, Artificial Sequence
  SARS-CoV-2/Wuhan/WIV05/2019__EPI_ISL_402128 spike protein mRNA gc (1-1273)(K986P_V987P_D614G_I692V)
aggagagggcgcuuggcuugcaaggacccugagcugcggcauugaagcacacccaacccaacucgacugaagucagccucacugaaccggaucugagaaucuucucucucugggcuugccagggcucuccgaaccuagcuagcauccucuucaauuccaacuagaaagcuuaccauguucguguuccuggugcugcugccccuggugagcagccagugcgugaaccugaccacccggacccagcugcccccugccuacaccaacagcuucacccggggcguguacuaccccgacaagguguuccggagcagcgugcugcacagcacccaggaccuguuccugcccuucuucagcaacgugaccugguuccacgccauccacgugagcggcaccaacggcaccaagcgguucgacaacccagugcugcccuucaacgacggcguguacuucgccagcaccgagaagucaaacaucauccggggcuggaucuucggcaccacccuggacagcaagacacagagccugcugaucgugaacaacgccaccaacguggugaucaaggugugcgaguuucaguucugcaacgaccccuuccugggcguguacuaccacaagaacaacaagagcuggauggagagcgaguuccgggucuacagcagcgcuaacaauugcaccuucgaguacgugagccagcccuuccugauggaccucgagggcaagcagggcaacuucaagaaccugcgggaguucguguucaagaacaucgauggcuacuucaagaucuacagcaagcacacccccaucaaccuggugcgggaccugccccagggauucagcgcccuggagccucugguggaccugcccaucggcaucaacaucaccagguuccagacccugcuggcccugcaccggagcuaccugacccccggcgacagcagcagcggcuggaccgccggcgccgccgcauacuacgugggcuaccugcagccacggaccuuccugcugaaguacaacgagaacggcaccaucaccgacgccguggacugcgcccuggacccccugagcgagaccaagugcacccuaaagagcuucaccguggagaagggcaucuaccagaccagcaacuuccgggugcagcccacugagagcaucgugcgguuccccaacauuaccaaccugugucccuucggcgagguguucaacgccacccgguucgccagcguguacgccuggaaccggaagcggaucagcaacugcguggccgacuacagcgugcuguacaacagcgccagcuucagcaccuucaagugcuacggcgugagcccuaccaagcugaacgaccugugcuucaccaacguguacgcugacagcuucgugauccggggcgacgaggugcggcagaucgcccccggccagaccggcaagaucgccgacuacaacuacaagcugcccgacgacuucaccggcugcgugaucgccuggaacagcaacaaccuggacagcaaggugggcggcaacuacaacuaccuguaccggcuguuccguaagagcaaccugaagccauucgagcgggacaucagcaccgagaucuaccaggccggcagcacccccugcaacgguguggagggcuuuaacugcuacuucccccugcagagcuacggcuuccagcccaccaacggcgugggcuaccagcccuaccgggugguggugcugagcuucgagcugcugcacgcccccgccaccgugugcggcccuaaaaagagcaccaaccuggugaagaacaagugcgugaacuucaauuucaacggccugaccggcaccggcgugcugaccgagagcaacaagaaguuccugcccuuccagcaguucggccgggauaucgccgacaccaccgacgcagugcgggacccccagacccuggagauccuggacaucaccccaugcagcuucggcggcgugagcgucaucacccccggcacaaacaccagcaaccagguggccgugcuguaccagggagugaacugcaccgaggugcccguggccauccacgccgaccagcugacccccaccuggcggguguacagcaccggcagcaacguguuccagacccgggccggcugccugaucggcgccgagcacgugaacaacuccuacgagugcgacauccccaucggcgcuggcaucugcgccagcuaccagacccagaccaacagcccccggcgggcccggagcguggccagccagagcgugaucgccuacaccaugagcuuaggcgccgagaacagcguggccuacagcaacaacagcaucgcgaucccuaccaacuucaccaucagcgugaccaccgagauccugcccgugagcaugaccaagaccagcguggacuguaccauguacauaugcggcgacagcaccgagugcagcaaccugcugcugcaguacggcagcuucugcacccagcugaaccgggcccugaccggcaucgccguggagcaggacaagaacacccaagagguguucgcccaggugaagcagaucuacaagacucccccaaucaaggacuucggcggcuucaacuucagccagauccugcccgaccccagcaagcccagcaagcggagcuucaucgaggaccugcuguucaacaaggugacccuggccgacgccggcuucaucaagcaguacggcgacugccugggggauaucgccgcucgggaccugaucugcgcccagaaguucaacggccugaccgugcugcccccucugcugaccgacgagaugaucgcccaguacaccagcgcccugcuugccggcaccaucaccagcggcuggaccuucggcgccggcgcagcccugcagauccccuucgccaugcagauggccuaccgguucaacggcaucggcgugacccagaacgugcuguacgagaaccagaagcugaucgccaaccaguucaacagcgccaucggcaagauccaggacagccugagcagcaccgccagcgcccugggcaagcugcaggacguggugaaccagaacgcucaggcccugaacacccuggugaagcagcugagcagcaacuucggcgccaucagcucagugcugaaugacauccugagcaggcuggaucccccagaggccgaggugcagaucgaccggcugaucaccggccggcugcagagccugcagaccuacgugacccagcagcugauccgggccgccgagauccgggccagcgccaaccuggcagccaccaagaugagcgagugcgugcugggccagagcaagcggguggacuuuugcggcaagggcuaccaccugaugagcuucccccagagcgcuccccacggcgugguguuccuccacgucacauacgugcccgcccaggagaagaacuucaccaccgcccccgccaucugccacgacggcaaggcccacuucccccgggagggaguguucgugagcaacggcacccacugguucgugacccagcggaacuucuacgagccucagauuaucaccaccgacaacaccuucgugagcggcaacugcgacguggugaucggcaucgugaacaacaccguguacgacccccugcagcccgagcuggacagcuucaaggaggagcuggacaaguacuucaagaaccacaccagcccagacguggaccugggcgacaucagcggcaucaacgccagcguggugaacauccagaaggagaucgaccggcugaacgagguggccaagaaccugaacgagagccugaucgaccugcaggagcugggcaaguacgagcaguacaucaaguggcccugguacaucuggcugggcuucaucgccggccugaucgccaucgugauggugaccaucaugcugugcugcaugaccagcugcuguagcugccugaagggcugcugcagcugcggcagcugcugcaaguucgacgaggacgacagcgagcccgugcugaagggcgugaagcugcacuacaccugaggacuagucccuguucccagagcccacuuuuuuuucuuuuuuugaaauaaaauagccugucuuucagaucucaaaggcucuuuucagagccaccaaaaaaaaaaaaaaaaaaaaaaaaaaaaaaaaaaaaaaaaaaaaaaaaaaaaaaaaaaaaaaaaaaaaaaaaaaaaaaaaaaaaaaaaaaaaaaaaaaaaa

SEQ ID NO: 23800 - RNA, 4191 nt, Artificial Sequence
  SARS-CoV-2/Wuhan/WIV05/2019__EPI_ISL_402128 spike protein mRNA gc (1-1273)(K986P_V987P_D614G_M1229I)
aggagagggcgcuuggcuugcaaggacccugagcugcggcauugaagcacacccaacccaacucgacugaagucagccucacugaaccggaucugagaaucuucucucucugggcuugccagggcucuccgaaccuagcuagcauccucuucaauuccaacuagaaagcuuaccauguucguguuccuggugcugcugccccuggugagcagccagugcgugaaccugaccacccggacccagcugcccccugccuacaccaacagcuucacccggggcguguacuaccccgacaagguguuccggagcagcgugcugcacagcacccaggaccuguuccugcccuucuucagcaacgugaccugguuccacgccauccacgugagcggcaccaacggcaccaagcgguucgacaacccagugcugcccuucaacgacggcguguacuucgccagcaccgagaagucaaacaucauccggggcuggaucuucggcaccacccuggacagcaagacacagagccugcugaucgugaacaacgccaccaacguggugaucaaggugugcgaguuucaguucugcaacgaccccuuccugggcguguacuaccacaagaacaacaagagcuggauggagagcgaguuccgggucuacagcagcgcuaacaauugcaccuucgaguacgugagccagcccuuccugauggaccucgagggcaagcagggcaacuucaagaaccugcgggaguucguguucaagaacaucgauggcuacuucaagaucuacagcaagcacacccccaucaaccuggugcgggaccugccccagggauucagcgcccuggagccucugguggaccugcccaucggcaucaacaucaccagguuccagacccugcuggcccugcaccggagcuaccugacccccggcgacagcagcagcggcuggaccgccggcgccgccgcauacuacgugggcuaccugcagccacggaccuuccugcugaaguacaacgagaacggcaccaucaccgacgccguggacugcgcccuggacccccugagcgagaccaagugcacccuaaagagcuucaccguggagaagggcaucuaccagaccagcaacuuccgggugcagcccacugagagcaucgugcgguuccccaacauuaccaaccugugucccuucggcgagguguucaacgccacccgguucgccagcguguacgccuggaaccggaagcggaucagcaacugcguggccgacuacagcgugcuguacaacagcgccagcuucagcaccuucaagugcuacggcgugagcccuaccaagcugaacgaccugugcuucaccaacguguacgcugacagcuucgugauccggggcgacgaggugcggcagaucgcccccggccagaccggcaagaucgccgacuacaacuacaagcugcccgacgacuucaccggcugcgugaucgccuggaacagcaacaaccuggacagcaaggugggcggcaacuacaacuaccuguaccggcuguuccguaagagcaaccugaagccauucgagcgggacaucagcaccgagaucuaccaggccggcagcacccccugcaacgguguggagggcuuuaacugcuacuucccccugcagagcuacggcuuccagcccaccaacggcgugggcuaccagcccuaccgggugguggugcugagcuucgagcugcugcacgcccccgccaccgugugcggcccuaaaaagagcaccaaccuggugaagaacaagugcgugaacuucaauuucaacggccugaccggcaccggcgugcugaccgagagcaacaagaaguuccugcccuuccagcaguucggccgggauaucgccgacaccaccgacgcagugcgggacccccagacccuggagauccuggacaucaccccaugcagcuucggcggcgugagcgucaucacccccggcacaaacaccagcaaccagguggccgugcuguaccagggagugaacugcaccgaggugcccguggccauccacgccgaccagcugacccccaccuggcggguguacagcaccggcagcaacguguuccagacccgggccggcugccugaucggcgccgagcacgugaacaacuccuacgagugcgacauccccaucggcgcuggcaucugcgccagcuaccagacccagaccaacagcccccggcgggcccggagcguggccagccagagcaucaucgccuacaccaugagcuuaggcgccgagaacagcguggccuacagcaacaacagcaucgcgaucccuaccaacuucaccaucagcgugaccaccgagauacugcccgugagcaugaccaagaccagcguggacuguaccauguacaucugcggcgacagcaccgagugcagcaaccugcugcugcaguacggcagcuucugcacccagcugaaccgggcccugaccggcaucgccguggagcaggacaagaacacccaagagguguucgcccaggugaagcagaucuacaagacucccccaaucaaggacuucggcggcuucaacuucagccagauccugcccgaccccagcaagcccagcaagcggagcuucaucgaggaccugcuguucaacaaggugacccuggccgacgccggcuucaucaagcaguacggcgacugccugggggauaucgccgcucgggaccugaucugcgcccagaaguucaacggccugaccgugcugcccccucugcugaccgacgagaugaucgcccaguacaccagcgcccugcuugccggcaccaucaccagcggcuggaccuucggcgccggcgcagcccugcagauccccuucgccaugcagauggccuaccgguucaacggcaucggcgugacccagaacgugcuguacgagaaccagaagcugaucgccaaccaguucaacagcgccaucggcaagauccaggacagccugagcagcaccgccagcgcccugggcaagcugcaggacguggugaaccagaacgcucaggcccugaacacccuggugaagcagcugagcagcaacuucggcgccaucagcucagugcugaaugacauccugagcaggcuggaucccccagaggccgaggugcagaucgaccggcugaucaccggccggcugcagagccugcagaccuacgugacccagcagcugauccgggccgccgagauccgggccagcgccaaccuggcagccaccaagaugagcgagugcgugcugggccagagcaagcggguggacuuuugcggcaagggcuaccaccugaugagcuucccccagagcgcuccccacggcgugguguuccuccacgugacauacguccccgcccaggagaagaacuucaccaccgcccccgccauuugccacgacggcaaggcccacuucccccgggagggaguguucgugagcaacggcacccacugguucgugacccagcggaacuucuacgagccucagaucaucaccaccgacaacaccuucgugagcggcaacugcgacguggugaucggcaucgugaacaacaccguguacgacccccugcagcccgagcuggacagcuucaaggaggagcuggacaaguacuucaagaaccacaccagcccagacguggaccugggcgacaucagcggcaucaacgccagcguggugaacauccagaaggagaucgaccggcugaacgagguggccaagaaccugaacgagagccugaucgaccugcaggagcugggcaaguacgagcaguacaucaaguggcccugguacaucuggcugggcuucaucgccggccugaucgccaucgugaucgugaccaucaugcugugcugcaugaccagcugcuguagcugccugaagggcugcugcagcugcggcagcugcugcaaguucgacgaggacgacagcgagcccgugcugaagggcgugaagcugcacuacaccugaggacuagucccuguucccagagcccacuuuuuuuucuuuuuuugaaauaaaauagccugucuuucagaucucaaaggcucuuuucagagccaccaaaaaaaaaaaaaaaaaaaaaaaaaaaaaaaaaaaaaaaaaaaaaaaaaaaaaaaaaaaaaaaaaaaaaaaaaaaaaaaaaaaaaaaaaaaaaaaaaaaaa

SEQ ID NO: 23801 - RNA, 4185 nt, Artificial Sequence
  SARS-CoV-2/Wuhan/WIV05/2019__EPI_ISL_402128 spike protein mRNA gc (1-1273)(K986P_V987P_H69del_V70del_A222V_Y453F_S477N_D614G_I692V)
aggagagggcgcuuggcuugcaaggacccugagcugcggcauugaagcacacccaacccaacucgacugaagucagccucacugaaccggaucugagaaucuucucucucugggcuugccagggcucuccgaaccuagcuagcauccucuucaauuccaacuagaaagcuuaccauguucguguuccuggugcugcugccccuggugagcagccagugcgugaaccugaccacccggacccagcugcccccugccuacaccaacagcuucacccggggcguguacuaccccgacaagguguuccggagcagcgugcugcacagcacccaggaccuguuccugcccuucuucagcaacgugaccugguuccacgccaucagcggcaccaacggcaccaagcgguucgacaacccagugcugcccuucaacgacggcguguacuucgccagcaccgagaagucaaacaucauccggggcuggaucuucggcaccacccuggacagcaagacacagagccugcugaucgugaacaacgccaccaacguggugaucaaggugugcgaguuucaguucugcaacgaccccuuccugggcguguacuaccacaagaacaacaagagcuggauggagagcgaguuccggguguacagcagcgcuaacaauugcaccuucgaguacgucagccagcccuuccugauggaccucgagggcaagcagggcaacuucaagaaccugcgggaguucguguucaagaacaucgauggcuacuucaagaucuacagcaagcacacccccaucaaccuggugcgggaccugccccagggauucagcgugcuggagccucugguggaccugcccaucggcaucaacaucaccagguuccagacccugcuggcccugcaccggagcuaccugacccccggcgacagcagcagcggcuggaccgccggcgccgccgccuacuacgugggcuaccugcagccacggaccuuccugcugaaguacaacgagaacggcaccaucaccgacgcaguggacugcgcccuggacccccugagcgagaccaagugcacccuaaagagcuucaccguggagaagggcaucuaccagaccagcaacuuccgggugcagcccacugagagcaucgugcgguuccccaacauuaccaaccugugucccuucggcgagguguucaacgccacccgguucgccagcguguacgccuggaaccggaagcggaucagcaacugcguggccgacuacagcgugcuguacaacagcgccagcuucagcaccuucaagugcuacggcgugagcccuaccaagcugaacgaccugugcuucaccaacguguacgccgacagcuucgugauccggggcgacgaggugcggcagaucgcucccggccagaccggcaagaucgccgacuacaacuacaagcugcccgacgacuucaccggcugcgugaucgccuggaacagcaacaaccuggacagcaaggugggcggcaacuacaacuaccuguuccggcuguuccguaagagcaaccugaagccauuugagcgggacaucagcaccgagaucuaccaggccggcaacacccccugcaacgguguggagggcuucaacugcuacuucccccugcagagcuacggcuuccagcccaccaacggcgugggcuaccagcccuaccgggugguggugcugagcuucgagcugcugcacgcccccgccaccgugugcggcccuaaaaagagcaccaaccuggugaagaacaagugcgugaauuucaacuucaacggccugaccggcaccggcgugcugaccgagagcaacaagaaguuccugcccuuccagcaguucggccgggauaucgccgacaccaccgacgccgugcgggacccccagacccuggagauccuggacaucaccccaugcagcuucggcggcgugagcgucaucacccccggcacaaacaccagcaaccagguggcagugcuguaccagggagugaacugcaccgaggugcccguggccauccacgccgaccagcugacccccaccuggcggguguacagcaccggcagcaacguguuccagacccgggccggcugccugaucggcgccgagcacgugaacaacagcuacgagugcgacauccccaucggcgccggcaucugcgcuuccuaccagacccagaccaacagcccccggcgggcccggagcguggccagccagagcgugaucgccuacaccaugagcuuaggcgccgagaacagcguggccuacagcaacaacagcaucgccaucccuaccaacuucaccaucagcgugaccaccgagauccugcccgugagcaugaccaagaccagcguggacuguaccauguacauaugcggcgacagcaccgagugcagcaaccugcugcugcaguacggcagcuucugcacccagcugaaccgggcgcugaccggcaucgccguggagcaggacaagaacacccaagagguguucgcccaggugaagcagaucuacaagacucccccaaucaaggacuucggcggcuucaacuucagccagauccugcccgaccccagcaagcccagcaagcggagcuucaucgaggaccugcuguucaacaaggugacccuggccgacgccggcuucaucaagcaguacggcgacugccugggggauaucgccgcccgggaccugaucugcgcucagaaguucaacggccugaccgugcugcccccucugcugaccgacgagaugaucgcccaguacaccagcgcccugcuugccggcaccaucaccagcggcuggaccuucggcgccggcgccgcacugcagauccccuucgccaugcagauggccuaccgguucaacggcaucggcgugacccagaacgugcuguacgagaaccagaagcugaucgccaaccaguucaacagcgccaucggcaagauccaggacagccugagcagcaccgccagcgcccugggcaagcugcaggacguggugaaccagaacgcccaggcucugaacacccuggugaagcagcugagcagcaauuuuggcgccaucagcagcgugcugaacgacauccugucaaggcuggaucccccagaggccgaggugcagaucgaccggcugaucaccggccggcugcagagccugcagaccuacgugacccagcagcugauccgggccgccgagauccgggccagcgccaaccuggccgcaaccaagaugagcgagugcgugcugggccagagcaagcggguggacuucugcggcaagggcuaccaccugaugagcuucccccagagcgcuccccacggcgugguguuccuccacgucacauacgugcccgcccaggagaagaacuucaccaccgcccccgccaucugccacgacggcaaggcccacuucccccgggagggaguguucgugagcaacggcacccacugguucgugacccagcggaacuucuacgagccucagauuaucaccaccgacaacaccuucgugagcggcaacugcgacguggugaucggcaucgugaacaacaccguguacgacccccugcagcccgagcuggacagcuucaaggaggagcuggacaaguacuucaagaaccacaccagcccagacguggaccugggcgacaucagcggcaucaacgccagcguggugaacauccagaaggagaucgaccggcugaacgagguggccaagaaccugaacgagagccugaucgaccugcaggagcugggcaaguacgagcaguacaucaaguggcccugguacaucuggcugggcuucaucgccggccugaucgccaucgugauggugaccaucaugcugugcugcaugaccagcugcuguagcugccugaagggcugcugcagcugcggcagcugcugcaaguucgacgaggacgacagcgagcccgugcugaagggcgugaagcugcacuacaccugaggacuagucccuguucccagagcccacuuuuuuuucuuuuuuugaaauaaaauagccugucuuucagaucucaaaggcucuuuucagagccaccaaaaaaaaaaaaaaaaaaaaaaaaaaaaaaaaaaaaaaaaaaaaaaaaaaaaaaaaaaaaaaaaaaaaaaaaaaaaaaaaaaaaaaaaaaaaaaaaaaaaa

SEQ ID NO: 23802 - RNA, 4185 nt, Artificial Sequence
  SARS-CoV-2/Wuhan/WIV05/2019__EPI_ISL_402128 spike protein mRNA gc (1-1273)(K986P_V987P_H69del_V70del_Y453F_D614G_I692V_M1229I)
aggagagggcgcuuggcuugcaaggacccugagcugcggcauugaagcacacccaacccaacucgacugaagucagccucacugaaccggaucugagaaucuucucucucugggcuugccagggcucuccgaaccuagcuagcauccucuucaauuccaacuagaaagcuuaccauguucguguuccuggugcugcugccccuggugagcagccagugcgugaaccugaccacccggacccagcugcccccugccuacaccaacagcuucacccggggcguguacuaccccgacaagguguuccggagcagcgugcugcacagcacccaggaccuguuccugcccuucuucagcaacgugaccugguuccacgccaucagcggcaccaacggcaccaagcgguucgacaacccagugcugcccuucaacgacggcguguacuucgccagcaccgagaagucaaacaucauccggggcuggaucuucggcaccacccuggacagcaagacacagagccugcugaucgugaacaacgccaccaacguggugaucaaggugugcgaguuucaguucugcaacgaccccuuccugggcguguacuaccacaagaacaacaagagcuggauggagagcgaguuccggguguacagcagcgcuaacaauugcaccuucgaguacgucagccagcccuuccugauggaccucgagggcaagcagggcaacuucaagaaccugcgggaguucguguucaagaacaucgauggcuacuucaagaucuacagcaagcacacccccaucaaccuggugcgggaccugccccagggauucagcgcccuggagccucugguggaccugcccaucggcaucaacaucaccagguuccagacccugcuggcccugcaccggagcuaccugacccccggcgacagcagcagcggcuggaccgccggcgccgccgcauacuacgugggcuaccugcagccacggaccuuccugcugaaguacaacgagaacggcaccaucaccgacgccguggacugcgcccuggacccccugagcgagaccaagugcacccuaaagagcuucaccguggagaagggcaucuaccagaccagcaacuuccgggugcagcccacugagagcaucgugcgguuccccaacauuaccaaccugugucccuucggcgagguguucaacgccacccgguucgccagcguguacgccuggaaccggaagcggaucagcaacugcguggccgacuacagcgugcuguacaacagcgccagcuucagcaccuucaagugcuacggcgugagcccuaccaagcugaacgaccugugcuucaccaacguguacgcugacagcuucgugauccggggcgacgaggugcggcagaucgcccccggccagaccggcaagaucgccgacuacaacuacaagcugcccgacgacuucaccggcugcgugaucgccuggaacagcaacaaccuggacagcaaggugggcggcaacuacaacuaccuguuccggcuguuccguaagagcaaccugaagccauuugagcgggacaucagcaccgagaucuaccaggccggcagcacccccugcaacgguguggagggcuucaacugcuacuucccccugcagagcuacggcuuccagcccaccaacggcgugggcuaccagcccuaccgggugguggugcugagcuucgagcugcugcacgcccccgccaccgugugcggcccuaaaaagagcaccaaccuggugaagaacaagugcgugaacuucaauuucaacggccugaccggcaccggcgugcugaccgagagcaacaagaaguuccugcccuuccagcaguucggccgggauaucgccgacaccaccgacgcagugcgggacccccagacccuggagauccuggacaucaccccaugcagcuucggcggcgugagcgugaucacccccggcacaaacaccagcaaccaggucgccgugcuguaccagggagugaacugcaccgaggugcccguggccauccacgccgaccagcugacccccaccuggcggguguacagcaccggcagcaacguguuccagacccgggccggcugccugaucggcgccgagcacgugaacaacuccuacgagugcgacauccccaucggcgcuggcaucugcgccagcuaccagacccagaccaacagcccccggcgggcccggagcguggccagccagagcgugaucgccuacaccaugagcuuaggcgccgagaacagcguggccuacagcaacaacagcaucgcgaucccuaccaacuucaccaucagcgugaccaccgagauccugcccgugagcaugaccaagaccagcguggacuguaccauguacauaugcggcgacagcaccgagugcagcaaccugcugcugcaguacggcagcuucugcacccagcugaaccgggcccugaccggcaucgccguggagcaggacaagaacacccaagagguguucgcccaggugaagcagaucuacaagacucccccaaucaaggacuucggcggcuucaacuucagccagauccugcccgaccccagcaagcccagcaagcggagcuucaucgaggaccugcuguucaacaaggugacccuggccgacgccggcuucaucaagcaguacggcgacugccugggggauaucgccgcucgggaccugaucugcgcccagaaguucaacggccugaccgugcugcccccucugcugaccgacgagaugaucgcccaguacaccagcgcccugcuugccggcaccaucaccagcggcuggaccuucggcgccggcgcagcccugcagauccccuucgccaugcagauggccuaccgguucaacggcaucggcgugacccagaacgugcuguacgagaaccagaagcugaucgccaaccaguucaacagcgccaucggcaagauccaggacagccugagcagcaccgccagcgcccugggcaagcugcaggacguggugaaccagaacgcucaggcccugaacacccuggugaagcagcugagcagcaacuuuggcgccaucagcucagugcugaaugacauccugagcaggcuggaucccccagaggccgaggugcagaucgaccggcugaucaccggccggcugcagagccugcagaccuacgugacccagcagcugauccgggccgccgagauccgggccagcgccaaccuggcagccaccaagaugagcgagugcgugcugggccagagcaagcggguggacuucugcggcaagggcuaccaccugaugagcuucccccagagcgcuccccacggcgugguguuccuccacgugacauacguccccgcccaggagaagaacuucaccaccgcccccgccaucugccacgacggcaaggcccacuucccccgggagggaguguucgugagcaacggcacccacugguucgugacccagcggaacuucuacgagccucagauuaucaccaccgacaacaccuucgugagcggcaacugcgacguggugaucggcaucgugaacaacaccguguacgacccccugcagcccgagcuggacagcuucaaggaggagcuggacaaguacuucaagaaccacaccagcccagacguggaccugggcgacaucagcggcaucaacgccagcguggugaacauccagaaggagaucgaccggcugaacgagguggccaagaaccugaacgagagccugaucgaccugcaggagcugggcaaguacgagcaguacaucaaguggcccugguacaucuggcugggcuucaucgccggccugaucgccaucgugaucgugaccaucaugcugugcugcaugaccagcugcuguagcugccugaagggcugcugcagcugcggcagcugcugcaaguucgacgaggacgacagcgagcccgugcugaagggcgugaagcugcacuacaccugaggacuagucccuguucccagagcccacuuuuuuuucuuuuuuugaaauaaaauagccugucuuucagaucucaaaggcucuuuucagagccaccaaaaaaaaaaaaaaaaaaaaaaaaaaaaaaaaaaaaaaaaaaaaaaaaaaaaaaaaaaaaaaaaaaaaaaaaaaaaaaaaaaaaaaaaaaaaaaaaaaaaa

SEQ ID NO: 23803 - RNA, 4182 nt, Artificial Sequence
  SARS-CoV-2/Wuhan/WIV05/2019__EPI_ISL_402128 spike protein mRNA gc (1-1273)(K986P_V987P_K986P_V987P_H69del_V70del_Y144del_N501Y_A570 D_D614G_P681H_T716I_S982A_D1118H)
aggagagggcgcuuggcuugcaaggacccugagcugcggcauugaagcacacccaacccaacucgacugaagucagccucacugaaccggaucugagaaucuucucucucugggcuugccagggcucuccgaaccuagcuagcauccucuucaauuccaacuagaaagcuuaccauguucguguuccuggugcugcugccccuggugagcagccagugcgugaaccugaccacccggacccagcugcccccugccuacaccaacagcuucacccggggcguguacuaccccgacaagguguuccggagcagcgugcugcacagcacccaggaccuguuccugcccuucuucagcaacgugaccugguuccacgccaucagcggcaccaacggcaccaagcgguucgacaacccagugcugcccuucaacgacggcguguacuucgccagcaccgagaagucaaacaucauccggggcuggaucuucggcaccacccuggacagcaagacacagagccugcugaucgugaacaacgccaccaacguggugaucaaggugugcgaguuucaguucugcaacgaccccuuccugggcguguaccacaagaacaacaagagcuggauggagagcgaguuccggguguacagcagcgcuaacaauugcaccuucgaguacgucagccagcccuuccugauggaccucgagggcaagcagggcaacuucaagaaccugcgggaguucguguucaagaacaucgauggcuacuucaagaucuacagcaagcacacccccaucaaccuggugcgggaccugccccagggauucagcgcccuggagccucugguggaccugcccaucggcaucaacaucaccagguuccagacccugcuggcccugcaccggagcuaccugacccccggcgacagcagcagcggcuggaccgccggcgccgccgcauacuacgugggcuaccugcagccacggaccuuccugcugaaguacaacgagaacggcaccaucaccgacgccguggacugcgcccuggacccccugagcgagaccaagugcacccuaaagagcuucaccguggagaagggcaucuaccagaccagcaacuuccgggugcagcccacugagagcaucgugcgguuccccaacauuaccaaccugugucccuucggcgagguguucaacgccacccgguucgccagcguguacgccuggaaccggaagcggaucagcaacugcguggccgacuacagcgugcuguacaacagcgccagcuucagcaccuucaagugcuacggcgugagcccuaccaagcugaacgaccugugcuucaccaacguguacgcugacagcuucgugauccggggcgacgaggugcggcagaucgcccccggccagaccggcaagaucgccgacuacaacuacaagcugcccgacgacuucaccggcugcgugaucgccuggaacagcaacaaccuggacagcaaggugggcggcaacuacaacuaccuguaccggcuguuccguaagagcaaccugaagccauucgagcgggacaucagcaccgagaucuaccaggccggcagcacccccugcaacgguguggagggcuuuaacugcuacuucccccugcagagcuacggcuuccagcccaccuacggcgugggcuaccagcccuaccgggugguggugcugagcuucgagcugcugcacgcccccgccaccgugugcggcccuaaaaagagcaccaaccuggugaagaacaagugcgugaacuucaacuucaauggccugaccggcaccggcgugcugaccgagagcaacaagaaguuccugcccuuccagcaguucggccgggauaucgacgacaccaccgacgccgugcgggacccccagacccuggagauccuggacaucaccccaugcagcuucggcggcgugagcgugaucacccccggcacaaacaccagcaaccaggucgcagugcuguaccagggagugaacugcaccgaggugcccguggccauccacgccgaccagcugacccccaccuggcggguguacagcaccggcagcaacguguuccagacccgggccggcugccugaucggcgccgagcacgugaacaacuccuacgagugcgacauccccaucggcgccggcaucugcgcuagcuaccagacccagaccaacagccaccggcgggcccggagcguggccagccagagcaucaucgccuacaccaugagcuuaggcgccgagaacagcguggccuacagcaacaacagcaucgccauccccaucaacuucaccauaagcgugaccaccgagauccugccugugagcaugaccaagaccagcguggacuguaccauguacaucugcggcgacagcaccgagugcagcaaccugcugcugcaguacggcagcuucugcacccagcugaaccgggcgcugaccggcaucgccguggagcaggacaagaacacccaagagguguucgcccaggugaagcagaucuacaagaccccacccaucaaggacuucggcggcuucaacuucagccagauccugcccgaccccagcaagcccagcaagcggagcuucaucgaggaccugcuguucaacaaggugacucuggccgacgccggcuucaucaagcaguacggcgauugccugggggacaucgccgcccgggaccugaucugcgcucagaaguucaacggccugaccgugcugccuccccugcugaccgacgagaugaucgcccaguacaccagcgcccugcuugccggcaccaucaccagcggcuggaccuucggcgccggcgccgcacugcagauccccuucgccaugcagauggccuaccgguucaacggcaucggcgugacccagaacgugcuguacgagaaccagaagcugaucgccaaccaguucaacagcgccaucggcaagauccaggacagccugagcagcaccgccagcgcccugggcaagcugcaggacguggugaaccagaacgcccaggcucugaacacccuggugaagcagcugagcagcaacuucggcgccaucagcucagugcugaacgacauccuggccaggcuggacccacccgaggccgaggugcagaucgaccggcugaucaccggccggcugcagagccugcagaccuacgugacccagcagcugauccgggccgccgagauucgggccagcgccaaucuggcagccaccaagaugagcgagugcgugcugggccagagcaagcggguggacuuuugcggcaagggcuaccaccugaugagcuucccccagagcgcuccccacggcgugguguuccuccacgugaccuacgugcccgcccaggagaagaacuucacaaccgcccccgccaucugccacgacggcaaggcccacuucccccgggagggagucuucgugagcaacggcacccacugguucgugacccagcggaacuucuacgagccccagaucaucaccacccacaacaccuucgugagcggcaacugcgacguggugaucggcaucgugaacaacaccguguacgacccucugcagcccgagcuggacagcuucaaggaggagcuggacaaguacuucaagaaccacaccagccccgacguggaucugggcgacaucagcggcaucaacgccagcguggugaacauccagaaggagaucgaccggcugaacgagguggccaagaaccugaacgagagccugaucgaccugcaggagcugggcaaguacgagcaguacaucaaguggccaugguacaucuggcugggcuucaucgccggccugaucgccaucgugauggugaccaucaugcugugcugcaugaccagcugcuguagcugccugaagggcugcugcagcugcggcagcugcugcaaguucgacgaggacgacagcgagcccgugcugaagggcgugaagcugcacuacaccugaggacuagucccuguucccagagcccacuuuuuuuucuuuuuuugaaauaaaauagccugucuuucagaucucaaaggcucuuuucagagccaccaaaaaaaaaaaaaaaaaaaaaaaaaaaaaaaaaaaaaaaaaaaaaaaaaaaaaaaaaaaaaaaaaaaaaaaaaaaaaaaaaaaaaaaaaaaaaaaaaaaaa

SEQ ID NO: 23804 - RNA, 4191 nt, Artificial Sequence
  SARS-CoV-2/Wuhan/WIV05/2019__EPI_ISL_402128 spike protein mRNA gc (1-1273)(K986P_V987P_K986P_V987P_K417N_E484K_N501Y_D614G)
aggagagggcgcuuggcuugcaaggacccugagcugcggcauugaagcacacccaacccaacucgacugaagucagccucacugaaccggaucugagaaucuucucucucugggcuugccagggcucuccgaaccuagcuagcauccucuucaauuccaacuagaaagcuuaccauguucguguuccuggugcugcugccccuggugagcagccagugcgugaaccugaccacccggacccagcugcccccugccuacaccaacagcuucacccggggcguguacuaccccgacaagguguuccggagcagcgugcugcacagcacccaggaccuguuccugcccuucuucagcaacgugaccugguuccacgccauccacgugagcggcaccaacggcaccaagcgguucgacaacccagugcugcccuucaacgacggcguguacuucgccagcaccgagaagucaaacaucauccggggcuggaucuucggcaccacccuggacagcaagacacagagccugcugaucgugaacaacgccaccaacguggugaucaaggugugcgaguuucaguucugcaacgaccccuuccugggcguguacuaccacaagaacaacaagagcuggauggagagcgaguuccgggucuacagcagcgcuaacaauugcaccuucgaguacgugagccagcccuuccugauggaccucgagggcaagcagggcaacuucaagaaccugcgggaguucguguucaagaacaucgauggcuacuucaagaucuacagcaagcacacccccaucaaccuggugcgggaccugccccagggauucagcgcccuggagccucugguggaccugcccaucggcaucaacaucaccagguuccagacccugcuggcccugcaccggagcuaccugacccccggcgacagcagcagcggcuggaccgccggcgccgccgcauacuacgugggcuaccugcagccacggaccuuccugcugaaguacaacgagaacggcaccaucaccgacgccguggacugcgcccuggacccccugagcgagaccaagugcacccuaaagagcuucaccguggagaagggcaucuaccagaccagcaacuuccgggugcagcccacugagagcaucgugcgguuccccaacauuaccaaccugugucccuucggcgagguguucaacgccacccgguucgccagcguguacgccuggaaccggaagcggaucagcaacugcguggccgacuacagcgugcuguacaacagcgccagcuucagcaccuucaagugcuacggcgugagcccuaccaagcugaacgaccugugcuucaccaacguguacgcugacagcuucgugauccggggcgacgaggugcggcagaucgcccccggccagaccggcaacaucgccgacuacaacuacaagcugcccgacgacuucaccggcugcgugaucgccuggaacagcaacaaccuggacagcaaggugggcggcaacuacaacuaccuguaccggcuguuccguaagagcaaccugaagccauucgagcgggacaucagcaccgagaucuaccaggccggcagcacccccugcaacggugugaagggcuuuaacugcuacuucccccugcagagcuacggcuuccagcccaccuacggcgugggcuaccagcccuaccgggugguggugcugagcuucgagcugcugcacgcccccgccaccgugugcggcccuaaaaagagcaccaaccuggugaagaacaagugcgugaacuucaauuucaacggccugaccggcaccggcgugcugaccgagagcaacaagaaguuccugcccuuccagcaguucggccgggauaucgccgacaccaccgacgcagugcgggacccccagacccuggagauccuggacaucaccccaugcagcuucggcggcgugagcgucaucacccccggcacaaacaccagcaaccagguggccgugcuguaccagggagugaacugcaccgaggugcccguggccauccacgccgaccagcugacccccaccuggcggguguacagcaccggcagcaacguguuccagacccgggccggcugccugaucggcgccgagcacgugaacaacuccuacgagugcgacauccccaucggcgcuggcaucugcgccagcuaccagacccagaccaacagcccccggcgggcccggagcguggccagccagagcaucaucgccuacaccaugagcuuaggcgccgagaacagcguggccuacagcaacaacagcaucgcgaucccuaccaacuucaccaucagcgugaccaccgagauacugcccgugagcaugaccaagaccagcguggacuguaccauguacaucugcggcgacagcaccgagugcagcaaccugcugcugcaguacggcagcuucugcacccagcugaaccgggcccugaccggcaucgccguggagcaggacaagaacacccaagagguguucgcccaggugaagcagaucuacaagacucccccaaucaaggacuucggcggcuucaacuucagccagauccugcccgaccccagcaagcccagcaagcggagcuucaucgaggaccugcuguucaacaaggugacccuggccgacgccggcuucaucaagcaguacggcgacugccugggggauaucgccgcucgggaccugaucugcgcccagaaguucaacggccugaccgugcugcccccucugcugaccgacgagaugaucgcccaguacaccagcgcccugcuugccggcaccaucaccagcggcuggaccuucggcgccggcgcagcccugcagauccccuucgccaugcagauggccuaccgguucaacggcaucggcgugacccagaacgugcuguacgagaaccagaagcugaucgccaaccaguucaacagcgccaucggcaagauccaggacagccugagcagcaccgccagcgcccugggcaagcugcaggacguggugaaccagaacgcucaggcccugaacacccuggugaagcagcugagcagcaacuucggcgccaucagcucagugcugaaugacauccugagcaggcuggaucccccagaggccgaggugcagaucgaccggcugaucaccggccggcugcagagccugcagaccuacgugacccagcagcugauccgggccgccgagauccgggccagcgccaaccuggcagccaccaagaugagcgagugcgugcugggccagagcaagcggguggacuuuugcggcaagggcuaccaccugaugagcuucccccagagcgcuccccacggcgugguguuccuccacgugacauacguccccgcccaggagaagaacuucaccaccgcccccgccauuugccacgacggcaaggcccacuucccccgggagggaguguucgugagcaacggcacccacugguucgugacccagcggaacuucuacgagccucagaucaucaccaccgacaacaccuucgugagcggcaacugcgacguggugaucggcaucgugaacaacaccguguacgacccccugcagcccgagcuggacagcuucaaggaggagcuggacaaguacuucaagaaccacaccagcccagacguggaccugggcgacaucagcggcaucaacgccagcguggugaacauccagaaggagaucgaccggcugaacgagguggccaagaaccugaacgagagccugaucgaccugcaggagcugggcaaguacgagcaguacaucaaguggcccugguacaucuggcugggcuucaucgccggccugaucgccaucgugauggugaccaucaugcugugcugcaugaccagcugcuguagcugccugaagggcugcugcagcugcggcagcugcugcaaguucgacgaggacgacagcgagcccgugcugaagggcgugaagcugcacuacaccugaggacuagucccuguucccagagcccacuuuuuuuucuuuuuuugaaauaaaauagccugucuuucagaucucaaaggcucuuuucagagccaccaaaaaaaaaaaaaaaaaaaaaaaaaaaaaaaaaaaaaaaaaaaaaaaaaaaaaaaaaaaaaaaaaaaaaaaaaaaaaaaaaaaaaaaaaaaaaaaaaaaaa

SEQ ID NO: 23805 - RNA, 4182 nt, Artificial Sequence
  SARS-CoV-2/Wuhan/WIV05/2019__EPI_ISL_402128 spike protein mRNA gc (1-1273)(K986P_V987P_K986P_V987P_L18F_D80A_D215G_L242del_A243del_ L244del_R246I_K417N_E484K_N501Y_D614G_A701V)
aggagagggcgcuuggcuugcaaggacccugagcugcggcauugaagcacacccaacccaacucgacugaagucagccucacugaaccggaucugagaaucuucucucucugggcuugccagggcucuccgaaccuagcuagcauccucuucaauuccaacuagaaagcuuaccauguucguguuccuggugcugcugccccuggugagcagccagugcgugaacuucaccacccggacccagcugcccccugccuacaccaacagcuucacccggggcguguacuaccccgacaagguguuccggagcagcgugcugcacagcacccaggaccuguuccugcccuucuucagcaacgugaccugguuccacgccauccacgugagcggcaccaacggcaccaagcgguucgccaacccagugcugcccuucaacgacggcguguacuucgccagcaccgagaagucaaacaucauccggggcuggaucuuuggcaccacccuggacagcaagacacagagccugcugaucgugaacaacgcuaccaacguggugaucaaggugugcgaguuccaguucugcaacgaccccuuccugggcguguacuaccacaagaacaacaagagcuggauggagagcgaguuccgggucuacagcagcgccaacaauugcaccuucgaguacgugagccagcccuuccugauggaccuggagggcaagcagggcaacuucaagaaccuccgggaguucguguucaagaacaucgacggcuacuucaagaucuacagcaagcacacccccaucaaccuggugcggggacugccccagggcuucagcgcccuggagccucugguggaucugcccaucggcaucaacaucaccagguuccagacccugcacaucagcuaccugacccccggcgacagcagcagcggcuggaccgccggcgccgccgcauacuacgugggcuaccugcagccacggaccuuccugcugaaguacaacgagaacggcaccaucaccgacgccguggacugcgcccuggacccccugagcgagaccaagugcacccuuaagagcuucaccguggagaagggcaucuaccagaccagcaacuuccgggugcagcccacugagagcauugugcgguuccccaacaucaccaaccugugucccuucggcgagguguucaacgccacccgguucgccagcguguacgccuggaaccggaagcggaucagcaacugcguggccgacuacagcgugcuguacaacagcgccagcuucagcaccuucaagugcuacggcgugagcccuaccaagcugaacgaccugugcuucaccaacguguacgcugacagcuucgugauccggggcgacgaggugcggcagaucgcccccggccagaccggcaacaucgccgacuacaacuacaagcugcccgacgacuucaccggcugcgugaucgccuggaacagcaacaaccuggacagcaaggugggcggcaacuacaacuaccuguaccggcuauuccguaagagcaaccugaagccauuugagcgggacaucagcaccgagaucuaccaggccgguagcacccccugcaacggcgugaagggcuucaacugcuacuucccccugcagagcuacggcuuccagcccaccuacggcgugggcuaccagcccuaccgggugguggugcugagcuucgagcugcugcacgcccccgccaccgugugcggcccuaaaaagagcaccaaccuggugaagaacaagugcgugaacuucaauuucaacggccugaccggcaccggcgugcugaccgagagcaacaagaaguuccugcccuuccagcaguucggccgggacaucgccgacaccaccgaugcagugcgggacccccagacccuggagauccuggacaucaccccaugcagcuucggcggcgugagcgucaucacccccggaacaaacaccagcaaccagguggccgugcuguaccagggcgugaacugcaccgaggugcccguggccauccacgccgaccagcugacccccaccuggcggguguacagcaccggcagcaacguguuccagacccgggccggcugccugaucggcgccgagcacgugaacaacuccuacgagugcgacauccccaucggcgcuggcaucugcgccagcuaccagacccagaccaacagcccccggcgggcccggagcguggccagccagagcaucaucgccuacaccaugagccugggcguggagaacagcguggccuacagcaacaacagcaucgccaucccuaccaacuucaccauaagcgugaccaccgagauccugcccgugagcaugaccaagaccagcguggacuguaccauguacaucugcggcgacagcaccgagugcagcaaccuguuacugcaguacggcagcuucugcacccagcugaaccgggcgcugaccggcaucgccguggagcaggacaagaacacccaagagguguucgcccaggugaagcagaucuacaagacucccccaaucaaggacuucggcggcuucaacuucagccagauccugcccgaccccagcaagcccagcaagcggagcuucaucgaggaccugcuguucaacaaggugacccuggccgacgccggcuucaucaagcaguacggggacugccugggcgacaucgccgcccgggaccugaucugcgcucagaaguucaacggccugaccgugcugcccccucugcugaccgaugagaugaucgcccaguacaccagcgcccugcuggccggcaccaucaccagcggcuggaccuucggcgccggcgccgcacugcagauccccuucgccaugcagauggccuaccgguucaacggcaucggcgugacccagaacgugcuguacgagaaccagaagcugaucgccaaccaguucaacagcgccaucggcaagauccaggacagccugagcagcaccgccagcgcccugggcaagcugcaggacguggugaaccagaacgcccaggcucugaacacccuggugaagcagcugagcagcaacuuuggcgccaucagcucagugcugaaugacauccugagccggcuggaucccccagaggccgaggugcagaucgacaggcugaucaccggccggcugcagagccugcagaccuacgugacccagcagcugauccgggccgccgagauucgggccagcgccaaccuggccgcaaccaagaugagcgagugcgugcugggccagagcaagcggguggacuucugcggcaagggcuaccaccugaugagcuucccccagagcgcuccccacggcgugguguuccugcacgucacauacgugcccgcccaggagaagaacuucaccaccgcccccgccaucugccacgacggaaaggcccacuucccccgggagggcguguucgugagcaacggcacccacugguucgugacccagcggaacuucuacgagccucagaucaucaccaccgacaacaccuucgugagcggcaacugcgacguggugaucggcaucgugaacaacaccguguacgacccccugcagcccgagcuggacagcuucaaggaggagcucgacaaguacuucaagaaccacaccagcccagacguggaccugggcgacaucagcggcaucaacgccagcguggugaacauccagaaggagaucgaccggcugaacgagguggccaagaaccugaacgagagccugaucgaccugcaggagcugggcaaguacgagcaguacaucaaguggcccugguacaucuggcugggcuucaucgccggccugaucgccaucgugauggugaccaucaugcugugcugcaugaccagcugcuguagcugccugaagggcugcugcagcugcggcagcugcugcaaguucgacgaggacgacagcgagcccgugcugaagggcgugaagcugcacuacaccugaggacuagucccuguucccagagcccacuuuuuuuucuuuuuuugaaauaaaauagccugucuuucagaucucaaaggcucuuuucagagccaccaaaaaaaaaaaaaaaaaaaaaaaaaaaaaaaaaaaaaaaaaaaaaaaaaaaaaaaaaaaaaaaaaaaaaaaaaaaaaaaaaaaaaaaaaaaaaaaaaaaaa

SEQ ID NO: 23806 - RNA, 4191 nt, Artificial Sequence
  SARS-CoV-2/Wuhan/WIV05/2019__EPI_ISL_402128 spike protein mRNA gc (1-1273)(K986P_V987P_K986P_V987P_E484K_D614G)
aggagagggcgcuuggcuugcaaggacccugagcugcggcauugaagcacacccaacccaacucgacugaagucagccucacugaaccggaucugagaaucuucucucucugggcuugccagggcucuccgaaccuagcuagcauccucuucaauuccaacuagaaagcuuaccauguucguguuccuggugcugcugccccuggugagcagccagugcgugaaccugaccacccggacccagcugcccccugccuacaccaacagcuucacccggggcguguacuaccccgacaagguguuccggagcagcgugcugcacagcacccaggaccuguuccugcccuucuucagcaacgugaccugguuccacgccauccacgugagcggcaccaacggcaccaagcgguucgacaacccagugcugcccuucaacgacggcguguacuucgccagcaccgagaagucaaacaucauccggggcuggaucuucggcaccacccuggacagcaagacacagagccugcugaucgugaacaacgccaccaacguggugaucaaggugugcgaguuucaguucugcaacgaccccuuccugggcguguacuaccacaagaacaacaagagcuggauggagagcgaguuccgggucuacagcagcgcuaacaauugcaccuucgaguacgugagccagcccuuccugauggaccucgagggcaagcagggcaacuucaagaaccugcgggaguucguguucaagaacaucgauggcuacuucaagaucuacagcaagcacacccccaucaaccuggugcgggaccugccccagggauucagcgcccuggagccucugguggaccugcccaucggcaucaacaucaccagguuccagacccugcuggcccugcaccggagcuaccugacccccggcgacagcagcagcggcuggaccgccggcgccgccgcauacuacgugggcuaccugcagccacggaccuuccugcugaaguacaacgagaacggcaccaucaccgacgccguggacugcgcccuggacccccugagcgagaccaagugcacccuaaagagcuucaccguggagaagggcaucuaccagaccagcaacuuccgggugcagcccacugagagcaucgugcgguuccccaacauuaccaaccugugucccuucggcgagguguucaacgccacccgguucgccagcguguacgccuggaaccggaagcggaucagcaacugcguggccgacuacagcgugcuguacaacagcgccagcuucagcaccuucaagugcuacggcgugagcccuaccaagcugaacgaccugugcuucaccaacguguacgcugacagcuucgugauccggggcgacgaggugcggcagaucgcccccggccagaccggcaagaucgccgacuacaacuacaagcugcccgacgacuucaccggcugcgugaucgccuggaacagcaacaaccuggacagcaaggugggcggcaacuacaacuaccuguaccggcuguuccguaagagcaaccugaagccauucgagcgggacaucagcaccgagaucuaccaggccggcagcacccccugcaacggugugaagggcuuuaacugcuacuucccccugcagagcuacggcuuccagcccaccaacggcgugggcuaccagcccuaccgggugguggugcugagcuucgagcugcugcacgcccccgccaccgugugcggcccuaaaaagagcaccaaccuggugaagaacaagugcgugaacuucaauuucaacggccugaccggcaccggcgugcugaccgagagcaacaagaaguuccugcccuuccagcaguucggccgggauaucgccgacaccaccgacgcagugcgggacccccagacccuggagauccuggacaucaccccaugcagcuucggcggcgugagcgucaucacccccggcacaaacaccagcaaccagguggccgugcuguaccagggagugaacugcaccgaggugcccguggccauccacgccgaccagcugacccccaccuggcggguguacagcaccggcagcaacguguuccagacccgggccggcugccugaucggcgccgagcacgugaacaacuccuacgagugcgacauccccaucggcgcuggcaucugcgccagcuaccagacccagaccaacagcccccggcgggcccggagcguggccagccagagcaucaucgccuacaccaugagcuuaggcgccgagaacagcguggccuacagcaacaacagcaucgcgaucccuaccaacuucaccaucagcgugaccaccgagauacugcccgugagcaugaccaagaccagcguggacuguaccauguacaucugcggcgacagcaccgagugcagcaaccugcugcugcaguacggcagcuucugcacccagcugaaccgggcccugaccggcaucgccguggagcaggacaagaacacccaagagguguucgcccaggugaagcagaucuacaagacucccccaaucaaggacuucggcggcuucaacuucagccagauccugcccgaccccagcaagcccagcaagcggagcuucaucgaggaccugcuguucaacaaggugacccuggccgacgccggcuucaucaagcaguacggcgacugccugggggauaucgccgcucgggaccugaucugcgcccagaaguucaacggccugaccgugcugcccccucugcugaccgacgagaugaucgcccaguacaccagcgcccugcuugccggcaccaucaccagcggcuggaccuucggcgccggcgcagcccugcagauccccuucgccaugcagauggccuaccgguucaacggcaucggcgugacccagaacgugcuguacgagaaccagaagcugaucgccaaccaguucaacagcgccaucggcaagauccaggacagccugagcagcaccgccagcgcccugggcaagcugcaggacguggugaaccagaacgcucaggcccugaacacccuggugaagcagcugagcagcaacuucggcgccaucagcucagugcugaaugacauccugagcaggcuggaucccccagaggccgaggugcagaucgaccggcugaucaccggccggcugcagagccugcagaccuacgugacccagcagcugauccgggccgccgagauccgggccagcgccaaccuggcagccaccaagaugagcgagugcgugcugggccagagcaagcggguggacuuuugcggcaagggcuaccaccugaugagcuucccccagagcgcuccccacggcgugguguuccuccacgugacauacguccccgcccaggagaagaacuucaccaccgcccccgccauuugccacgacggcaaggcccacuucccccgggagggaguguucgugagcaacggcacccacugguucgugacccagcggaacuucuacgagccucagaucaucaccaccgacaacaccuucgugagcggcaacugcgacguggugaucggcaucgugaacaacaccguguacgacccccugcagcccgagcuggacagcuucaaggaggagcuggacaaguacuucaagaaccacaccagcccagacguggaccugggcgacaucagcggcaucaacgccagcguggugaacauccagaaggagaucgaccggcugaacgagguggccaagaaccugaacgagagccugaucgaccugcaggagcugggcaaguacgagcaguacaucaaguggcccugguacaucuggcugggcuucaucgccggccugaucgccaucgugauggugaccaucaugcugugcugcaugaccagcugcuguagcugccugaagggcugcugcagcugcggcagcugcugcaaguucgacgaggacgacagcgagcccgugcugaagggcgugaagcugcacuacaccugaggacuagucccuguucccagagcccacuuuuuuuucuuuuuuugaaauaaaauagccugucuuucagaucucaaaggcucuuuucagagccaccaaaaaaaaaaaaaaaaaaaaaaaaaaaaaaaaaaaaaaaaaaaaaaaaaaaaaaaaaaaaaaaaaaaaaaaaaaaaaaaaaaaaaaaaaaaaaaaaaaaaa

SEQ ID NO: 23807 - RNA, 4191 nt, Artificial Sequence
  SARS-CoV-2/Wuhan/WIV05/2019__EPI_ISL_402128 spike protein mRNA gc (1-1273)(K986P_V987P_K986P_V987P_L18F_T20N_P26S_D138Y_R190S_K417T _E484K_N501Y_D614G_H655Y_T1027I)
aggagagggcgcuuggcuugcaaggacccugagcugcggcauugaagcacacccaacccaacucgacugaagucagccucacugaaccggaucugagaaucuucucucucugggcuugccagggcucuccgaaccuagcuagcauccucuucaauuccaacuagaaagcuuaccauguucguguuccuggugcugcugccccuggugagcagccagugcgugaacuucaccaaccggacccagcugcccagcgccuacaccaacagcuucacccggggcguguacuacccugacaagguguuccggagcagcgugcugcacagcacccaggaccuguuccugcccuucuucagcaacgugaccugguuccacgccauccacgugagcggcaccaacggcaccaagcgguucgacaaccccgugcugccauucaacgacggcguguacuucgccagcaccgagaagucaaacaucauccggggcuggaucuuuggcaccacccuggacagcaagacccagagccugcugaucgugaacaacgccacaaacguggugaucaaggugugcgaguuccaguucugcaacuaccccuuccugggcguguacuaccacaagaacaacaagagcuggauggagagcgaguuccgggucuacagcagcgcuaauaacugcaccuucgaguacgugagccagcccuuccugauggaccuggagggcaagcagggcaacuucaagaaccucagcgaguucguguucaagaacaucgacggcuacuucaagaucuacagcaagcacacccccaucaaccuggugcgggaucugccccagggauucagcgcccuggagccccugguggaccugccuaucggcaucaacaucacccgguuccagacccugcuggcccugcacaggagcuaccugacccccggcgacagcagcagcggcuggaccgccggcgccgccgcauacuacgugggcuaccugcagccccggaccuuccugcugaaguacaacgagaacggcaccaucaccgacgccguggacugcgcccuggacccacugagcgagaccaagugcacccuaaagagcuucaccguggagaagggcaucuaccagaccagcaacuuccgggugcagcccaccgagagcaucgugcgguuccccaacauuacuaaccugugucccuucggcgagguguucaacgccacccgguucgccagcguguacgccuggaaccggaagcggaucagcaacugcguggccgacuacagcgugcuguacaacagcgccagcuucagcaccuucaagugcuacggcgugagccccaccaagcugaacgaccugugcuucaccaacguguacgcugacagcuucgugauccggggcgacgaggugcggcagaucgccccuggccagaccggcaccaucgccgacuacaacuacaagcugcccgacgacuucaccggcugcgugaucgccuggaacagcaacaaccuggacagcaaggugggcggcaacuacaacuaccuguaccggcuguuccguaagagcaaccugaagcccuuugagcgggacaucagcaccgagaucuaccaggccggcagcaccccaugcaacggugugaagggcuucaacugcuacuucccccugcagagcuacggcuuccagcccaccuacggcgugggcuaccagcccuaccgggugguggugcugagcuucgagcugcugcacgcccccgccaccgugugcggccccaaaaagagcaccaaccuggugaagaacaagugcgugaacuucaauuucaacggccugaccggcaccggcgugcugaccgagagcaacaagaaguuccugccuuuccagcaguucggccgggacaucgccgauaccaccgacgcagugcgggacccccagacccuggagauccuggacaucacccccugcagcuucggcggcgugagcgucaucaccccaggcacaaacaccagcaaccagguggccgugcuguaccagggagugaacugcaccgaggugcccguggccauccacgccgaccagcugacccccaccuggcggguguacuccaccggcagcaacguguuccagacccgggccggcugccugaucggcgccgaguacgugaacaacagcuacgagugcgacauccccaucggcgcuggcaucugcgccagcuaccagacccagaccaacagcccccggcgggcccggagcguggccagccagagcaucaucgccuacaccaugagccugggcgccgagaacagcguggccuacagcaacaacagcaucgcgauccccaccaacuucaccaucagcgugaccaccgagauauuaccugugagcaugaccaagaccagcguggacuguaccauguacaucugcggcgacagcaccgagugcagcaaccugcugcugcaguacggcagcuucugcacccagcugaaccgggcccugaccggcaucgccguggagcaggacaagaacacccaagagguguucgcccaggugaagcagaucuacaagacuccacccaucaaggacuucggcggcuucaacuucagccagauccugcccgaccccagcaagcccagcaagcggagcuucaucgaggaccugcuguucaacaaggugacccuggccgacgccggcuucaucaagcaguacggcgacugccugggggacaucgccgcucgggaucugaucugcgcccagaaguucaacggccugaccgugcugccuccccugcugaccgacgagaugaucgcccaguacaccagcgcccugcuggccggcaccaucaccagcggcuggaccuucggcgccggcgcagcccuucagauccccuucgccaugcagauggccuaccgguucaacggcaucggcgugacccagaacgugcuguacgagaaccagaagcugaucgccaaccaguucaacagcgccaucggcaagauccaggacagccugagcagcaccgccagcgcccugggcaagcugcaggacguggugaaccagaacgcucaggcccugaacacccuggugaagcagcugagcucaaacuuuggcgccaucagcagcgugcugaaugacauccugagccggcuggacccacccgaggccgaggugcagaucgacaggcugaucaccggccggcugcagagccugcagaccuacgugacccagcagcugauccgggccgccgagauccgggccagcgccaaccuggcagccauuaagaugagcgagugcgugcugggccagagcaagcggguggacuucugcggcaagggcuaccaccugaugagcuucccccagagcgcuccccacggcgugguguuccugcacgugaccuacguccccgcccaggagaagaacuucacaaccgcccccgccaucugccacgacggcaaggcccacuucccccgggagggaguguucgugagcaacggcacccacugguucgugacccagcggaacuucuacgagccccagaucaucaccaccgacaacaccuucgugagcggcaacugcgacguggugaucggcaucgugaacaacaccguguacgacccucuccagcccgagcuggacagcuucaaggaggagcuggacaaguacuucaagaaccacaccagccccgacguggaccugggcgauaucagcggcaucaacgccagcguggugaacauccagaaggagaucgaccggcugaacgagguggccaagaaccugaacgagagccugaucgaccugcaggagcugggcaaguacgagcaguacaucaaguggccaugguacaucuggcugggcuucaucgccggccugaucgccaucgugauggugaccaucaugcugugcugcaugaccagcugcuguagcugccugaagggcugcugcagcugcggcagcugcugcaaguucgacgaggacgacagcgagcccgugcugaagggcgugaagcugcacuacaccugaggacuagucccuguucccagagcccacuuuuuuuucuuuuuuugaaauaaaauagccugucuuucagaucucaaaggcucuuuucagagccaccaaaaaaaaaaaaaaaaaaaaaaaaaaaaaaaaaaaaaaaaaaaaaaaaaaaaaaaaaaaaaaaaaaaaaaaaaaaaaaaaaaaaaaaaaaaaaaaaaaaaa

SEQ ID NO: 23808 - RNA, 4191 nt, Artificial Sequence
  SARS-CoV-2/Wuhan/WIV05/2019__EPI_ISL_402128 spike protein mRNA gc (1-1273)(K986P_V987P_K986P_V987P_S13I_W152C_L452R_D614G)
aggagagggcgcuuggcuugcaaggacccugagcugcggcauugaagcacacccaacccaacucgacugaagucagccucacugaaccggaucugagaaucuucucucucugggcuugccagggcucuccgaaccuagcuagcauccucuucaauuccaacuagaaagcuuaccauguucguguuccuggugcugcugccccuggugagcauccagugcgugaaccugaccacccggacccagcugcccccugccuacaccaacagcuucacccggggcguguacuaccccgacaagguguuccggagcagcgugcugcacagcacccaggaccuguuccugcccuucuucagcaacgugaccugguuccacgccauccacgugagcggcaccaacggcaccaagcgguucgacaacccagugcugcccuucaacgacggcguguacuucgccagcaccgagaagucaaacaucauccggggcuggaucuucggcaccacccuggacagcaagacacagagccugcugaucgugaacaacgccaccaacguggugaucaaggugugcgaguuucaguucugcaacgaccccuuccugggcguguacuaccacaagaacaacaagagcugcauggagagcgaguuccgggucuacagcagcgcuaacaauugcaccuucgaguacgugagccagcccuuccugauggaccucgagggcaagcagggcaacuucaagaaccugcgggaguucguguucaagaacaucgauggcuacuucaagaucuacagcaagcacacccccaucaaccuggugcgggaccugccccagggauucagcgcccuggagccucugguggaccugcccaucggcaucaacaucaccagguuccagacccugcuggcccugcaccggagcuaccugacccccggcgacagcagcagcggcuggaccgccggcgccgccgcauacuacgugggcuaccugcagccacggaccuuccugcugaaguacaacgagaacggcaccaucaccgacgccguggacugcgcccuggacccccugagcgagaccaaguguacccuaaagagcuucaccguggagaagggcaucuaccagaccagcaacuuccgggugcagcccacugagagcauugugcgguuccccaacaucaccaaccugugccccuucggcgagguguucaacgccacccgguucgccagcguguacgccuggaaccggaagcggaucagcaacugcguggccgacuacagcgugcuguacaacagcgccagcuucagcaccuucaagugcuacggcgugagcccuaccaagcugaacgaccugugcuucaccaacguguacgcugacagcuucgugauccggggcgacgaggugcggcagaucgcccccggccagaccggcaagaucgccgacuacaacuacaagcugcccgacgacuucaccggcugcgugaucgccuggaacagcaacaaccuggacagcaaggugggcggcaacuacaacuaccgguaccggcuguuccguaagagcaaccugaagccauucgagcgggacaucagcaccgagaucuaccaggccggcagcacccccugcaacgguguggagggcuuuaacugcuacuucccccugcagagcuacggcuuccagcccaccaacggcgugggcuaccagcccuaccgggugguggugcugagcuucgagcugcugcacgcccccgccaccgugugcggcccuaaaaagagcaccaaccuggugaagaacaagugcgugaacuucaauuucaacggccugaccggcaccggcgugcugaccgagagcaacaagaaguuccugcccuuccagcaguucggccgggauaucgccgacaccaccgacgcagugcgggacccccagacccuggagauccuggacaucaccccaugcagcuucggcggcgugagcgucaucacccccggcacaaacaccagcaaccagguggccgugcuguaccagggagugaacugcaccgaggugcccguggccauccacgccgaccagcugacccccaccuggcggguguacagcaccggcagcaacguguuccagacccgggccggcugccugaucggcgccgagcacgugaacaacagcuacgagugcgacauccccaucggcgcuggcaucugugccuccuaccagacccagaccaacagcccccggcgggcccggagcguggccagccagagcaucaucgccuacaccaugagccugggcgccgagaacagcguggccuacagcaacaacagcaucgcgaucccuaccaacuucaccauaagcgugaccaccgagaucuuacccgugagcaugaccaagaccagcguggacugcaccauguacaucugcggcgacagcaccgagugcagcaaccugcugcugcaguacggcagcuucugcacccagcugaaccgggcccugaccggcaucgccguggagcaggacaagaacacccaagagguguucgcccaggugaagcagaucuacaagacucccccaaucaaggacuucggcggcuucaacuucagccagauccugcccgaccccagcaagcccagcaagcggagcuucaucgaggaccugcuguucaacaaggugacccuggccgacgccggcuucaucaagcaguacggcgacugccugggggauaucgccgcucgggaccugaucugcgcccagaaguucaacggccugaccgugcugcccccucugcugaccgacgagaugaucgcccaguacaccagcgcccugcuggccggcaccaucaccagcggcuggaccuucggcgccggcgcagcccuucagauccccuucgccaugcagauggccuacagguucaacggcaucggcgugacccagaacgugcuguacgagaaccagaagcugaucgccaaccaguucaacagcgccaucggcaagauccaggacagccugagcagcaccgccagcgcccugggcaagcugcaggacguggugaaccagaacgcucaggcccugaacacccuggugaagcagcugagcagcaacuucggcgccaucagcagcgugcugaaugacauccugucacggcuggaucccccagaggccgaggugcagaucgaccggcugaucaccggccggcugcagagccugcagaccuacgugacccagcagcugauccgggccgccgagauucgggccagcgccaaccuggcagccaccaagaugagcgagugcgugcugggccagagcaagcggguggacuuuugcggcaagggcuaccaccugaugagcuucccccagagcgcuccccacggcgugguguuccugcacgugacauacguccccgcccaggagaagaacuucaccaccgcccccgccaucugccacgacggcaaggcccacuucccccgggagggaguguucgugagcaacggcacccacugguucgugacccagcggaacuucuacgagccucagaucaucaccaccgacaacaccuucgugagcggcaacugcgacguggugaucggcaucgugaacaacaccguguacgacccccuccagcccgagcuggacagcuucaaggaggagcuggacaaguacuucaagaaccacaccagcccagacguggaccugggcgacaucagcggcaucaacgccagcguggugaacauccagaaggagaucgaccggcugaacgagguggccaagaaccugaacgagagccugaucgaccugcaggagcugggcaaguacgagcaguacaucaaguggcccugguacaucuggcugggcuucaucgccggccugaucgccaucgugauggugaccaucaugcugugcugcaugaccagcuguugcagcugccugaagggcugcugcagcugcggcagcugcugcaaguucgacgaggacgacagcgagcccgugcugaagggcgugaagcugcacuacaccugaggacuagucccuguucccagagcccacuuuuuuuucuuuuuuugaaauaaaauagccugucuuucagaucucaaaggcucuuuucagagccaccaaaaaaaaaaaaaaaaaaaaaaaaaaaaaaaaaaaaaaaaaaaaaaaaaaaaaaaaaaaaaaaaaaaaaaaaaaaaaaaaaaaaaaaaaaaaaaaaaaaaa

SEQ ID NO: 23809 - RNA, 4191 nt, Artificial Sequence
  SARS-CoV-2/Wuhan/WIV05/2019__EPI_ISL_402128 spike protein mRNA gc mod (1-1273)(K986P_V987P)
aggagagggcgcuuggcuugcaaggacccugagcugcggcauugaagcacacccaacccaacucgacugaagucagccucacugaaccggaucugagaaucuucucucucugggcuugccagggcucuccgaaccuagcuagcauccucuucaauuccaacuagaaagcuuaccauguucguguuucuggugcugcugccccugguguccagccagugugugaaccugaccaccagaacacagcugccuccagccuacaccaacagcuucaccagaggcguguacuaccccgacaagguguucagauccagcgugcugcacucuacccaggaccuguuccugccuuucuucagcaacgugaccugguuccacgccauccacguguccggcaccaauggcaccaagagauucgacaaccccgugcugcccuucaacgacgggguguacuuugccagcaccgagaaguccaacaucaucagaggcuggaucuucggcaccacacuggacagcaagacccagagccugcugaucgugaacaacgccaccaacguggucaucaaagugugcgaguuccaguucugcaacgaccccuuccugggcgucuacuaccacaagaacaacaagagcuggauggaaagcgaguuccggguguacagcagcgccaacaacugcaccuucgaguacgugucccagccuuuccugauggaccuggaaggcaagcagggcaacuucaagaaccugcgcgaguucguguucaagaacaucgacggcuacuucaaaaucuacagcaagcacaccccuaucaaccucgugcgggaucugccucagggcuucucugcucuggaaccccugguggaucugcccaucggcaucaacaucacccgguuucagacacugcuggcccugcacagaagcuaccugacaccuggcgauagcagcagcggauggacagcuggugccgccgcuuacuaugugggcuaccugcagccuagaaccuuccugcugaaguacaacgagaacggcaccaucaccgacgccguggauugugcucuggauccucugagcgagacaaagugcacccugaaguccuucaccguggaaaagggcaucuaccagaccagcaacuuccgggugcagcccaccgaauccaucgugcgguuccccaauaucaccaaucugugccccuucggcgagguguucaaugccaccagauucgccucuguguacgccuggaaccggaagcggaucagcaauugcguggccgacuacuccgugcuguacaacuccgccagcuucagcaccuucaagugcuacggcguguccccuaccaagcugaacgaccugugcuucacaaacguguacgccgacagcuucgugauccggggagaugaagugcggcagauugccccuggacagacaggcaagaucgccgacuacaacuacaagcugcccgacgacuucaccggcugugugauugccuggaacagcaacaaccuggacuccaaagucggcggcaacuacaauuaccuguaccggcuguuccggaaguccaaucugaagcccuucgagcgggacaucagcaccgaaaucuaucaggccggcagcaccccuugcaacggcguggaaggcuucaacugcuacuucccacugcaguccuacggcuuucagcccacaaauggcgugggcuaucagcccuacagagugguggugcugagcuucgaacugcugcaugcuccugccacagugugcggcccuaagaaaagcaccaaucucgugaagaacaaaugcgugaacuucaacuucaacggccugaccggcaccggcgugcugacagagagcaacaagaaguuccugccauuccagcaguuuggccgggauaucgccgauaccacagacgccguuagagauccccagacacuggaaauccuggacaucaccccaugcagcuucggcggagugucugugaucaccccuggcaccaacaccagcaaucagguggcagugcuguaccaggacgugaacuguaccgaagugcccguggccauucacgccgaucagcugacaccuacauggcggguguacuccaccggcagcaauguguuucagaccagagccggcugucugaucggagccgagcacgugaacaauagcuacgagugcgacauccccaucggcgcuggcaucugugccagcuaccagacacagacaaacagccccagacgggcuagaagcguggccagccagagcaucauugccuacacaaugucucugggcgccgagaacagcguggccuacuccaacaacucuaucgcuauccccaccaacuucaccaucagcgugaccaccgagauccugccuguguccaugaccaagaccagcguggacugcaccauguacaucugcggcgauuccaccgagugcuccaaccugcugcugcaguacggcagcuucugcacccagcugaauagagcccugacagggaucgccguggaacaggacaagaacacccaagagguguucgcccaagugaagcaaaucuacaagaccccuccuaucaaggacuucggcggcuucaauuucagccagauucugcccgauccuagcaagcccagcaagcggagcuucaucgaggaccugcuguucaacaaagugacacuggccgacgccggcuucaucaagcaguauggcgauugucugggcgacauugccgccagggaucugauuugcgcccagaaguuuaacggacugacagugcugccuccucugcugaccgaugagaugaucgcccaguacacaucugcccugcuggccggcacaaucacaagcggcuggacauuuggagcuggcgccgcucugcagauccccuuugcuaugcagauggccuaccgguucaacggcaucggagugacccagaaugugcuguacgagaaccagaagcugaucgccaaccaguucaacagcgccaucggcaagauccaggacagccugagcagcacagcaagcgcccugggaaagcugcaggacguggucaaccagaaugcccaggcacugaacacccuggucaagcagcuguccuccaacuucggcgccaucagcucugugcugaacgauauccugagcagacuggacccuccugaggccgaggugcagaucgacagacugaucacaggcagacugcagagccuccagacauacgugacccagcagcugaucagagccgccgagauuagagccucugccaaucuggccgccaccaagaugucugagugugugcugggccagagcaagagaguggacuuuugcggcaagggcuaccaccugaugagcuucccucagucugccccucacggcgugguguuucugcacgugacauaugugcccgcucaagagaagaauuucaccaccgcuccagccaucugccacgacggcaaagcccacuuuccuagagaaggcguguucguguccaacggcacccauugguucgugacacagcggaacuucuacgagccccagaucaucaccaccgacaacaccuucgugucuggcaacugcgacguugugaucggcauugugaacaauaccguguacgacccucugcagcccgagcuggacagcuucaaagaggaacuggacaaguacuuuaagaaccacacaagccccgacguggaccugggcgauaucagcggaaucaaugccagcgucgugaacauccagaaagagaucgaccggcugaacgagguggccaagaaucugaacgagagccugaucgaccugcaagaacuggggaaguacgagcaguacaucaaguggcccugguacaucuggcugggcuuuaucgccggacugauugccaucgugauggucacaaucaugcuguguugcaugaccagcugcuguagcugccugaagggcuguuguagcuguggcagcugcugcaaguucgacgaggacgauucugagcccgugcugaagggcgugaaacugcacuacaccugaggacuagucccuguucccagagcccacuuuuuuuucuuuuuuugaaauaaaauagccugucuuucagaucucaaaggcucuuuucagagccaccaaaaaaaaaaaaaaaaaaaaaaaaaaaaaaaaaaaaaaaaaaaaaaaaaaaaaaaaaaaaaaaaaaaaaaaaaaaaaaaaaaaaaaaaaaaaaaaaaaaaa

SEQ ID NO: 23810 - RNA, 4191 nt, Artificial Sequence
  SARS-CoV-2/Wuhan/WIV05/2019__EPI_ISL_402128 spike protein mRNA gc mod (1-1273)(K986P_V987P_ D614G)
aggagagggcgcuuggcuugcaaggacccugagcugcggcauugaagcacacccaacccaacucgacugaagucagccucacugaaccggaucugagaaucuucucucucugggcuugccagggcucuccgaaccuagcuagcauccucuucaauuccaacuagaaagcuuaccauguucguguuucuggugcugcugccccugguguccagccagugugugaaccugaccaccagaacacagcugccuccagccuacaccaacagcuucaccagaggcguguacuaccccgacaagguguucagauccagcgugcugcacucuacccaggaccuguuccugccuuucuucagcaacgugaccugguuccacgccauccacguguccggcaccaauggcaccaagagauucgacaaccccgugcugcccuucaacgacgggguguacuuugccagcaccgagaaguccaacaucaucagaggcuggaucuucggcaccacacuggacagcaagacccagagccugcugaucgugaacaacgccaccaacguggucaucaaagugugcgaguuccaguucugcaacgaccccuuccugggcgucuacuaccacaagaacaacaagagcuggauggaaagcgaguuccggguguacagcagcgccaacaacugcaccuucgaguacgugucccagccuuuccugauggaccuggaaggcaagcagggcaacuucaagaaccugcgcgaguucguguucaagaacaucgacggcuacuucaaaaucuacagcaagcacaccccuaucaaccucgugcgggaucugccucagggcuucucugcucuggaaccccugguggaucugcccaucggcaucaacaucacccgguuucagacacugcuggcccugcacagaagcuaccugacaccuggcgauagcagcagcggauggacagcuggugccgccgcuuacuaugugggcuaccugcagccuagaaccuuccugcugaaguacaacgagaacggcaccaucaccgacgccguggauugugcucuggauccucugagcgagacaaagugcacccugaaguccuucaccguggaaaagggcaucuaccagaccagcaacuuccgggugcagcccaccgaauccaucgugcgguuccccaauaucaccaaucugugccccuucggcgagguguucaaugccaccagauucgccucuguguacgccuggaaccggaagcggaucagcaauugcguggccgacuacuccgugcuguacaacuccgccagcuucagcaccuucaagugcuacggcguguccccuaccaagcugaacgaccugugcuucacaaacguguacgccgacagcuucgugauccggggagaugaagugcggcagauugccccuggacagacaggcaagaucgccgacuacaacuacaagcugcccgacgacuucaccggcugugugauugccuggaacagcaacaaccuggacuccaaagucggcggcaacuacaauuaccuguaccggcuguuccggaaguccaaucugaagcccuucgagcgggacaucagcaccgaaaucuaucaggccggcagcaccccuugcaacggcguggaaggcuucaacugcuacuucccacugcaguccuacggcuuucagcccacaaauggcgugggcuaucagcccuacagagugguggugcugagcuucgaacugcugcaugcuccugccacagugugcggcccuaagaaaagcaccaaucucgugaagaacaaaugcgugaacuucaacuucaacggccugaccggcaccggcgugcugacagagagcaacaagaaguuccugccauuccagcaguuuggccgggauaucgccgauaccacagacgccguuagagauccccagacacuggaaauccuggacaucaccccaugcagcuucggcggagugucugugaucaccccuggcaccaacaccagcaaucagguggcagugcuguaccagggcgugaacuguaccgaagugcccguggccauucacgccgaucagcugacaccuacauggcggguguacuccaccggcagcaauguguuucagaccagagccggcugucugaucggagccgagcacgugaacaauagcuacgagugcgacauccccaucggcgcuggcaucugugccagcuaccagacacagacaaacagccccagacgggcuagaagcguggccagccagagcaucauugccuacacaaugucucugggcgccgagaacagcguggccuacuccaacaacucuaucgcuauccccaccaacuucaccaucagcgugaccaccgagauccugccuguguccaugaccaagaccagcguggacugcaccauguacaucugcggcgauuccaccgagugcuccaaccugcugcugcaguacggcagcuucugcacccagcugaauagagcccugacagggaucgccguggaacaggacaagaacacccaagagguguucgcccaagugaagcaaaucuacaagaccccuccuaucaaggacuucggcggcuucaauuucagccagauucugcccgauccuagcaagcccagcaagcggagcuucaucgaggaccugcuguucaacaaagugacacuggccgacgccggcuucaucaagcaguauggcgauugucugggcgacauugccgccagggaucugauuugcgcccagaaguuuaacggacugacagugcugccuccucugcugaccgaugagaugaucgcccaguacacaucugcccugcuggccggcacaaucacaagcggcuggacauuuggagcuggcgccgcucugcagauccccuuugcuaugcagauggccuaccgguucaacggcaucggagugacccagaaugugcuguacgagaaccagaagcugaucgccaaccaguucaacagcgccaucggcaagauccaggacagccugagcagcacagcaagcgcccugggaaagcugcaggacguggucaaccagaaugcccaggcacugaacacccuggucaagcagcuguccuccaacuucggcgccaucagcucugugcugaacgauauccugagcagacuggacccuccugaggccgaggugcagaucgacagacugaucacaggcagacugcagagccuccagacauacgugacccagcagcugaucagagccgccgagauuagagccucugccaaucuggccgccaccaagaugucugagugugugcugggccagagcaagagaguggacuuuugcggcaagggcuaccaccugaugagcuucccucagucugccccucacggcgugguguuucugcacgugacauaugugcccgcucaagagaagaauuucaccaccgcuccagccaucugccacgacggcaaagcccacuuuccuagagaaggcguguucguguccaacggcacccauugguucgugacacagcggaacuucuacgagccccagaucaucaccaccgacaacaccuucgugucuggcaacugcgacguugugaucggcauugugaacaauaccguguacgacccucugcagcccgagcuggacagcuucaaagaggaacuggacaaguacuuuaagaaccacacaagccccgacguggaccugggcgauaucagcggaaucaaugccagcgucgugaacauccagaaagagaucgaccggcugaacgagguggccaagaaucugaacgagagccugaucgaccugcaagaacuggggaaguacgagcaguacaucaaguggcccugguacaucuggcugggcuuuaucgccggacugauugccaucgugauggucacaaucaugcuguguugcaugaccagcugcuguagcugccugaagggcuguuguagcuguggcagcugcugcaaguucgacgaggacgauucugagcccgugcugaagggcgugaaacugcacuacaccugaggacuagucccuguucccagagcccacuuuuuuuucuuuuuuugaaauaaaauagccugucuuucagaucucaaaggcucuuuucagagccaccaaaaaaaaaaaaaaaaaaaaaaaaaaaaaaaaaaaaaaaaaaaaaaaaaaaaaaaaaaaaaaaaaaaaaaaaaaaaaaaaaaaaaaaaaaaaaaaaaaaaa

SEQ ID NO: 23811 - RNA, 4191 nt, Artificial Sequence
  SARS-CoV-2/Wuhan/WIV05/2019__EPI_ISL_402128 spike protein mRNA gc mod (1-1273)(K986P_V987P_A222V_D614G)
aggagagggcgcuuggcuugcaaggacccugagcugcggcauugaagcacacccaacccaacucgacugaagucagccucacugaaccggaucugagaaucuucucucucugggcuugccagggcucuccgaaccuagcuagcauccucuucaauuccaacuagaaagcuuaccauguucguguuucuggugcugcugccccugguguccagccagugugugaaccugaccaccagaacacagcugccuccagccuacaccaacagcuucaccagaggcguguacuaccccgacaagguguucagauccagcgugcugcacucuacccaggaccuguuccugccuuucuucagcaacgugaccugguuccacgccauccacguguccggcaccaauggcaccaagagauucgacaaccccgugcugcccuucaacgacgggguguacuuugccagcaccgagaaguccaacaucaucagaggcuggaucuucggcaccacacuggacagcaagacccagagccugcugaucgugaacaacgccaccaacguggucaucaaagugugcgaguuccaguucugcaacgaccccuuccugggcgucuacuaccacaagaacaacaagagcuggauggaaagcgaguuccggguguacagcagcgccaacaacugcaccuucgaguacgugucccagccuuuccugauggaccuggaaggcaagcagggcaacuucaagaaccugcgcgaguucguguucaagaacaucgacggcuacuucaaaaucuacagcaagcacaccccuaucaaccucgugcgggaucugccucagggcuucucugugcuggaaccccugguggaucugcccaucggcaucaacaucacccgguuucagacacugcuggcccugcacagaagcuaccugacaccuggcgauagcagcagcggauggacagcuggugccgccgcuuacuaugugggcuaccugcagccuagaaccuuccugcugaaguacaacgagaacggcaccaucaccgacgccguggauugugcucuggauccucugagcgagacaaagugcacccugaaguccuucaccguggaaaagggcaucuaccagaccagcaacuuccgggugcagcccaccgaauccaucgugcgguuccccaauaucaccaaucugugccccuucggcgagguguucaaugccaccagauucgccucuguguacgccuggaaccggaagcggaucagcaauugcguggccgacuacuccgugcuguacaacuccgccagcuucagcaccuucaagugcuacggcguguccccuaccaagcugaacgaccugugcuucacaaacguguacgccgacagcuucgugauccggggagaugaagugcggcagauugccccuggacagacaggcaagaucgccgacuacaacuacaagcugcccgacgacuucaccggcugugugauugccuggaacagcaacaaccuggacuccaaagucggcggcaacuacaauuaccuguaccggcuguuccggaaguccaaucugaagcccuucgagcgggacaucagcaccgaaaucuaucaggccggcagcaccccuugcaacggcguggaaggcuucaacugcuacuucccacugcaguccuacggcuuucagcccacaaauggcgugggcuaucagcccuacagagugguggugcugagcuucgaacugcugcaugcuccugccacagugugcggcccuaagaaaagcaccaaucucgugaagaacaaaugcgugaacuucaacuucaacggccugaccggcaccggcgugcugacagagagcaacaagaaguuccugccauuccagcaguuuggccgggauaucgccgauaccacagacgccguuagagauccccagacacuggaaauccuggacaucaccccaugcagcuucggcggagugucugugaucaccccuggcaccaacaccagcaaucagguggcagugcuguaccagggcgugaacuguaccgaagugcccguggccauucacgccgaucagcugacaccuacauggcggguguacuccaccggcagcaauguguuucagaccagagccggcugucugaucggagccgagcacgugaacaauagcuacgagugcgacauccccaucggcgcuggcaucugugccagcuaccagacacagacaaacagccccagacgggcuagaagcguggccagccagagcaucauugccuacacaaugucucugggcgccgagaacagcguggccuacuccaacaacucuaucgcuauccccaccaacuucaccaucagcgugaccaccgagauccugccuguguccaugaccaagaccagcguggacugcaccauguacaucugcggcgauuccaccgagugcuccaaccugcugcugcaguacggcagcuucugcacccagcugaauagagcccugacagggaucgccguggaacaggacaagaacacccaagagguguucgcccaagugaagcaaaucuacaagaccccuccuaucaaggacuucggcggcuucaauuucagccagauucugcccgauccuagcaagcccagcaagcggagcuucaucgaggaccugcuguucaacaaagugacacuggccgacgccggcuucaucaagcaguauggcgauugucugggcgacauugccgccagggaucugauuugcgcccagaaguuuaacggacugacagugcugccuccucugcugaccgaugagaugaucgcccaguacacaucugcccugcuggccggcacaaucacaagcggcuggacauuuggagcuggcgccgcucugcagauccccuuugcuaugcagauggccuaccgguucaacggcaucggagugacccagaaugugcuguacgagaaccagaagcugaucgccaaccaguucaacagcgccaucggcaagauccaggacagccugagcagcacagcaagcgcccugggaaagcugcaggacguggucaaccagaaugcccaggcacugaacacccuggucaagcagcuguccuccaacuucggcgccaucagcucugugcugaacgauauccugagcagacuggacccuccugaggccgaggugcagaucgacagacugaucacaggcagacugcagagccuccagacauacgugacccagcagcugaucagagccgccgagauuagagccucugccaaucuggccgccaccaagaugucugagugugugcugggccagagcaagagaguggacuuuugcggcaagggcuaccaccugaugagcuucccucagucugccccucacggcgugguguuucugcacgugacauaugugcccgcucaagagaagaauuucaccaccgcuccagccaucugccacgacggcaaagcccacuuuccuagagaaggcguguucguguccaacggcacccauugguucgugacacagcggaacuucuacgagccccagaucaucaccaccgacaacaccuucgugucuggcaacugcgacguugugaucggcauugugaacaauaccguguacgacccucugcagcccgagcuggacagcuucaaagaggaacuggacaaguacuuuaagaaccacacaagccccgacguggaccugggcgauaucagcggaaucaaugccagcgucgugaacauccagaaagagaucgaccggcugaacgagguggccaagaaucugaacgagagccugaucgaccugcaagaacuggggaaguacgagcaguacaucaaguggcccugguacaucuggcugggcuuuaucgccggacugauugccaucgugauggucacaaucaugcuguguugcaugaccagcugcuguagcugccugaagggcuguuguagcuguggcagcugcugcaaguucgacgaggacgauucugagcccgugcugaagggcgugaaacugcacuacaccugaggacuagucccuguucccagagcccacuuuuuuuucuuuuuuugaaauaaaauagccugucuuucagaucucaaaggcucuuuucagagccaccaaaaaaaaaaaaaaaaaaaaaaaaaaaaaaaaaaaaaaaaaaaaaaaaaaaaaaaaaaaaaaaaaaaaaaaaaaaaaaaaaaaaaaaaaaaaaaaaaaaaa

SEQ ID NO: 23812 - RNA, 4191 nt, Artificial Sequence
  SARS-CoV-2/Wuhan/WIV05/2019__EPI_ISL_402128 spike protein mRNA gc mod (1-1273)(K986P_V987P_N439K_D614G)
aggagagggcgcuuggcuugcaaggacccugagcugcggcauugaagcacacccaacccaacucgacugaagucagccucacugaaccggaucugagaaucuucucucucugggcuugccagggcucuccgaaccuagcuagcauccucuucaauuccaacuagaaagcuuaccauguucguguuucuggugcugcugccccugguguccagccagugugugaaccugaccaccagaacacagcugccuccagccuacaccaacagcuucaccagaggcguguacuaccccgacaagguguucagauccagcgugcugcacucuacccaggaccuguuccugccuuucuucagcaacgugaccugguuccacgccauccacguguccggcaccaauggcaccaagagauucgacaaccccgugcugcccuucaacgacgggguguacuuugccagcaccgagaaguccaacaucaucagaggcuggaucuucggcaccacacuggacagcaagacccagagccugcugaucgugaacaacgccaccaacguggucaucaaagugugcgaguuccaguucugcaacgaccccuuccugggcgucuacuaccacaagaacaacaagagcuggauggaaagcgaguuccggguguacagcagcgccaacaacugcaccuucgaguacgugucccagccuuuccugauggaccuggaaggcaagcagggcaacuucaagaaccugcgcgaguucguguucaagaacaucgacggcuacuucaaaaucuacagcaagcacaccccuaucaaccucgugcgggaucugccucagggcuucucugcucuggaaccccugguggaucugcccaucggcaucaacaucacccgguuucagacacugcuggcccugcacagaagcuaccugacaccuggcgauagcagcagcggauggacagcuggugccgccgcuuacuaugugggcuaccugcagccuagaaccuuccugcugaaguacaacgagaacggcaccaucaccgacgccguggauugugcucuggauccucugagcgagacaaagugcacccugaaguccuucaccguggaaaagggcaucuaccagaccagcaacuuccgggugcagcccaccgaauccaucgugcgguuccccaauaucaccaaucugugccccuucggcgagguguucaaugccaccagauucgccucuguguacgccuggaaccggaagcggaucagcaauugcguggccgacuacuccgugcuguacaacuccgccagcuucagcaccuucaagugcuacggcguguccccuaccaagcugaacgaccugugcuucacaaacguguacgccgacagcuucgugauccggggagaugaagugcggcagauugccccuggacagacaggcaagaucgccgacuacaacuacaagcugcccgacgacuucaccggcugugugauugccuggaacagcaagaaccuggacuccaaagucggcggcaacuacaauuaccuguaccggcuguuccggaaguccaaucugaagcccuucgagcgggacaucagcaccgaaaucuaucaggccggcagcaccccuugcaacggcguggaaggcuucaacugcuacuucccacugcaguccuacggcuuucagcccacaaauggcgugggcuaucagcccuacagagugguggugcugagcuucgaacugcugcaugcuccugccacagugugcggcccuaagaaaagcaccaaucucgugaagaacaaaugcgugaacuucaacuucaacggccugaccggcaccggcgugcugacagagagcaacaagaaguuccugccauuccagcaguuuggccgggauaucgccgauaccacagacgccguuagagauccccagacacuggaaauccuggacaucaccccaugcagcuucggcggagugucugugaucaccccuggcaccaacaccagcaaucagguggcagugcuguaccagggcgugaacuguaccgaagugcccguggccauucacgccgaucagcugacaccuacauggcggguguacuccaccggcagcaauguguuucagaccagagccggcugucugaucggagccgagcacgugaacaauagcuacgagugcgacauccccaucggcgcuggcaucugugccagcuaccagacacagacaaacagccccagacgggcuagaagcguggccagccagagcaucauugccuacacaaugucucugggcgccgagaacagcguggccuacuccaacaacucuaucgcuauccccaccaacuucaccaucagcgugaccaccgagauccugccuguguccaugaccaagaccagcguggacugcaccauguacaucugcggcgauuccaccgagugcuccaaccugcugcugcaguacggcagcuucugcacccagcugaauagagcccugacagggaucgccguggaacaggacaagaacacccaagagguguucgcccaagugaagcaaaucuacaagaccccuccuaucaaggacuucggcggcuucaauuucagccagauucugcccgauccuagcaagcccagcaagcggagcuucaucgaggaccugcuguucaacaaagugacacuggccgacgccggcuucaucaagcaguauggcgauugucugggcgacauugccgccagggaucugauuugcgcccagaaguuuaacggacugacagugcugccuccucugcugaccgaugagaugaucgcccaguacacaucugcccugcuggccggcacaaucacaagcggcuggacauuuggagcuggcgccgcucugcagauccccuuugcuaugcagauggccuaccgguucaacggcaucggagugacccagaaugugcuguacgagaaccagaagcugaucgccaaccaguucaacagcgccaucggcaagauccaggacagccugagcagcacagcaagcgcccugggaaagcugcaggacguggucaaccagaaugcccaggcacugaacacccuggucaagcagcuguccuccaacuucggcgccaucagcucugugcugaacgauauccugagcagacuggacccuccugaggccgaggugcagaucgacagacugaucacaggcagacugcagagccuccagacauacgugacccagcagcugaucagagccgccgagauuagagccucugccaaucuggccgccaccaagaugucugagugugugcugggccagagcaagagaguggacuuuugcggcaagggcuaccaccugaugagcuucccucagucugccccucacggcgugguguuucugcacgugacauaugugcccgcucaagagaagaauuucaccaccgcuccagccaucugccacgacggcaaagcccacuuuccuagagaaggcguguucguguccaacggcacccauugguucgugacacagcggaacuucuacgagccccagaucaucaccaccgacaacaccuucgugucuggcaacugcgacguugugaucggcauugugaacaauaccguguacgacccucugcagcccgagcuggacagcuucaaagaggaacuggacaaguacuuuaagaaccacacaagccccgacguggaccugggcgauaucagcggaaucaaugccagcgucgugaacauccagaaagagaucgaccggcugaacgagguggccaagaaucugaacgagagccugaucgaccugcaagaacuggggaaguacgagcaguacaucaaguggcccugguacaucuggcugggcuuuaucgccggacugauugccaucgugauggucacaaucaugcuguguugcaugaccagcugcuguagcugccugaagggcuguuguagcuguggcagcugcugcaaguucgacgaggacgauucugagcccgugcugaagggcgugaaacugcacuacaccugaggacuagucccuguucccagagcccacuuuuuuuucuuuuuuugaaauaaaauagccugucuuucagaucucaaaggcucuuuucagagccaccaaaaaaaaaaaaaaaaaaaaaaaaaaaaaaaaaaaaaaaaaaaaaaaaaaaaaaaaaaaaaaaaaaaaaaaaaaaaaaaaaaaaaaaaaaaaaaaaaaaaa

SEQ ID NO: 23813 - RNA, 4191 nt, Artificial Sequence
  SARS-CoV-2/Wuhan/WIV05/2019__EPI_ISL_402128 spike protein mRNA gc mod (1-1273)(K986P_V987P_S477N_D614G)
aggagagggcgcuuggcuugcaaggacccugagcugcggcauugaagcacacccaacccaacucgacugaagucagccucacugaaccggaucugagaaucuucucucucugggcuugccagggcucuccgaaccuagcuagcauccucuucaauuccaacuagaaagcuuaccauguucguguuucuggugcugcugccccugguguccagccagugugugaaccugaccaccagaacacagcugccuccagccuacaccaacagcuucaccagaggcguguacuaccccgacaagguguucagauccagcgugcugcacucuacccaggaccuguuccugccuuucuucagcaacgugaccugguuccacgccauccacguguccggcaccaauggcaccaagagauucgacaaccccgugcugcccuucaacgacgggguguacuuugccagcaccgagaaguccaacaucaucagaggcuggaucuucggcaccacacuggacagcaagacccagagccugcugaucgugaacaacgccaccaacguggucaucaaagugugcgaguuccaguucugcaacgaccccuuccugggcgucuacuaccacaagaacaacaagagcuggauggaaagcgaguuccggguguacagcagcgccaacaacugcaccuucgaguacgugucccagccuuuccugauggaccuggaaggcaagcagggcaacuucaagaaccugcgcgaguucguguucaagaacaucgacggcuacuucaaaaucuacagcaagcacaccccuaucaaccucgugcgggaucugccucagggcuucucugcucuggaaccccugguggaucugcccaucggcaucaacaucacccgguuucagacacugcuggcccugcacagaagcuaccugacaccuggcgauagcagcagcggauggacagcuggugccgccgcuuacuaugugggcuaccugcagccuagaaccuuccugcugaaguacaacgagaacggcaccaucaccgacgccguggauugugcucuggauccucugagcgagacaaagugcacccugaaguccuucaccguggaaaagggcaucuaccagaccagcaacuuccgggugcagcccaccgaauccaucgugcgguuccccaauaucaccaaucugugccccuucggcgagguguucaaugccaccagauucgccucuguguacgccuggaaccggaagcggaucagcaauugcguggccgacuacuccgugcuguacaacuccgccagcuucagcaccuucaagugcuacggcguguccccuaccaagcugaacgaccugugcuucacaaacguguacgccgacagcuucgugauccggggagaugaagugcggcagauugccccuggacagacaggcaagaucgccgacuacaacuacaagcugcccgacgacuucaccggcugugugauugccuggaacagcaacaaccuggacuccaaagucggcggcaacuacaauuaccuguaccggcuguuccggaaguccaaucugaagcccuucgagcgggacaucagcaccgaaaucuaucaggccggcaacaccccuugcaacggcguggaaggcuucaacugcuacuucccacugcaguccuacggcuuucagcccacaaauggcgugggcuaucagcccuacagagugguggugcugagcuucgaacugcugcaugcuccugccacagugugcggcccuaagaaaagcaccaaucucgugaagaacaaaugcgugaacuucaacuucaacggccugaccggcaccggcgugcugacagagagcaacaagaaguuccugccauuccagcaguuuggccgggauaucgccgauaccacagacgccguuagagauccccagacacuggaaauccuggacaucaccccaugcagcuucggcggagugucugugaucaccccuggcaccaacaccagcaaucagguggcagugcuguaccagggcgugaacuguaccgaagugcccguggccauucacgccgaucagcugacaccuacauggcggguguacuccaccggcagcaauguguuucagaccagagccggcugucugaucggagccgagcacgugaacaauagcuacgagugcgacauccccaucggcgcuggcaucugugccagcuaccagacacagacaaacagccccagacgggcuagaagcguggccagccagagcaucauugccuacacaaugucucugggcgccgagaacagcguggccuacuccaacaacucuaucgcuauccccaccaacuucaccaucagcgugaccaccgagauccugccuguguccaugaccaagaccagcguggacugcaccauguacaucugcggcgauuccaccgagugcuccaaccugcugcugcaguacggcagcuucugcacccagcugaauagagcccugacagggaucgccguggaacaggacaagaacacccaagagguguucgcccaagugaagcaaaucuacaagaccccuccuaucaaggacuucggcggcuucaauuucagccagauucugcccgauccuagcaagcccagcaagcggagcuucaucgaggaccugcuguucaacaaagugacacuggccgacgccggcuucaucaagcaguauggcgauugucugggcgacauugccgccagggaucugauuugcgcccagaaguuuaacggacugacagugcugccuccucugcugaccgaugagaugaucgcccaguacacaucugcccugcuggccggcacaaucacaagcggcuggacauuuggagcuggcgccgcucugcagauccccuuugcuaugcagauggccuaccgguucaacggcaucggagugacccagaaugugcuguacgagaaccagaagcugaucgccaaccaguucaacagcgccaucggcaagauccaggacagccugagcagcacagcaagcgcccugggaaagcugcaggacguggucaaccagaaugcccaggcacugaacacccuggucaagcagcuguccuccaacuucggcgccaucagcucugugcugaacgauauccugagcagacuggacccuccugaggccgaggugcagaucgacagacugaucacaggcagacugcagagccuccagacauacgugacccagcagcugaucagagccgccgagauuagagccucugccaaucuggccgccaccaagaugucugagugugugcugggccagagcaagagaguggacuuuugcggcaagggcuaccaccugaugagcuucccucagucugccccucacggcgugguguuucugcacgugacauaugugcccgcucaagagaagaauuucaccaccgcuccagccaucugccacgacggcaaagcccacuuuccuagagaaggcguguucguguccaacggcacccauugguucgugacacagcggaacuucuacgagccccagaucaucaccaccgacaacaccuucgugucuggcaacugcgacguugugaucggcauugugaacaauaccguguacgacccucugcagcccgagcuggacagcuucaaagaggaacuggacaaguacuuuaagaaccacacaagccccgacguggaccugggcgauaucagcggaaucaaugccagcgucgugaacauccagaaagagaucgaccggcugaacgagguggccaagaaucugaacgagagccugaucgaccugcaagaacuggggaaguacgagcaguacaucaaguggcccugguacaucuggcugggcuuuaucgccggacugauugccaucgugauggucacaaucaugcuguguugcaugaccagcugcuguagcugccugaagggcuguuguagcuguggcagcugcugcaaguucgacgaggacgauucugagcccgugcugaagggcgugaaacugcacuacaccugaggacuagucccuguucccagagcccacuuuuuuuucuuuuuuugaaauaaaauagccugucuuucagaucucaaaggcucuuuucagagccaccaaaaaaaaaaaaaaaaaaaaaaaaaaaaaaaaaaaaaaaaaaaaaaaaaaaaaaaaaaaaaaaaaaaaaaaaaaaaaaaaaaaaaaaaaaaaaaaaaaaaa

SEQ ID NO: 23814 - RNA, 4191 nt, Artificial Sequence
  SARS-CoV-2/Wuhan/WIV05/2019__EPI_ISL_402128 spike protein mRNA gc mod (1-1273)(K986P_V987P_N501Y_D614G)
aggagagggcgcuuggcuugcaaggacccugagcugcggcauugaagcacacccaacccaacucgacugaagucagccucacugaaccggaucugagaaucuucucucucugggcuugccagggcucuccgaaccuagcuagcauccucuucaauuccaacuagaaagcuuaccauguucguguuucuggugcugcugccccugguguccagccagugugugaaccugaccaccagaacacagcugccuccagccuacaccaacagcuucaccagaggcguguacuaccccgacaagguguucagauccagcgugcugcacucuacccaggaccuguuccugccuuucuucagcaacgugaccugguuccacgccauccacguguccggcaccaauggcaccaagagauucgacaaccccgugcugcccuucaacgacgggguguacuuugccagcaccgagaaguccaacaucaucagaggcuggaucuucggcaccacacuggacagcaagacccagagccugcugaucgugaacaacgccaccaacguggucaucaaagugugcgaguuccaguucugcaacgaccccuuccugggcgucuacuaccacaagaacaacaagagcuggauggaaagcgaguuccggguguacagcagcgccaacaacugcaccuucgaguacgugucccagccuuuccugauggaccuggaaggcaagcagggcaacuucaagaaccugcgcgaguucguguucaagaacaucgacggcuacuucaaaaucuacagcaagcacaccccuaucaaccucgugcgggaucugccucagggcuucucugcucuggaaccccugguggaucugcccaucggcaucaacaucacccgguuucagacacugcuggcccugcacagaagcuaccugacaccuggcgauagcagcagcggauggacagcuggugccgccgcuuacuaugugggcuaccugcagccuagaaccuuccugcugaaguacaacgagaacggcaccaucaccgacgccguggauugugcucuggauccucugagcgagacaaagugcacccugaaguccuucaccguggaaaagggcaucuaccagaccagcaacuuccgggugcagcccaccgaauccaucgugcgguuccccaauaucaccaaucugugccccuucggcgagguguucaaugccaccagauucgccucuguguacgccuggaaccggaagcggaucagcaauugcguggccgacuacuccgugcuguacaacuccgccagcuucagcaccuucaagugcuacggcguguccccuaccaagcugaacgaccugugcuucacaaacguguacgccgacagcuucgugauccggggagaugaagugcggcagauugccccuggacagacaggcaagaucgccgacuacaacuacaagcugcccgacgacuucaccggcugugugauugccuggaacagcaacaaccuggacuccaaagucggcggcaacuacaauuaccuguaccggcuguuccggaaguccaaucugaagcccuucgagcgggacaucagcaccgaaaucuaucaggccggcagcaccccuugcaacggcguggaaggcuucaacugcuacuucccacugcaguccuacggcuuucagcccacauacggcgugggcuaucagcccuacagagugguggugcugagcuucgaacugcugcaugcuccugccacagugugcggcccuaagaaaagcaccaaucucgugaagaacaaaugcgugaacuucaacuucaacggccugaccggcaccggcgugcugacagagagcaacaagaaguuccugccauuccagcaguuuggccgggauaucgccgauaccacagacgccguuagagauccccagacacuggaaauccuggacaucaccccaugcagcuucggcggagugucugugaucaccccuggcaccaacaccagcaaucagguggcagugcuguaccagggcgugaacuguaccgaagugcccguggccauucacgccgaucagcugacaccuacauggcggguguacuccaccggcagcaauguguuucagaccagagccggcugucugaucggagccgagcacgugaacaauagcuacgagugcgacauccccaucggcgcuggcaucugugccagcuaccagacacagacaaacagccccagacgggcuagaagcguggccagccagagcaucauugccuacacaaugucucugggcgccgagaacagcguggccuacuccaacaacucuaucgcuauccccaccaacuucaccaucagcgugaccaccgagauccugccuguguccaugaccaagaccagcguggacugcaccauguacaucugcggcgauuccaccgagugcuccaaccugcugcugcaguacggcagcuucugcacccagcugaauagagcccugacagggaucgccguggaacaggacaagaacacccaagagguguucgcccaagugaagcaaaucuacaagaccccuccuaucaaggacuucggcggcuucaauuucagccagauucugcccgauccuagcaagcccagcaagcggagcuucaucgaggaccugcuguucaacaaagugacacuggccgacgccggcuucaucaagcaguauggcgauugucugggcgacauugccgccagggaucugauuugcgcccagaaguuuaacggacugacagugcugccuccucugcugaccgaugagaugaucgcccaguacacaucugcccugcuggccggcacaaucacaagcggcuggacauuuggagcuggcgccgcucugcagauccccuuugcuaugcagauggccuaccgguucaacggcaucggagugacccagaaugugcuguacgagaaccagaagcugaucgccaaccaguucaacagcgccaucggcaagauccaggacagccugagcagcacagcaagcgcccugggaaagcugcaggacguggucaaccagaaugcccaggcacugaacacccuggucaagcagcuguccuccaacuucggcgccaucagcucugugcugaacgauauccugagcagacuggacccuccugaggccgaggugcagaucgacagacugaucacaggcagacugcagagccuccagacauacgugacccagcagcugaucagagccgccgagauuagagccucugccaaucuggccgccaccaagaugucugagugugugcugggccagagcaagagaguggacuuuugcggcaagggcuaccaccugaugagcuucccucagucugccccucacggcgugguguuucugcacgugacauaugugcccgcucaagagaagaauuucaccaccgcuccagccaucugccacgacggcaaagcccacuuuccuagagaaggcguguucguguccaacggcacccauugguucgugacacagcggaacuucuacgagccccagaucaucaccaccgacaacaccuucgugucuggcaacugcgacguugugaucggcauugugaacaauaccguguacgacccucugcagcccgagcuggacagcuucaaagaggaacuggacaaguacuuuaagaaccacacaagccccgacguggaccugggcgauaucagcggaaucaaugccagcgucgugaacauccagaaagagaucgaccggcugaacgagguggccaagaaucugaacgagagccugaucgaccugcaagaacuggggaaguacgagcaguacaucaaguggcccugguacaucuggcugggcuuuaucgccggacugauugccaucgugauggucacaaucaugcuguguugcaugaccagcugcuguagcugccugaagggcuguuguagcuguggcagcugcugcaaguucgacgaggacgauucugagcccgugcugaagggcgugaaacugcacuacaccugaggacuagucccuguucccagagcccacuuuuuuuucuuuuuuugaaauaaaauagccugucuuucagaucucaaaggcucuuuucagagccaccaaaaaaaaaaaaaaaaaaaaaaaaaaaaaaaaaaaaaaaaaaaaaaaaaaaaaaaaaaaaaaaaaaaaaaaaaaaaaaaaaaaaaaaaaaaaaaaaaaaaa

SEQ ID NO: 23815 - RNA, 4185 nt, Artificial Sequence
  SARS-CoV-2/Wuhan/WIV05/2019__EPI_ISL_402128 spike protein mRNA gc mod (1-1273)(K986P_V987P_H69del_V70del_D614G)
aggagagggcgcuuggcuugcaaggacccugagcugcggcauugaagcacacccaacccaacucgacugaagucagccucacugaaccggaucugagaaucuucucucucugggcuugccagggcucuccgaaccuagcuagcauccucuucaauuccaacuagaaagcuuaccauguucguguuucuggugcugcugccccugguguccagccagugugugaaccugaccaccagaacacagcugccuccagccuacaccaacagcuucaccagaggcguguacuaccccgacaagguguucagauccagcgugcugcacucuacccaggaccuguuccugccuuucuucagcaacgugaccugguuccacgccaucuccggcaccaauggcaccaagagauucgacaaccccgugcugcccuucaacgacgggguguacuuugccagcaccgagaaguccaacaucaucagaggcuggaucuucggcaccacacuggacagcaagacccagagccugcugaucgugaacaacgccaccaacguggucaucaaagugugcgaguuccaguucugcaacgaccccuuccugggcgucuacuaccacaagaacaacaagagcuggauggaaagcgaguuccggguguacagcagcgccaacaacugcaccuucgaguacgugucccagccuuuccugauggaccuggaaggcaagcagggcaacuucaagaaccugcgcgaguucguguucaagaacaucgacggcuacuucaaaaucuacagcaagcacaccccuaucaaccucgugcgggaucugccucagggcuucucugcucuggaaccccugguggaucugcccaucggcaucaacaucacccgguuucagacacugcuggcccugcacagaagcuaccugacaccuggcgauagcagcagcggauggacagcuggugccgccgcuuacuaugugggcuaccugcagccuagaaccuuccugcugaaguacaacgagaacggcaccaucaccgacgccguggauugugcucuggauccucugagcgagacaaagugcacccugaaguccuucaccguggaaaagggcaucuaccagaccagcaacuuccgggugcagcccaccgaauccaucgugcgguuccccaauaucaccaaucugugccccuucggcgagguguucaaugccaccagauucgccucuguguacgccuggaaccggaagcggaucagcaauugcguggccgacuacuccgugcuguacaacuccgccagcuucagcaccuucaagugcuacggcguguccccuaccaagcugaacgaccugugcuucacaaacguguacgccgacagcuucgugauccggggagaugaagugcggcagauugccccuggacagacaggcaagaucgccgacuacaacuacaagcugcccgacgacuucaccggcugugugauugccuggaacagcaacaaccuggacuccaaagucggcggcaacuacaauuaccuguaccggcuguuccggaaguccaaucugaagcccuucgagcgggacaucagcaccgaaaucuaucaggccggcagcaccccuugcaacggcguggaaggcuucaacugcuacuucccacugcaguccuacggcuuucagcccacaaauggcgugggcuaucagcccuacagagugguggugcugagcuucgaacugcugcaugcuccugccacagugugcggcccuaagaaaagcaccaaucucgugaagaacaaaugcgugaacuucaacuucaacggccugaccggcaccggcgugcugacagagagcaacaagaaguuccugccauuccagcaguuuggccgggauaucgccgauaccacagacgccguuagagauccccagacacuggaaauccuggacaucaccccaugcagcuucggcggagugucugugaucaccccuggcaccaacaccagcaaucagguggcagugcuguaccagggcgugaacuguaccgaagugcccguggccauucacgccgaucagcugacaccuacauggcggguguacuccaccggcagcaauguguuucagaccagagccggcugucugaucggagccgagcacgugaacaauagcuacgagugcgacauccccaucggcgcuggcaucugugccagcuaccagacacagacaaacagccccagacgggcuagaagcguggccagccagagcaucauugccuacacaaugucucugggcgccgagaacagcguggccuacuccaacaacucuaucgcuauccccaccaacuucaccaucagcgugaccaccgagauccugccuguguccaugaccaagaccagcguggacugcaccauguacaucugcggcgauuccaccgagugcuccaaccugcugcugcaguacggcagcuucugcacccagcugaauagagcccugacagggaucgccguggaacaggacaagaacacccaagagguguucgcccaagugaagcaaaucuacaagaccccuccuaucaaggacuucggcggcuucaauuucagccagauucugcccgauccuagcaagcccagcaagcggagcuucaucgaggaccugcuguucaacaaagugacacuggccgacgccggcuucaucaagcaguauggcgauugucugggcgacauugccgccagggaucugauuugcgcccagaaguuuaacggacugacagugcugccuccucugcugaccgaugagaugaucgcccaguacacaucugcccugcuggccggcacaaucacaagcggcuggacauuuggagcuggcgccgcucugcagauccccuuugcuaugcagauggccuaccgguucaacggcaucggagugacccagaaugugcuguacgagaaccagaagcugaucgccaaccaguucaacagcgccaucggcaagauccaggacagccugagcagcacagcaagcgcccugggaaagcugcaggacguggucaaccagaaugcccaggcacugaacacccuggucaagcagcuguccuccaacuucggcgccaucagcucugugcugaacgauauccugagcagacuggacccuccugaggccgaggugcagaucgacagacugaucacaggcagacugcagagccuccagacauacgugacccagcagcugaucagagccgccgagauuagagccucugccaaucuggccgccaccaagaugucugagugugugcugggccagagcaagagaguggacuuuugcggcaagggcuaccaccugaugagcuucccucagucugccccucacggcgugguguuucugcacgugacauaugugcccgcucaagagaagaauuucaccaccgcuccagccaucugccacgacggcaaagcccacuuuccuagagaaggcguguucguguccaacggcacccauugguucgugacacagcggaacuucuacgagccccagaucaucaccaccgacaacaccuucgugucuggcaacugcgacguugugaucggcauugugaacaauaccguguacgacccucugcagcccgagcuggacagcuucaaagaggaacuggacaaguacuuuaagaaccacacaagccccgacguggaccugggcgauaucagcggaaucaaugccagcgucgugaacauccagaaagagaucgaccggcugaacgagguggccaagaaucugaacgagagccugaucgaccugcaagaacuggggaaguacgagcaguacaucaaguggcccugguacaucuggcugggcuuuaucgccggacugauugccaucgugauggucacaaucaugcuguguugcaugaccagcugcuguagcugccugaagggcuguuguagcuguggcagcugcugcaaguucgacgaggacgauucugagcccgugcugaagggcgugaaacugcacuacaccugaggacuagucccuguucccagagcccacuuuuuuuucuuuuuuugaaauaaaauagccugucuuucagaucucaaaggcucuuuucagagccaccaaaaaaaaaaaaaaaaaaaaaaaaaaaaaaaaaaaaaaaaaaaaaaaaaaaaaaaaaaaaaaaaaaaaaaaaaaaaaaaaaaaaaaaaaaaaaaaaaaaaa

SEQ ID NO: 23816 - RNA, 4191 nt, Artificial Sequence
  SARS-CoV-2/Wuhan/WIV05/2019__EPI_ISL_402128 spike protein mRNA gc mod (1-1273)(K986P_V987P_Y453F_D614G)
aggagagggcgcuuggcuugcaaggacccugagcugcggcauugaagcacacccaacccaacucgacugaagucagccucacugaaccggaucugagaaucuucucucucugggcuugccagggcucuccgaaccuagcuagcauccucuucaauuccaacuagaaagcuuaccauguucguguuucuggugcugcugccccugguguccagccagugugugaaccugaccaccagaacacagcugccuccagccuacaccaacagcuucaccagaggcguguacuaccccgacaagguguucagauccagcgugcugcacucuacccaggaccuguuccugccuuucuucagcaacgugaccugguuccacgccauccacguguccggcaccaauggcaccaagagauucgacaaccccgugcugcccuucaacgacgggguguacuuugccagcaccgagaaguccaacaucaucagaggcuggaucuucggcaccacacuggacagcaagacccagagccugcugaucgugaacaacgccaccaacguggucaucaaagugugcgaguuccaguucugcaacgaccccuuccugggcgucuacuaccacaagaacaacaagagcuggauggaaagcgaguuccggguguacagcagcgccaacaacugcaccuucgaguacgugucccagccuuuccugauggaccuggaaggcaagcagggcaacuucaagaaccugcgcgaguucguguucaagaacaucgacggcuacuucaaaaucuacagcaagcacaccccuaucaaccucgugcgggaucugccucagggcuucucugcucuggaaccccugguggaucugcccaucggcaucaacaucacccgguuucagacacugcuggcccugcacagaagcuaccugacaccuggcgauagcagcagcggauggacagcuggugccgccgcuuacuaugugggcuaccugcagccuagaaccuuccugcugaaguacaacgagaacggcaccaucaccgacgccguggauugugcucuggauccucugagcgagacaaagugcacccugaaguccuucaccguggaaaagggcaucuaccagaccagcaacuuccgggugcagcccaccgaauccaucgugcgguuccccaauaucaccaaucugugccccuucggcgagguguucaaugccaccagauucgccucuguguacgccuggaaccggaagcggaucagcaauugcguggccgacuacuccgugcuguacaacuccgccagcuucagcaccuucaagugcuacggcguguccccuaccaagcugaacgaccugugcuucacaaacguguacgccgacagcuucgugauccggggagaugaagugcggcagauugccccuggacagacaggcaagaucgccgacuacaacuacaagcugcccgacgacuucaccggcugugugauugccuggaacagcaacaaccuggacuccaaagucggcggcaacuacaauuaccuguuccggcuguuccggaaguccaaucugaagcccuucgagcgggacaucagcaccgaaaucuaucaggccggcagcaccccuugcaacggcguggaaggcuucaacugcuacuucccacugcaguccuacggcuuucagcccacaaauggcgugggcuaucagcccuacagagugguggugcugagcuucgaacugcugcaugcuccugccacagugugcggcccuaagaaaagcaccaaucucgugaagaacaaaugcgugaacuucaacuucaacggccugaccggcaccggcgugcugacagagagcaacaagaaguuccugccauuccagcaguuuggccgggauaucgccgauaccacagacgccguuagagauccccagacacuggaaauccuggacaucaccccaugcagcuucggcggagugucugugaucaccccuggcaccaacaccagcaaucagguggcagugcuguaccagggcgugaacuguaccgaagugcccguggccauucacgccgaucagcugacaccuacauggcggguguacuccaccggcagcaauguguuucagaccagagccggcugucugaucggagccgagcacgugaacaauagcuacgagugcgacauccccaucggcgcuggcaucugugccagcuaccagacacagacaaacagccccagacgggcuagaagcguggccagccagagcaucauugccuacacaaugucucugggcgccgagaacagcguggccuacuccaacaacucuaucgcuauccccaccaacuucaccaucagcgugaccaccgagauccugccuguguccaugaccaagaccagcguggacugcaccauguacaucugcggcgauuccaccgagugcuccaaccugcugcugcaguacggcagcuucugcacccagcugaauagagcccugacagggaucgccguggaacaggacaagaacacccaagagguguucgcccaagugaagcaaaucuacaagaccccuccuaucaaggacuucggcggcuucaauuucagccagauucugcccgauccuagcaagcccagcaagcggagcuucaucgaggaccugcuguucaacaaagugacacuggccgacgccggcuucaucaagcaguauggcgauugucugggcgacauugccgccagggaucugauuugcgcccagaaguuuaacggacugacagugcugccuccucugcugaccgaugagaugaucgcccaguacacaucugcccugcuggccggcacaaucacaagcggcuggacauuuggagcuggcgccgcucugcagauccccuuugcuaugcagauggccuaccgguucaacggcaucggagugacccagaaugugcuguacgagaaccagaagcugaucgccaaccaguucaacagcgccaucggcaagauccaggacagccugagcagcacagcaagcgcccugggaaagcugcaggacguggucaaccagaaugcccaggcacugaacacccuggucaagcagcuguccuccaacuucggcgccaucagcucugugcugaacgauauccugagcagacuggacccuccugaggccgaggugcagaucgacagacugaucacaggcagacugcagagccuccagacauacgugacccagcagcugaucagagccgccgagauuagagccucugccaaucuggccgccaccaagaugucugagugugugcugggccagagcaagagaguggacuuuugcggcaagggcuaccaccugaugagcuucccucagucugccccucacggcgugguguuucugcacgugacauaugugcccgcucaagagaagaauuucaccaccgcuccagccaucugccacgacggcaaagcccacuuuccuagagaaggcguguucguguccaacggcacccauugguucgugacacagcggaacuucuacgagccccagaucaucaccaccgacaacaccuucgugucuggcaacugcgacguugugaucggcauugugaacaauaccguguacgacccucugcagcccgagcuggacagcuucaaagaggaacuggacaaguacuuuaagaaccacacaagccccgacguggaccugggcgauaucagcggaaucaaugccagcgucgugaacauccagaaagagaucgaccggcugaacgagguggccaagaaucugaacgagagccugaucgaccugcaagaacuggggaaguacgagcaguacaucaaguggcccugguacaucuggcugggcuuuaucgccggacugauugccaucgugauggucacaaucaugcuguguugcaugaccagcugcuguagcugccugaagggcuguuguagcuguggcagcugcugcaaguucgacgaggacgauucugagcccgugcugaagggcgugaaacugcacuacaccugaggacuagucccuguucccagagcccacuuuuuuuucuuuuuuugaaauaaaauagccugucuuucagaucucaaaggcucuuuucagagccaccaaaaaaaaaaaaaaaaaaaaaaaaaaaaaaaaaaaaaaaaaaaaaaaaaaaaaaaaaaaaaaaaaaaaaaaaaaaaaaaaaaaaaaaaaaaaaaaaaaaaa

SEQ ID NO: 23817 - RNA, 4191 nt, Artificial Sequence
  SARS-CoV-2/Wuhan/WIV05/2019__EPI_ISL_402128 spike protein mRNA gc mod (1-1273)(K986P_V987P_D614G_I692V)
aggagagggcgcuuggcuugcaaggacccugagcugcggcauugaagcacacccaacccaacucgacugaagucagccucacugaaccggaucugagaaucuucucucucugggcuugccagggcucuccgaaccuagcuagcauccucuucaauuccaacuagaaagcuuaccauguucguguuucuggugcugcugccccugguguccagccagugugugaaccugaccaccagaacacagcugccuccagccuacaccaacagcuucaccagaggcguguacuaccccgacaagguguucagauccagcgugcugcacucuacccaggaccuguuccugccuuucuucagcaacgugaccugguuccacgccauccacguguccggcaccaauggcaccaagagauucgacaaccccgugcugcccuucaacgacgggguguacuuugccagcaccgagaaguccaacaucaucagaggcuggaucuucggcaccacacuggacagcaagacccagagccugcugaucgugaacaacgccaccaacguggucaucaaagugugcgaguuccaguucugcaacgaccccuuccugggcgucuacuaccacaagaacaacaagagcuggauggaaagcgaguuccggguguacagcagcgccaacaacugcaccuucgaguacgugucccagccuuuccugauggaccuggaaggcaagcagggcaacuucaagaaccugcgcgaguucguguucaagaacaucgacggcuacuucaaaaucuacagcaagcacaccccuaucaaccucgugcgggaucugccucagggcuucucugcucuggaaccccugguggaucugcccaucggcaucaacaucacccgguuucagacacugcuggcccugcacagaagcuaccugacaccuggcgauagcagcagcggauggacagcuggugccgccgcuuacuaugugggcuaccugcagccuagaaccuuccugcugaaguacaacgagaacggcaccaucaccgacgccguggauugugcucuggauccucugagcgagacaaagugcacccugaaguccuucaccguggaaaagggcaucuaccagaccagcaacuuccgggugcagcccaccgaauccaucgugcgguuccccaauaucaccaaucugugccccuucggcgagguguucaaugccaccagauucgccucuguguacgccuggaaccggaagcggaucagcaauugcguggccgacuacuccgugcuguacaacuccgccagcuucagcaccuucaagugcuacggcguguccccuaccaagcugaacgaccugugcuucacaaacguguacgccgacagcuucgugauccggggagaugaagugcggcagauugccccuggacagacaggcaagaucgccgacuacaacuacaagcugcccgacgacuucaccggcugugugauugccuggaacagcaacaaccuggacuccaaagucggcggcaacuacaauuaccuguaccggcuguuccggaaguccaaucugaagcccuucgagcgggacaucagcaccgaaaucuaucaggccggcagcaccccuugcaacggcguggaaggcuucaacugcuacuucccacugcaguccuacggcuuucagcccacaaauggcgugggcuaucagcccuacagagugguggugcugagcuucgaacugcugcaugcuccugccacagugugcggcccuaagaaaagcaccaaucucgugaagaacaaaugcgugaacuucaacuucaacggccugaccggcaccggcgugcugacagagagcaacaagaaguuccugccauuccagcaguuuggccgggauaucgccgauaccacagacgccguuagagauccccagacacuggaaauccuggacaucaccccaugcagcuucggcggagugucugugaucaccccuggcaccaacaccagcaaucagguggcagugcuguaccagggcgugaacuguaccgaagugcccguggccauucacgccgaucagcugacaccuacauggcggguguacuccaccggcagcaauguguuucagaccagagccggcugucugaucggagccgagcacgugaacaauagcuacgagugcgacauccccaucggcgcuggcaucugugccagcuaccagacacagacaaacagccccagacgggcuagaagcguggccagccagagcgugauugccuacacaaugucucugggcgccgagaacagcguggccuacuccaacaacucuaucgcuauccccaccaacuucaccaucagcgugaccaccgagauccugccuguguccaugaccaagaccagcguggacugcaccauguacaucugcggcgauuccaccgagugcuccaaccugcugcugcaguacggcagcuucugcacccagcugaauagagcccugacagggaucgccguggaacaggacaagaacacccaagagguguucgcccaagugaagcaaaucuacaagaccccuccuaucaaggacuucggcggcuucaauuucagccagauucugcccgauccuagcaagcccagcaagcggagcuucaucgaggaccugcuguucaacaaagugacacuggccgacgccggcuucaucaagcaguauggcgauugucugggcgacauugccgccagggaucugauuugcgcccagaaguuuaacggacugacagugcugccuccucugcugaccgaugagaugaucgcccaguacacaucugcccugcuggccggcacaaucacaagcggcuggacauuuggagcuggcgccgcucugcagauccccuuugcuaugcagauggccuaccgguucaacggcaucggagugacccagaaugugcuguacgagaaccagaagcugaucgccaaccaguucaacagcgccaucggcaagauccaggacagccugagcagcacagcaagcgcccugggaaagcugcaggacguggucaaccagaaugcccaggcacugaacacccuggucaagcagcuguccuccaacuucggcgccaucagcucugugcugaacgauauccugagcagacuggacccuccugaggccgaggugcagaucgacagacugaucacaggcagacugcagagccuccagacauacgugacccagcagcugaucagagccgccgagauuagagccucugccaaucuggccgccaccaagaugucugagugugugcugggccagagcaagagaguggacuuuugcggcaagggcuaccaccugaugagcuucccucagucugccccucacggcgugguguuucugcacgugacauaugugcccgcucaagagaagaauuucaccaccgcuccagccaucugccacgacggcaaagcccacuuuccuagagaaggcguguucguguccaacggcacccauugguucgugacacagcggaacuucuacgagccccagaucaucaccaccgacaacaccuucgugucuggcaacugcgacguugugaucggcauugugaacaauaccguguacgacccucugcagcccgagcuggacagcuucaaagaggaacuggacaaguacuuuaagaaccacacaagccccgacguggaccugggcgauaucagcggaaucaaugccagcgucgugaacauccagaaagagaucgaccggcugaacgagguggccaagaaucugaacgagagccugaucgaccugcaagaacuggggaaguacgagcaguacaucaaguggcccugguacaucuggcugggcuuuaucgccggacugauugccaucgugauggucacaaucaugcuguguugcaugaccagcugcuguagcugccugaagggcuguuguagcuguggcagcugcugcaaguucgacgaggacgauucugagcccgugcugaagggcgugaaacugcacuacaccugaggacuagucccuguucccagagcccacuuuuuuuucuuuuuuugaaauaaaauagccugucuuucagaucucaaaggcucuuuucagagccaccaaaaaaaaaaaaaaaaaaaaaaaaaaaaaaaaaaaaaaaaaaaaaaaaaaaaaaaaaaaaaaaaaaaaaaaaaaaaaaaaaaaaaaaaaaaaaaaaaaaaa

SEQ ID NO: 23818 - RNA, 4191 nt, Artificial Sequence
  SARS-CoV-2/Wuhan/WIV05/2019__EPI_ISL_402128 spike protein mRNA gc mod (1-1273)(K986P_V987P_D614G_M1229I)
aggagagggcgcuuggcuugcaaggacccugagcugcggcauugaagcacacccaacccaacucgacugaagucagccucacugaaccggaucugagaaucuucucucucugggcuugccagggcucuccgaaccuagcuagcauccucuucaauuccaacuagaaagcuuaccauguucguguuucuggugcugcugccccugguguccagccagugugugaaccugaccaccagaacacagcugccuccagccuacaccaacagcuucaccagaggcguguacuaccccgacaagguguucagauccagcgugcugcacucuacccaggaccuguuccugccuuucuucagcaacgugaccugguuccacgccauccacguguccggcaccaauggcaccaagagauucgacaaccccgugcugcccuucaacgacgggguguacuuugccagcaccgagaaguccaacaucaucagaggcuggaucuucggcaccacacuggacagcaagacccagagccugcugaucgugaacaacgccaccaacguggucaucaaagugugcgaguuccaguucugcaacgaccccuuccugggcgucuacuaccacaagaacaacaagagcuggauggaaagcgaguuccggguguacagcagcgccaacaacugcaccuucgaguacgugucccagccuuuccugauggaccuggaaggcaagcagggcaacuucaagaaccugcgcgaguucguguucaagaacaucgacggcuacuucaaaaucuacagcaagcacaccccuaucaaccucgugcgggaucugccucagggcuucucugcucuggaaccccugguggaucugcccaucggcaucaacaucacccgguuucagacacugcuggcccugcacagaagcuaccugacaccuggcgauagcagcagcggauggacagcuggugccgccgcuuacuaugugggcuaccugcagccuagaaccuuccugcugaaguacaacgagaacggcaccaucaccgacgccguggauugugcucuggauccucugagcgagacaaagugcacccugaaguccuucaccguggaaaagggcaucuaccagaccagcaacuuccgggugcagcccaccgaauccaucgugcgguuccccaauaucaccaaucugugccccuucggcgagguguucaaugccaccagauucgccucuguguacgccuggaaccggaagcggaucagcaauugcguggccgacuacuccgugcuguacaacuccgccagcuucagcaccuucaagugcuacggcguguccccuaccaagcugaacgaccugugcuucacaaacguguacgccgacagcuucgugauccggggagaugaagugcggcagauugccccuggacagacaggcaagaucgccgacuacaacuacaagcugcccgacgacuucaccggcugugugauugccuggaacagcaacaaccuggacuccaaagucggcggcaacuacaauuaccuguaccggcuguuccggaaguccaaucugaagcccuucgagcgggacaucagcaccgaaaucuaucaggccggcagcaccccuugcaacggcguggaaggcuucaacugcuacuucccacugcaguccuacggcuuucagcccacaaauggcgugggcuaucagcccuacagagugguggugcugagcuucgaacugcugcaugcuccugccacagugugcggcccuaagaaaagcaccaaucucgugaagaacaaaugcgugaacuucaacuucaacggccugaccggcaccggcgugcugacagagagcaacaagaaguuccugccauuccagcaguuuggccgggauaucgccgauaccacagacgccguuagagauccccagacacuggaaauccuggacaucaccccaugcagcuucggcggagugucugugaucaccccuggcaccaacaccagcaaucagguggcagugcuguaccagggcgugaacuguaccgaagugcccguggccauucacgccgaucagcugacaccuacauggcggguguacuccaccggcagcaauguguuucagaccagagccggcugucugaucggagccgagcacgugaacaauagcuacgagugcgacauccccaucggcgcuggcaucugugccagcuaccagacacagacaaacagccccagacgggcuagaagcguggccagccagagcaucauugccuacacaaugucucugggcgccgagaacagcguggccuacuccaacaacucuaucgcuauccccaccaacuucaccaucagcgugaccaccgagauccugccuguguccaugaccaagaccagcguggacugcaccauguacaucugcggcgauuccaccgagugcuccaaccugcugcugcaguacggcagcuucugcacccagcugaauagagcccugacagggaucgccguggaacaggacaagaacacccaagagguguucgcccaagugaagcaaaucuacaagaccccuccuaucaaggacuucggcggcuucaauuucagccagauucugcccgauccuagcaagcccagcaagcggagcuucaucgaggaccugcuguucaacaaagugacacuggccgacgccggcuucaucaagcaguauggcgauugucugggcgacauugccgccagggaucugauuugcgcccagaaguuuaacggacugacagugcugccuccucugcugaccgaugagaugaucgcccaguacacaucugcccugcuggccggcacaaucacaagcggcuggacauuuggagcuggcgccgcucugcagauccccuuugcuaugcagauggccuaccgguucaacggcaucggagugacccagaaugugcuguacgagaaccagaagcugaucgccaaccaguucaacagcgccaucggcaagauccaggacagccugagcagcacagcaagcgcccugggaaagcugcaggacguggucaaccagaaugcccaggcacugaacacccuggucaagcagcuguccuccaacuucggcgccaucagcucugugcugaacgauauccugagcagacuggacccuccugaggccgaggugcagaucgacagacugaucacaggcagacugcagagccuccagacauacgugacccagcagcugaucagagccgccgagauuagagccucugccaaucuggccgccaccaagaugucugagugugugcugggccagagcaagagaguggacuuuugcggcaagggcuaccaccugaugagcuucccucagucugccccucacggcgugguguuucugcacgugacauaugugcccgcucaagagaagaauuucaccaccgcuccagccaucugccacgacggcaaagcccacuuuccuagagaaggcguguucguguccaacggcacccauugguucgugacacagcggaacuucuacgagccccagaucaucaccaccgacaacaccuucgugucuggcaacugcgacguugugaucggcauugugaacaauaccguguacgacccucugcagcccgagcuggacagcuucaaagaggaacuggacaaguacuuuaagaaccacacaagccccgacguggaccugggcgauaucagcggaaucaaugccagcgucgugaacauccagaaagagaucgaccggcugaacgagguggccaagaaucugaacgagagccugaucgaccugcaagaacuggggaaguacgagcaguacaucaaguggcccugguacaucuggcugggcuuuaucgccggacugauugccaucgugaucgucacaaucaugcuguguugcaugaccagcugcuguagcugccugaagggcuguuguagcuguggcagcugcugcaaguucgacgaggacgauucugagcccgugcugaagggcgugaaacugcacuacaccugaggacuagucccuguucccagagcccacuuuuuuuucuuuuuuugaaauaaaauagccugucuuucagaucucaaaggcucuuuucagagccaccaaaaaaaaaaaaaaaaaaaaaaaaaaaaaaaaaaaaaaaaaaaaaaaaaaaaaaaaaaaaaaaaaaaaaaaaaaaaaaaaaaaaaaaaaaaaaaaaaaaaa

SEQ ID NO: 23819 - RNA, 4185 nt, Artificial Sequence
  SARS-CoV-2/Wuhan/WIV05/2019__EPI_ISL_402128 spike protein mRNA gc mod (1-1273)(K986P_V987P_H69del_V70del_A222V_Y453F_S477N_D614G_I692V)
aggagagggcgcuuggcuugcaaggacccugagcugcggcauugaagcacacccaacccaacucgacugaagucagccucacugaaccggaucugagaaucuucucucucugggcuugccagggcucuccgaaccuagcuagcauccucuucaauuccaacuagaaagcuuaccauguucguguuucuggugcugcugccccugguguccagccagugugugaaccugaccaccagaacacagcugccuccagccuacaccaacagcuucaccagaggcguguacuaccccgacaagguguucagauccagcgugcugcacucuacccaggaccuguuccugccuuucuucagcaacgugaccugguuccacgccaucuccggcaccaauggcaccaagagauucgacaaccccgugcugcccuucaacgacgggguguacuuugccagcaccgagaaguccaacaucaucagaggcuggaucuucggcaccacacuggacagcaagacccagagccugcugaucgugaacaacgccaccaacguggucaucaaagugugcgaguuccaguucugcaacgaccccuuccugggcgucuacuaccacaagaacaacaagagcuggauggaaagcgaguuccggguguacagcagcgccaacaacugcaccuucgaguacgugucccagccuuuccugauggaccuggaaggcaagcagggcaacuucaagaaccugcgcgaguucguguucaagaacaucgacggcuacuucaaaaucuacagcaagcacaccccuaucaaccucgugcgggaucugccucagggcuucucugugcuggaaccccugguggaucugcccaucggcaucaacaucacccgguuucagacacugcuggcccugcacagaagcuaccugacaccuggcgauagcagcagcggauggacagcuggugccgccgcuuacuaugugggcuaccugcagccuagaaccuuccugcugaaguacaacgagaacggcaccaucaccgacgccguggauugugcucuggauccucugagcgagacaaagugcacccugaaguccuucaccguggaaaagggcaucuaccagaccagcaacuuccgggugcagcccaccgaauccaucgugcgguuccccaauaucaccaaucugugccccuucggcgagguguucaaugccaccagauucgccucuguguacgccuggaaccggaagcggaucagcaauugcguggccgacuacuccgugcuguacaacuccgccagcuucagcaccuucaagugcuacggcguguccccuaccaagcugaacgaccugugcuucacaaacguguacgccgacagcuucgugauccggggagaugaagugcggcagauugccccuggacagacaggcaagaucgccgacuacaacuacaagcugcccgacgacuucaccggcugugugauugccuggaacagcaacaaccuggacuccaaagucggcggcaacuacaauuaccuguuccggcuguuccggaaguccaaucugaagcccuucgagcgggacaucagcaccgaaaucuaucaggccggcaacaccccuugcaacggcguggaaggcuucaacugcuacuucccacugcaguccuacggcuuucagcccacaaauggcgugggcuaucagcccuacagagugguggugcugagcuucgaacugcugcaugcuccugccacagugugcggcccuaagaaaagcaccaaucucgugaagaacaaaugcgugaacuucaacuucaacggccugaccggcaccggcgugcugacagagagcaacaagaaguuccugccauuccagcaguuuggccgggauaucgccgauaccacagacgccguuagagauccccagacacuggaaauccuggacaucaccccaugcagcuucggcggagugucugugaucaccccuggcaccaacaccagcaaucagguggcagugcuguaccagggcgugaacuguaccgaagugcccguggccauucacgccgaucagcugacaccuacauggcggguguacuccaccggcagcaauguguuucagaccagagccggcugucugaucggagccgagcacgugaacaauagcuacgagugcgacauccccaucggcgcuggcaucugugccagcuaccagacacagacaaacagccccagacgggcuagaagcguggccagccagagcgugauugccuacacaaugucucugggcgccgagaacagcguggccuacuccaacaacucuaucgcuauccccaccaacuucaccaucagcgugaccaccgagauccugccuguguccaugaccaagaccagcguggacugcaccauguacaucugcggcgauuccaccgagugcuccaaccugcugcugcaguacggcagcuucugcacccagcugaauagagcccugacagggaucgccguggaacaggacaagaacacccaagagguguucgcccaagugaagcaaaucuacaagaccccuccuaucaaggacuucggcggcuucaauuucagccagauucugcccgauccuagcaagcccagcaagcggagcuucaucgaggaccugcuguucaacaaagugacacuggccgacgccggcuucaucaagcaguauggcgauugucugggcgacauugccgccagggaucugauuugcgcccagaaguuuaacggacugacagugcugccuccucugcugaccgaugagaugaucgcccaguacacaucugcccugcuggccggcacaaucacaagcggcuggacauuuggagcuggcgccgcucugcagauccccuuugcuaugcagauggccuaccgguucaacggcaucggagugacccagaaugugcuguacgagaaccagaagcugaucgccaaccaguucaacagcgccaucggcaagauccaggacagccugagcagcacagcaagcgcccugggaaagcugcaggacguggucaaccagaaugcccaggcacugaacacccuggucaagcagcuguccuccaacuucggcgccaucagcucugugcugaacgauauccugagcagacuggacccuccugaggccgaggugcagaucgacagacugaucacaggcagacugcagagccuccagacauacgugacccagcagcugaucagagccgccgagauuagagccucugccaaucuggccgccaccaagaugucugagugugugcugggccagagcaagagaguggacuuuugcggcaagggcuaccaccugaugagcuucccucagucugccccucacggcgugguguuucugcacgugacauaugugcccgcucaagagaagaauuucaccaccgcuccagccaucugccacgacggcaaagcccacuuuccuagagaaggcguguucguguccaacggcacccauugguucgugacacagcggaacuucuacgagccccagaucaucaccaccgacaacaccuucgugucuggcaacugcgacguugugaucggcauugugaacaauaccguguacgacccucugcagcccgagcuggacagcuucaaagaggaacuggacaaguacuuuaagaaccacacaagccccgacguggaccugggcgauaucagcggaaucaaugccagcgucgugaacauccagaaagagaucgaccggcugaacgagguggccaagaaucugaacgagagccugaucgaccugcaagaacuggggaaguacgagcaguacaucaaguggcccugguacaucuggcugggcuuuaucgccggacugauugccaucgugauggucacaaucaugcuguguugcaugaccagcugcuguagcugccugaagggcuguuguagcuguggcagcugcugcaaguucgacgaggacgauucugagcccgugcugaagggcgugaaacugcacuacaccugaggacuagucccuguucccagagcccacuuuuuuuucuuuuuuugaaauaaaauagccugucuuucagaucucaaaggcucuuuucagagccaccaaaaaaaaaaaaaaaaaaaaaaaaaaaaaaaaaaaaaaaaaaaaaaaaaaaaaaaaaaaaaaaaaaaaaaaaaaaaaaaaaaaaaaaaaaaaaaaaaaaaa

SEQ ID NO: 23820 - RNA, 4185 nt, Artificial Sequence
  SARS-CoV-2/Wuhan/WIV05/2019__EPI_ISL_402128 spike protein mRNA gc mod (1-1273)(K986P_V987P_H69del_V70del_Y453F_D614G_I692V_M1229I)
aggagagggcgcuuggcuugcaaggacccugagcugcggcauugaagcacacccaacccaacucgacugaagucagccucacugaaccggaucugagaaucuucucucucugggcuugccagggcucuccgaaccuagcuagcauccucuucaauuccaacuagaaagcuuaccauguucguguuucuggugcugcugccccugguguccagccagugugugaaccugaccaccagaacacagcugccuccagccuacaccaacagcuucaccagaggcguguacuaccccgacaagguguucagauccagcgugcugcacucuacccaggaccuguuccugccuuucuucagcaacgugaccugguuccacgccaucuccggcaccaauggcaccaagagauucgacaaccccgugcugcccuucaacgacgggguguacuuugccagcaccgagaaguccaacaucaucagaggcuggaucuucggcaccacacuggacagcaagacccagagccugcugaucgugaacaacgccaccaacguggucaucaaagugugcgaguuccaguucugcaacgaccccuuccugggcgucuacuaccacaagaacaacaagagcuggauggaaagcgaguuccggguguacagcagcgccaacaacugcaccuucgaguacgugucccagccuuuccugauggaccuggaaggcaagcagggcaacuucaagaaccugcgcgaguucguguucaagaacaucgacggcuacuucaaaaucuacagcaagcacaccccuaucaaccucgugcgggaucugccucagggcuucucugcucuggaaccccugguggaucugcccaucggcaucaacaucacccgguuucagacacugcuggcccugcacagaagcuaccugacaccuggcgauagcagcagcggauggacagcuggugccgccgcuuacuaugugggcuaccugcagccuagaaccuuccugcugaaguacaacgagaacggcaccaucaccgacgccguggauugugcucuggauccucugagcgagacaaagugcacccugaaguccuucaccguggaaaagggcaucuaccagaccagcaacuuccgggugcagcccaccgaauccaucgugcgguuccccaauaucaccaaucugugccccuucggcgagguguucaaugccaccagauucgccucuguguacgccuggaaccggaagcggaucagcaauugcguggccgacuacuccgugcuguacaacuccgccagcuucagcaccuucaagugcuacggcguguccccuaccaagcugaacgaccugugcuucacaaacguguacgccgacagcuucgugauccggggagaugaagugcggcagauugccccuggacagacaggcaagaucgccgacuacaacuacaagcugcccgacgacuucaccggcugugugauugccuggaacagcaacaaccuggacuccaaagucggcggcaacuacaauuaccuguuccggcuguuccggaaguccaaucugaagcccuucgagcgggacaucagcaccgaaaucuaucaggccggcagcaccccuugcaacggcguggaaggcuucaacugcuacuucccacugcaguccuacggcuuucagcccacaaauggcgugggcuaucagcccuacagagugguggugcugagcuucgaacugcugcaugcuccugccacagugugcggcccuaagaaaagcaccaaucucgugaagaacaaaugcgugaacuucaacuucaacggccugaccggcaccggcgugcugacagagagcaacaagaaguuccugccauuccagcaguuuggccgggauaucgccgauaccacagacgccguuagagauccccagacacuggaaauccuggacaucaccccaugcagcuucggcggagugucugugaucaccccuggcaccaacaccagcaaucagguggcagugcuguaccagggcgugaacuguaccgaagugcccguggccauucacgccgaucagcugacaccuacauggcggguguacuccaccggcagcaauguguuucagaccagagccggcugucugaucggagccgagcacgugaacaauagcuacgagugcgacauccccaucggcgcuggcaucugugccagcuaccagacacagacaaacagccccagacgggcuagaagcguggccagccagagcgugauugccuacacaaugucucugggcgccgagaacagcguggccuacuccaacaacucuaucgcuauccccaccaacuucaccaucagcgugaccaccgagauccugccuguguccaugaccaagaccagcguggacugcaccauguacaucugcggcgauuccaccgagugcuccaaccugcugcugcaguacggcagcuucugcacccagcugaauagagcccugacagggaucgccguggaacaggacaagaacacccaagagguguucgcccaagugaagcaaaucuacaagaccccuccuaucaaggacuucggcggcuucaauuucagccagauucugcccgauccuagcaagcccagcaagcggagcuucaucgaggaccugcuguucaacaaagugacacuggccgacgccggcuucaucaagcaguauggcgauugucugggcgacauugccgccagggaucugauuugcgcccagaaguuuaacggacugacagugcugccuccucugcugaccgaugagaugaucgcccaguacacaucugcccugcuggccggcacaaucacaagcggcuggacauuuggagcuggcgccgcucugcagauccccuuugcuaugcagauggccuaccgguucaacggcaucggagugacccagaaugugcuguacgagaaccagaagcugaucgccaaccaguucaacagcgccaucggcaagauccaggacagccugagcagcacagcaagcgcccugggaaagcugcaggacguggucaaccagaaugcccaggcacugaacacccuggucaagcagcuguccuccaacuucggcgccaucagcucugugcugaacgauauccugagcagacuggacccuccugaggccgaggugcagaucgacagacugaucacaggcagacugcagagccuccagacauacgugacccagcagcugaucagagccgccgagauuagagccucugccaaucuggccgccaccaagaugucugagugugugcugggccagagcaagagaguggacuuuugcggcaagggcuaccaccugaugagcuucccucagucugccccucacggcgugguguuucugcacgugacauaugugcccgcucaagagaagaauuucaccaccgcuccagccaucugccacgacggcaaagcccacuuuccuagagaaggcguguucguguccaacggcacccauugguucgugacacagcggaacuucuacgagccccagaucaucaccaccgacaacaccuucgugucuggcaacugcgacguugugaucggcauugugaacaauaccguguacgacccucugcagcccgagcuggacagcuucaaagaggaacuggacaaguacuuuaagaaccacacaagccccgacguggaccugggcgauaucagcggaaucaaugccagcgucgugaacauccagaaagagaucgaccggcugaacgagguggccaagaaucugaacgagagccugaucgaccugcaagaacuggggaaguacgagcaguacaucaaguggcccugguacaucuggcugggcuuuaucgccggacugauugccaucgugaucgucacaaucaugcuguguugcaugaccagcugcuguagcugccugaagggcuguuguagcuguggcagcugcugcaaguucgacgaggacgauucugagcccgugcugaagggcgugaaacugcacuacaccugaggacuagucccuguucccagagcccacuuuuuuuucuuuuuuugaaauaaaauagccugucuuucagaucucaaaggcucuuuucagagccaccaaaaaaaaaaaaaaaaaaaaaaaaaaaaaaaaaaaaaaaaaaaaaaaaaaaaaaaaaaaaaaaaaaaaaaaaaaaaaaaaaaaaaaaaaaaaaaaaaaaaa

SEQ ID NO: 23821 - RNA, 4182 nt, Artificial Sequence
  SARS-CoV-2/Wuhan/WIV05/2019__EPI_ISL_402128 spike protein mRNA gc mod (1-1273)(K986P_V987P_K986P_V987P_H69del_V70del_Y144del_N501Y_A570 D_D614G_P681H_T716I_S982A_D1118H)
aggagagggcgcuuggcuugcaaggacccugagcugcggcauugaagcacacccaacccaacucgacugaagucagccucacugaaccggaucugagaaucuucucucucugggcuugccagggcucuccgaaccuagcuagcauccucuucaauuccaacuagaaagcuuaccauguucguguuucuggugcugcugccccugguguccagccagugugugaaccugaccaccagaacacagcugccuccagccuacaccaacagcuucaccagaggcguguacuaccccgacaagguguucagauccagcgugcugcacucuacccaggaccuguuccugccuuucuucagcaacgugaccugguuccacgccaucuccggcaccaauggcaccaagagauucgacaaccccgugcugcccuucaacgacgggguguacuuugccagcaccgagaaguccaacaucaucagaggcuggaucuucggcaccacacuggacagcaagacccagagccugcugaucgugaacaacgccaccaacguggucaucaaagugugcgaguuccaguucugcaacgaccccuuccugggcgucuaccacaagaacaacaagagcuggauggaaagcgaguuccggguguacagcagcgccaacaacugcaccuucgaguacgugucccagccuuuccugauggaccuggaaggcaagcagggcaacuucaagaaccugcgcgaguucguguucaagaacaucgacggcuacuucaaaaucuacagcaagcacaccccuaucaaccucgugcgggaucugccucagggcuucucugcucuggaaccccugguggaucugcccaucggcaucaacaucacccgguuucagacacugcuggcccugcacagaagcuaccugacaccuggcgauagcagcagcggauggacagcuggugccgccgcuuacuaugugggcuaccugcagccuagaaccuuccugcugaaguacaacgagaacggcaccaucaccgacgccguggauugugcucuggauccucugagcgagacaaagugcacccugaaguccuucaccguggaaaagggcaucuaccagaccagcaacuuccgggugcagcccaccgaauccaucgugcgguuccccaauaucaccaaucugugccccuucggcgagguguucaaugccaccagauucgccucuguguacgccuggaaccggaagcggaucagcaauugcguggccgacuacuccgugcuguacaacuccgccagcuucagcaccuucaagugcuacggcguguccccuaccaagcugaacgaccugugcuucacaaacguguacgccgacagcuucgugauccggggagaugaagugcggcagauugccccuggacagacaggcaagaucgccgacuacaacuacaagcugcccgacgacuucaccggcugugugauugccuggaacagcaacaaccuggacuccaaagucggcggcaacuacaauuaccuguaccggcuguuccggaaguccaaucugaagcccuucgagcgggacaucagcaccgaaaucuaucaggccggcagcaccccuugcaacggcguggaaggcuucaacugcuacuucccacugcaguccuacggcuuucagcccacauacggcgugggcuaucagcccuacagagugguggugcugagcuucgaacugcugcaugcuccugccacagugugcggcccuaagaaaagcaccaaucucgugaagaacaaaugcgugaacuucaacuucaacggccugaccggcaccggcgugcugacagagagcaacaagaaguuccugccauuccagcaguuuggccgggauaucgacgauaccacagacgccguuagagauccccagacacuggaaauccuggacaucaccccaugcagcuucggcggagugucugugaucaccccuggcaccaacaccagcaaucagguggcagugcuguaccagggcgugaacuguaccgaagugcccguggccauucacgccgaucagcugacaccuacauggcggguguacuccaccggcagcaauguguuucagaccagagccggcugucugaucggagccgagcacgugaacaauagcuacgagugcgacauccccaucggcgcuggcaucugugccagcuaccagacacagacaaacagccacagacgggcuagaagcguggccagccagagcaucauugccuacacaaugucucugggcgccgagaacagcguggccuacuccaacaacucuaucgcuauccccaucaacuucaccaucagcgugaccaccgagauccugccuguguccaugaccaagaccagcguggacugcaccauguacaucugcggcgauuccaccgagugcuccaaccugcugcugcaguacggcagcuucugcacccagcugaauagagcccugacagggaucgccguggaacaggacaagaacacccaagagguguucgcccaagugaagcaaaucuacaagaccccuccuaucaaggacuucggcggcuucaauuucagccagauucugcccgauccuagcaagcccagcaagcggagcuucaucgaggaccugcuguucaacaaagugacacuggccgacgccggcuucaucaagcaguauggcgauugucugggcgacauugccgccagggaucugauuugcgcccagaaguuuaacggacugacagugcugccuccucugcugaccgaugagaugaucgcccaguacacaucugcccugcuggccggcacaaucacaagcggcuggacauuuggagcuggcgccgcucugcagauccccuuugcuaugcagauggccuaccgguucaacggcaucggagugacccagaaugugcuguacgagaaccagaagcugaucgccaaccaguucaacagcgccaucggcaagauccaggacagccugagcagcacagcaagcgcccugggaaagcugcaggacguggucaaccagaaugcccaggcacugaacacccuggucaagcagcuguccuccaacuucggcgccaucagcucugugcugaacgauauccuggccagacuggacccuccugaggccgaggugcagaucgacagacugaucacaggcagacugcagagccuccagacauacgugacccagcagcugaucagagccgccgagauuagagccucugccaaucuggccgccaccaagaugucugagugugugcugggccagagcaagagaguggacuuuugcggcaagggcuaccaccugaugagcuucccucagucugccccucacggcgugguguuucugcacgugacauaugugcccgcucaagagaagaauuucaccaccgcuccagccaucugccacgacggcaaagcccacuuuccuagagaaggcguguucguguccaacggcacccauugguucgugacacagcggaacuucuacgagccccagaucaucaccacccacaacaccuucgugucuggcaacugcgacguugugaucggcauugugaacaauaccguguacgacccucugcagcccgagcuggacagcuucaaagaggaacuggacaaguacuuuaagaaccacacaagccccgacguggaccugggcgauaucagcggaaucaaugccagcgucgugaacauccagaaagagaucgaccggcugaacgagguggccaagaaucugaacgagagccugaucgaccugcaagaacuggggaaguacgagcaguacaucaaguggcccugguacaucuggcugggcuuuaucgccggacugauugccaucgugauggucacaaucaugcuguguugcaugaccagcugcuguagcugccugaagggcuguuguagcuguggcagcugcugcaaguucgacgaggacgauucugagcccgugcugaagggcgugaaacugcacuacaccugaggacuagucccuguucccagagcccacuuuuuuuucuuuuuuugaaauaaaauagccugucuuucagaucucaaaggcucuuuucagagccaccaaaaaaaaaaaaaaaaaaaaaaaaaaaaaaaaaaaaaaaaaaaaaaaaaaaaaaaaaaaaaaaaaaaaaaaaaaaaaaaaaaaaaaaaaaaaaaaaaaaaa

SEQ ID NO: 23822 - RNA, 4191 nt, Artificial Sequence
  SARS-CoV-2/Wuhan/WIV05/2019__EPI_ISL_402128 spike protein mRNA gc mod (1-1273)(K986P_V987P_K986P_V987P_K417N_E484K_N501Y_D614G)
aggagagggcgcuuggcuugcaaggacccugagcugcggcauugaagcacacccaacccaacucgacugaagucagccucacugaaccggaucugagaaucuucucucucugggcuugccagggcucuccgaaccuagcuagcauccucuucaauuccaacuagaaagcuuaccauguucguguuucuggugcugcugccccugguguccagccagugugugaaccugaccaccagaacacagcugccuccagccuacaccaacagcuucaccagaggcguguacuaccccgacaagguguucagauccagcgugcugcacucuacccaggaccuguuccugccuuucuucagcaacgugaccugguuccacgccauccacguguccggcaccaauggcaccaagagauucgacaaccccgugcugcccuucaacgacgggguguacuuugccagcaccgagaaguccaacaucaucagaggcuggaucuucggcaccacacuggacagcaagacccagagccugcugaucgugaacaacgccaccaacguggucaucaaagugugcgaguuccaguucugcaacgaccccuuccugggcgucuacuaccacaagaacaacaagagcuggauggaaagcgaguuccggguguacagcagcgccaacaacugcaccuucgaguacgugucccagccuuuccugauggaccuggaaggcaagcagggcaacuucaagaaccugcgcgaguucguguucaagaacaucgacggcuacuucaaaaucuacagcaagcacaccccuaucaaccucgugcgggaucugccucagggcuucucugcucuggaaccccugguggaucugcccaucggcaucaacaucacccgguuucagacacugcuggcccugcacagaagcuaccugacaccuggcgauagcagcagcggauggacagcuggugccgccgcuuacuaugugggcuaccugcagccuagaaccuuccugcugaaguacaacgagaacggcaccaucaccgacgccguggauugugcucuggauccucugagcgagacaaagugcacccugaaguccuucaccguggaaaagggcaucuaccagaccagcaacuuccgggugcagcccaccgaauccaucgugcgguuccccaauaucaccaaucugugccccuucggcgagguguucaaugccaccagauucgccucuguguacgccuggaaccggaagcggaucagcaauugcguggccgacuacuccgugcuguacaacuccgccagcuucagcaccuucaagugcuacggcguguccccuaccaagcugaacgaccugugcuucacaaacguguacgccgacagcuucgugauccggggagaugaagugcggcagauugccccuggacagacaggcaacaucgccgacuacaacuacaagcugcccgacgacuucaccggcugugugauugccuggaacagcaacaaccuggacuccaaagucggcggcaacuacaauuaccuguaccggcuguuccggaaguccaaucugaagcccuucgagcgggacaucagcaccgaaaucuaucaggccggcagcaccccuugcaacggcgugaagggcuucaacugcuacuucccacugcaguccuacggcuuucagcccacauacggcgugggcuaucagcccuacagagugguggugcugagcuucgaacugcugcaugcuccugccacagugugcggcccuaagaaaagcaccaaucucgugaagaacaaaugcgugaacuucaacuucaacggccugaccggcaccggcgugcugacagagagcaacaagaaguuccugccauuccagcaguuuggccgggauaucgccgauaccacagacgccguuagagauccccagacacuggaaauccuggacaucaccccaugcagcuucggcggagugucugugaucaccccuggcaccaacaccagcaaucagguggcagugcuguaccagggcgugaacuguaccgaagugcccguggccauucacgccgaucagcugacaccuacauggcggguguacuccaccggcagcaauguguuucagaccagagccggcugucugaucggagccgagcacgugaacaauagcuacgagugcgacauccccaucggcgcuggcaucugugccagcuaccagacacagacaaacagccccagacgggcuagaagcguggccagccagagcaucauugccuacacaaugucucugggcgccgagaacagcguggccuacuccaacaacucuaucgcuauccccaccaacuucaccaucagcgugaccaccgagauccugccuguguccaugaccaagaccagcguggacugcaccauguacaucugcggcgauuccaccgagugcuccaaccugcugcugcaguacggcagcuucugcacccagcugaauagagcccugacagggaucgccguggaacaggacaagaacacccaagagguguucgcccaagugaagcaaaucuacaagaccccuccuaucaaggacuucggcggcuucaauuucagccagauucugcccgauccuagcaagcccagcaagcggagcuucaucgaggaccugcuguucaacaaagugacacuggccgacgccggcuucaucaagcaguauggcgauugucugggcgacauugccgccagggaucugauuugcgcccagaaguuuaacggacugacagugcugccuccucugcugaccgaugagaugaucgcccaguacacaucugcccugcuggccggcacaaucacaagcggcuggacauuuggagcuggcgccgcucugcagauccccuuugcuaugcagauggccuaccgguucaacggcaucggagugacccagaaugugcuguacgagaaccagaagcugaucgccaaccaguucaacagcgccaucggcaagauccaggacagccugagcagcacagcaagcgcccugggaaagcugcaggacguggucaaccagaaugcccaggcacugaacacccuggucaagcagcuguccuccaacuucggcgccaucagcucugugcugaacgauauccugagcagacuggacccuccugaggccgaggugcagaucgacagacugaucacaggcagacugcagagccuccagacauacgugacccagcagcugaucagagccgccgagauuagagccucugccaaucuggccgccaccaagaugucugagugugugcugggccagagcaagagaguggacuuuugcggcaagggcuaccaccugaugagcuucccucagucugccccucacggcgugguguuucugcacgugacauaugugcccgcucaagagaagaauuucaccaccgcuccagccaucugccacgacggcaaagcccacuuuccuagagaaggcguguucguguccaacggcacccauugguucgugacacagcggaacuucuacgagccccagaucaucaccaccgacaacaccuucgugucuggcaacugcgacguugugaucggcauugugaacaauaccguguacgacccucugcagcccgagcuggacagcuucaaagaggaacuggacaaguacuuuaagaaccacacaagccccgacguggaccugggcgauaucagcggaaucaaugccagcgucgugaacauccagaaagagaucgaccggcugaacgagguggccaagaaucugaacgagagccugaucgaccugcaagaacuggggaaguacgagcaguacaucaaguggcccugguacaucuggcugggcuuuaucgccggacugauugccaucgugauggucacaaucaugcuguguugcaugaccagcugcuguagcugccugaagggcuguuguagcuguggcagcugcugcaaguucgacgaggacgauucugagcccgugcugaagggcgugaaacugcacuacaccugaggacuagucccuguucccagagcccacuuuuuuuucuuuuuuugaaauaaaauagccugucuuucagaucucaaaggcucuuuucagagccaccaaaaaaaaaaaaaaaaaaaaaaaaaaaaaaaaaaaaaaaaaaaaaaaaaaaaaaaaaaaaaaaaaaaaaaaaaaaaaaaaaaaaaaaaaaaaaaaaaaaaa

SEQ ID NO: 23823 - RNA, 4182 nt, Artificial Sequence
  SARS-CoV-2/Wuhan/WIV05/2019__EPI_ISL_402128 spike protein mRNA gc mod (1-1273)(K986P_V987P_K986P_V987P_L18F_D80A_D215G_L242del_A243del_ L244del_R246I_K417N_E484K_N501Y_D614G_A701V)
aggagagggcgcuuggcuugcaaggacccugagcugcggcauugaagcacacccaacccaacucgacugaagucagccucacugaaccggaucugagaaucuucucucucugggcuugccagggcucuccgaaccuagcuagcauccucuucaauuccaacuagaaagcuuaccauguucguguuucuggugcugcugccccugguguccagccagugugugaacuucaccaccagaacacagcugccuccagccuacaccaacagcuucaccagaggcguguacuaccccgacaagguguucagauccagcgugcugcacucuacccaggaccuguuccugccuuucuucagcaacgugaccugguuccacgccauccacguguccggcaccaauggcaccaagagauucgccaaccccgugcugcccuucaacgacgggguguacuuugccagcaccgagaaguccaacaucaucagaggcuggaucuucggcaccacacuggacagcaagacccagagccugcugaucgugaacaacgccaccaacguggucaucaaagugugcgaguuccaguucugcaacgaccccuuccugggcgucuacuaccacaagaacaacaagagcuggauggaaagcgaguuccggguguacagcagcgccaacaacugcaccuucgaguacgugucccagccuuuccugauggaccuggaaggcaagcagggcaacuucaagaaccugcgcgaguucguguucaagaacaucgacggcuacuucaaaaucuacagcaagcacaccccuaucaaccucgugcggggccugccucagggcuucucugcucuggaaccccugguggaucugcccaucggcaucaacaucacccgguuucagacacugcacaucagcuaccugacaccuggcgauagcagcagcggauggacagcuggugccgccgcuuacuaugugggcuaccugcagccuagaaccuuccugcugaaguacaacgagaacggcaccaucaccgacgccguggauugugcucuggauccucugagcgagacaaagugcacccugaaguccuucaccguggaaaagggcaucuaccagaccagcaacuuccgggugcagcccaccgaauccaucgugcgguuccccaauaucaccaaucugugccccuucggcgagguguucaaugccaccagauucgccucuguguacgccuggaaccggaagcggaucagcaauugcguggccgacuacuccgugcuguacaacuccgccagcuucagcaccuucaagugcuacggcguguccccuaccaagcugaacgaccugugcuucacaaacguguacgccgacagcuucgugauccggggagaugaagugcggcagauugccccuggacagacaggcaacaucgccgacuacaacuacaagcugcccgacgacuucaccggcugugugauugccuggaacagcaacaaccuggacuccaaagucggcggcaacuacaauuaccuguaccggcuguuccggaaguccaaucugaagcccuucgagcgggacaucagcaccgaaaucuaucaggccggcagcaccccuugcaacggcgugaagggcuucaacugcuacuucccacugcaguccuacggcuuucagcccacauacggcgugggcuaucagcccuacagagugguggugcugagcuucgaacugcugcaugcuccugccacagugugcggcccuaagaaaagcaccaaucucgugaagaacaaaugcgugaacuucaacuucaacggccugaccggcaccggcgugcugacagagagcaacaagaaguuccugccauuccagcaguuuggccgggauaucgccgauaccacagacgccguuagagauccccagacacuggaaauccuggacaucaccccaugcagcuucggcggagugucugugaucaccccuggcaccaacaccagcaaucagguggcagugcuguaccagggcgugaacuguaccgaagugcccguggccauucacgccgaucagcugacaccuacauggcggguguacuccaccggcagcaauguguuucagaccagagccggcugucugaucggagccgagcacgugaacaauagcuacgagugcgacauccccaucggcgcuggcaucugugccagcuaccagacacagacaaacagccccagacgggcuagaagcguggccagccagagcaucauugccuacacaaugucucugggcguggagaacagcguggccuacuccaacaacucuaucgcuauccccaccaacuucaccaucagcgugaccaccgagauccugccuguguccaugaccaagaccagcguggacugcaccauguacaucugcggcgauuccaccgagugcuccaaccugcugcugcaguacggcagcuucugcacccagcugaauagagcccugacagggaucgccguggaacaggacaagaacacccaagagguguucgcccaagugaagcaaaucuacaagaccccuccuaucaaggacuucggcggcuucaauuucagccagauucugcccgauccuagcaagcccagcaagcggagcuucaucgaggaccugcuguucaacaaagugacacuggccgacgccggcuucaucaagcaguauggcgauugucugggcgacauugccgccagggaucugauuugcgcccagaaguuuaacggacugacagugcugccuccucugcugaccgaugagaugaucgcccaguacacaucugcccugcuggccggcacaaucacaagcggcuggacauuuggagcuggcgccgcucugcagauccccuuugcuaugcagauggccuaccgguucaacggcaucggagugacccagaaugugcuguacgagaaccagaagcugaucgccaaccaguucaacagcgccaucggcaagauccaggacagccugagcagcacagcaagcgcccugggaaagcugcaggacguggucaaccagaaugcccaggcacugaacacccuggucaagcagcuguccuccaacuucggcgccaucagcucugugcugaacgauauccugagcagacuggacccuccugaggccgaggugcagaucgacagacugaucacaggcagacugcagagccuccagacauacgugacccagcagcugaucagagccgccgagauuagagccucugccaaucuggccgccaccaagaugucugagugugugcugggccagagcaagagaguggacuuuugcggcaagggcuaccaccugaugagcuucccucagucugccccucacggcgugguguuucugcacgugacauaugugcccgcucaagagaagaauuucaccaccgcuccagccaucugccacgacggcaaagcccacuuuccuagagaaggcguguucguguccaacggcacccauugguucgugacacagcggaacuucuacgagccccagaucaucaccaccgacaacaccuucgugucuggcaacugcgacguugugaucggcauugugaacaauaccguguacgacccucugcagcccgagcuggacagcuucaaagaggaacuggacaaguacuuuaagaaccacacaagccccgacguggaccugggcgauaucagcggaaucaaugccagcgucgugaacauccagaaagagaucgaccggcugaacgagguggccaagaaucugaacgagagccugaucgaccugcaagaacuggggaaguacgagcaguacaucaaguggcccugguacaucuggcugggcuuuaucgccggacugauugccaucgugauggucacaaucaugcuguguugcaugaccagcugcuguagcugccugaagggcuguuguagcuguggcagcugcugcaaguucgacgaggacgauucugagcccgugcugaagggcgugaaacugcacuacaccugaggacuagucccuguucccagagcccacuuuuuuuucuuuuuuugaaauaaaauagccugucuuucagaucucaaaggcucuuuucagagccaccaaaaaaaaaaaaaaaaaaaaaaaaaaaaaaaaaaaaaaaaaaaaaaaaaaaaaaaaaaaaaaaaaaaaaaaaaaaaaaaaaaaaaaaaaaaaaaaaaaaaa

SEQ ID NO: 23824 - RNA, 4191 nt, Artificial Sequence
  SARS-CoV-2/Wuhan/WIV05/2019__EPI_ISL_402128 spike protein mRNA gc mod (1-1273)(K986P_V987P_K986P_V987P_E484K_D614G)
aggagagggcgcuuggcuugcaaggacccugagcugcggcauugaagcacacccaacccaacucgacugaagucagccucacugaaccggaucugagaaucuucucucucugggcuugccagggcucuccgaaccuagcuagcauccucuucaauuccaacuagaaagcuuaccauguucguguuucuggugcugcugccccugguguccagccagugugugaaccugaccaccagaacacagcugccuccagccuacaccaacagcuucaccagaggcguguacuaccccgacaagguguucagauccagcgugcugcacucuacccaggaccuguuccugccuuucuucagcaacgugaccugguuccacgccauccacguguccggcaccaauggcaccaagagauucgacaaccccgugcugcccuucaacgacgggguguacuuugccagcaccgagaaguccaacaucaucagaggcuggaucuucggcaccacacuggacagcaagacccagagccugcugaucgugaacaacgccaccaacguggucaucaaagugugcgaguuccaguucugcaacgaccccuuccugggcgucuacuaccacaagaacaacaagagcuggauggaaagcgaguuccggguguacagcagcgccaacaacugcaccuucgaguacgugucccagccuuuccugauggaccuggaaggcaagcagggcaacuucaagaaccugcgcgaguucguguucaagaacaucgacggcuacuucaaaaucuacagcaagcacaccccuaucaaccucgugcgggaucugccucagggcuucucugcucuggaaccccugguggaucugcccaucggcaucaacaucacccgguuucagacacugcuggcccugcacagaagcuaccugacaccuggcgauagcagcagcggauggacagcuggugccgccgcuuacuaugugggcuaccugcagccuagaaccuuccugcugaaguacaacgagaacggcaccaucaccgacgccguggauugugcucuggauccucugagcgagacaaagugcacccugaaguccuucaccguggaaaagggcaucuaccagaccagcaacuuccgggugcagcccaccgaauccaucgugcgguuccccaauaucaccaaucugugccccuucggcgagguguucaaugccaccagauucgccucuguguacgccuggaaccggaagcggaucagcaauugcguggccgacuacuccgugcuguacaacuccgccagcuucagcaccuucaagugcuacggcguguccccuaccaagcugaacgaccugugcuucacaaacguguacgccgacagcuucgugauccggggagaugaagugcggcagauugccccuggacagacaggcaagaucgccgacuacaacuacaagcugcccgacgacuucaccggcugugugauugccuggaacagcaacaaccuggacuccaaagucggcggcaacuacaauuaccuguaccggcuguuccggaaguccaaucugaagcccuucgagcgggacaucagcaccgaaaucuaucaggccggcagcaccccuugcaacggcgugaagggcuucaacugcuacuucccacugcaguccuacggcuuucagcccacaaauggcgugggcuaucagcccuacagagugguggugcugagcuucgaacugcugcaugcuccugccacagugugcggcccuaagaaaagcaccaaucucgugaagaacaaaugcgugaacuucaacuucaacggccugaccggcaccggcgugcugacagagagcaacaagaaguuccugccauuccagcaguuuggccgggauaucgccgauaccacagacgccguuagagauccccagacacuggaaauccuggacaucaccccaugcagcuucggcggagugucugugaucaccccuggcaccaacaccagcaaucagguggcagugcuguaccagggcgugaacuguaccgaagugcccguggccauucacgccgaucagcugacaccuacauggcggguguacuccaccggcagcaauguguuucagaccagagccggcugucugaucggagccgagcacgugaacaauagcuacgagugcgacauccccaucggcgcuggcaucugugccagcuaccagacacagacaaacagccccagacgggcuagaagcguggccagccagagcaucauugccuacacaaugucucugggcgccgagaacagcguggccuacuccaacaacucuaucgcuauccccaccaacuucaccaucagcgugaccaccgagauccugccuguguccaugaccaagaccagcguggacugcaccauguacaucugcggcgauuccaccgagugcuccaaccugcugcugcaguacggcagcuucugcacccagcugaauagagcccugacagggaucgccguggaacaggacaagaacacccaagagguguucgcccaagugaagcaaaucuacaagaccccuccuaucaaggacuucggcggcuucaauuucagccagauucugcccgauccuagcaagcccagcaagcggagcuucaucgaggaccugcuguucaacaaagugacacuggccgacgccggcuucaucaagcaguauggcgauugucugggcgacauugccgccagggaucugauuugcgcccagaaguuuaacggacugacagugcugccuccucugcugaccgaugagaugaucgcccaguacacaucugcccugcuggccggcacaaucacaagcggcuggacauuuggagcuggcgccgcucugcagauccccuuugcuaugcagauggccuaccgguucaacggcaucggagugacccagaaugugcuguacgagaaccagaagcugaucgccaaccaguucaacagcgccaucggcaagauccaggacagccugagcagcacagcaagcgcccugggaaagcugcaggacguggucaaccagaaugcccaggcacugaacacccuggucaagcagcuguccuccaacuucggcgccaucagcucugugcugaacgauauccugagcagacuggacccuccugaggccgaggugcagaucgacagacugaucacaggcagacugcagagccuccagacauacgugacccagcagcugaucagagccgccgagauuagagccucugccaaucuggccgccaccaagaugucugagugugugcugggccagagcaagagaguggacuuuugcggcaagggcuaccaccugaugagcuucccucagucugccccucacggcgugguguuucugcacgugacauaugugcccgcucaagagaagaauuucaccaccgcuccagccaucugccacgacggcaaagcccacuuuccuagagaaggcguguucguguccaacggcacccauugguucgugacacagcggaacuucuacgagccccagaucaucaccaccgacaacaccuucgugucuggcaacugcgacguugugaucggcauugugaacaauaccguguacgacccucugcagcccgagcuggacagcuucaaagaggaacuggacaaguacuuuaagaaccacacaagccccgacguggaccugggcgauaucagcggaaucaaugccagcgucgugaacauccagaaagagaucgaccggcugaacgagguggccaagaaucugaacgagagccugaucgaccugcaagaacuggggaaguacgagcaguacaucaaguggcccugguacaucuggcugggcuuuaucgccggacugauugccaucgugauggucacaaucaugcuguguugcaugaccagcugcuguagcugccugaagggcuguuguagcuguggcagcugcugcaaguucgacgaggacgauucugagcccgugcugaagggcgugaaacugcacuacaccugaggacuagucccuguucccagagcccacuuuuuuuucuuuuuuugaaauaaaauagccugucuuucagaucucaaaggcucuuuucagagccaccaaaaaaaaaaaaaaaaaaaaaaaaaaaaaaaaaaaaaaaaaaaaaaaaaaaaaaaaaaaaaaaaaaaaaaaaaaaaaaaaaaaaaaaaaaaaaaaaaaaaa

SEQ ID NO: 23825 - RNA, 4191 nt, Artificial Sequence
  SARS-CoV-2/Wuhan/WIV05/2019__EPI_ISL_402128 spike protein mRNA gc mod (1-1273)(K986P_V987P_K986P_V987P_L18F_T20N_P26S_D138Y_R190S_K417T _E484K_N501Y_D614G_H655Y_T1027I)
aggagagggcgcuuggcuugcaaggacccugagcugcggcauugaagcacacccaacccaacucgacugaagucagccucacugaaccggaucugagaaucuucucucucugggcuugccagggcucuccgaaccuagcuagcauccucuucaauuccaacuagaaagcuuaccauguucguguuucuggugcugcugccccugguguccagccagugugugaacuucaccaacagaacacagcugccuagcgccuacaccaacagcuucaccagaggcguguacuaccccgacaagguguucagauccagcgugcugcacucuacccaggaccuguuccugccuuucuucagcaacgugaccugguuccacgccauccacguguccggcaccaauggcaccaagagauucgacaaccccgugcugcccuucaacgacgggguguacuuugccagcaccgagaaguccaacaucaucagaggcuggaucuucggcaccacacuggacagcaagacccagagccugcugaucgugaacaacgccaccaacguggucaucaaagugugcgaguuccaguucugcaacuaccccuuccugggcgucuacuaccacaagaacaacaagagcuggauggaaagcgaguuccggguguacagcagcgccaacaacugcaccuucgaguacgugucccagccuuuccugauggaccuggaaggcaagcagggcaacuucaagaaccugagcgaguucguguucaagaacaucgacggcuacuucaaaaucuacagcaagcacaccccuaucaaccucgugcgggaucugccucagggcuucucugcucuggaaccccugguggaucugcccaucggcaucaacaucacccgguuucagacacugcuggcccugcacagaagcuaccugacaccuggcgauagcagcagcggauggacagcuggugccgccgcuuacuaugugggcuaccugcagccuagaaccuuccugcugaaguacaacgagaacggcaccaucaccgacgccguggauugugcucuggauccucugagcgagacaaagugcacccugaaguccuucaccguggaaaagggcaucuaccagaccagcaacuuccgggugcagcccaccgaauccaucgugcgguuccccaauaucaccaaucugugccccuucggcgagguguucaaugccaccagauucgccucuguguacgccuggaaccggaagcggaucagcaauugcguggccgacuacuccgugcuguacaacuccgccagcuucagcaccuucaagugcuacggcguguccccuaccaagcugaacgaccugugcuucacaaacguguacgccgacagcuucgugauccggggagaugaagugcggcagauugccccuggacagacaggcaccaucgccgacuacaacuacaagcugcccgacgacuucaccggcugugugauugccuggaacagcaacaaccuggacuccaaagucggcggcaacuacaauuaccuguaccggcuguuccggaaguccaaucugaagcccuucgagcgggacaucagcaccgaaaucuaucaggccggcagcaccccuugcaacggcgugaagggcuucaacugcuacuucccacugcaguccuacggcuuucagcccacauacggcgugggcuaucagcccuacagagugguggugcugagcuucgaacugcugcaugcuccugccacagugugcggcccuaagaaaagcaccaaucucgugaagaacaaaugcgugaacuucaacuucaacggccugaccggcaccggcgugcugacagagagcaacaagaaguuccugccauuccagcaguuuggccgggauaucgccgauaccacagacgccguuagagauccccagacacuggaaauccuggacaucaccccaugcagcuucggcggagugucugugaucaccccuggcaccaacaccagcaaucagguggcagugcuguaccagggcgugaacuguaccgaagugcccguggccauucacgccgaucagcugacaccuacauggcggguguacuccaccggcagcaauguguuucagaccagagccggcugucugaucggagccgaguacgugaacaauagcuacgagugcgacauccccaucggcgcuggcaucugugccagcuaccagacacagacaaacagccccagacgggcuagaagcguggccagccagagcaucauugccuacacaaugucucugggcgccgagaacagcguggccuacuccaacaacucuaucgcuauccccaccaacuucaccaucagcgugaccaccgagauccugccuguguccaugaccaagaccagcguggacugcaccauguacaucugcggcgauuccaccgagugcuccaaccugcugcugcaguacggcagcuucugcacccagcugaauagagcccugacagggaucgccguggaacaggacaagaacacccaagagguguucgcccaagugaagcaaaucuacaagaccccuccuaucaaggacuucggcggcuucaauuucagccagauucugcccgauccuagcaagcccagcaagcggagcuucaucgaggaccugcuguucaacaaagugacacuggccgacgccggcuucaucaagcaguauggcgauugucugggcgacauugccgccagggaucugauuugcgcccagaaguuuaacggacugacagugcugccuccucugcugaccgaugagaugaucgcccaguacacaucugcccugcuggccggcacaaucacaagcggcuggacauuuggagcuggcgccgcucugcagauccccuuugcuaugcagauggccuaccgguucaacggcaucggagugacccagaaugugcuguacgagaaccagaagcugaucgccaaccaguucaacagcgccaucggcaagauccaggacagccugagcagcacagcaagcgcccugggaaagcugcaggacguggucaaccagaaugcccaggcacugaacacccuggucaagcagcuguccuccaacuucggcgccaucagcucugugcugaacgauauccugagcagacuggacccuccugaggccgaggugcagaucgacagacugaucacaggcagacugcagagccuccagacauacgugacccagcagcugaucagagccgccgagauuagagccucugccaaucuggccgccaucaagaugucugagugugugcugggccagagcaagagaguggacuuuugcggcaagggcuaccaccugaugagcuucccucagucugccccucacggcgugguguuucugcacgugacauaugugcccgcucaagagaagaauuucaccaccgcuccagccaucugccacgacggcaaagcccacuuuccuagagaaggcguguucguguccaacggcacccauugguucgugacacagcggaacuucuacgagccccagaucaucaccaccgacaacaccuucgugucuggcaacugcgacguugugaucggcauugugaacaauaccguguacgacccucugcagcccgagcuggacagcuucaaagaggaacuggacaaguacuuuaagaaccacacaagccccgacguggaccugggcgauaucagcggaaucaaugccagcgucgugaacauccagaaagagaucgaccggcugaacgagguggccaagaaucugaacgagagccugaucgaccugcaagaacuggggaaguacgagcaguacaucaaguggcccugguacaucuggcugggcuuuaucgccggacugauugccaucgugauggucacaaucaugcuguguugcaugaccagcugcuguagcugccugaagggcuguuguagcuguggcagcugcugcaaguucgacgaggacgauucugagcccgugcugaagggcgugaaacugcacuacaccugaggacuagucccuguucccagagcccacuuuuuuuucuuuuuuugaaauaaaauagccugucuuucagaucucaaaggcucuuuucagagccaccaaaaaaaaaaaaaaaaaaaaaaaaaaaaaaaaaaaaaaaaaaaaaaaaaaaaaaaaaaaaaaaaaaaaaaaaaaaaaaaaaaaaaaaaaaaaaaaaaaaaa

SEQ ID NO: 23826 - RNA, 4191 nt, Artificial Sequence
  SARS-CoV-2/Wuhan/WIV05/2019__EPI_ISL_402128 spike protein mRNA gc mod (1-1273)(K986P_V987P_K986P_V987P_S13I_W152C_L452R_D614G)
aggagagggcgcuuggcuugcaaggacccugagcugcggcauugaagcacacccaacccaacucgacugaagucagccucacugaaccggaucugagaaucuucucucucugggcuugccagggcucuccgaaccuagcuagcauccucuucaauuccaacuagaaagcuuaccauguucguguuucuggugcugcugccccugguguccauccagugugugaaccugaccaccagaacacagcugccuccagccuacaccaacagcuucaccagaggcguguacuaccccgacaagguguucagauccagcgugcugcacucuacccaggaccuguuccugccuuucuucagcaacgugaccugguuccacgccauccacguguccggcaccaauggcaccaagagauucgacaaccccgugcugcccuucaacgacgggguguacuuugccagcaccgagaaguccaacaucaucagaggcuggaucuucggcaccacacuggacagcaagacccagagccugcugaucgugaacaacgccaccaacguggucaucaaagugugcgaguuccaguucugcaacgaccccuuccugggcgucuacuaccacaagaacaacaagagcugcauggaaagcgaguuccggguguacagcagcgccaacaacugcaccuucgaguacgugucccagccuuuccugauggaccuggaaggcaagcagggcaacuucaagaaccugcgcgaguucguguucaagaacaucgacggcuacuucaaaaucuacagcaagcacaccccuaucaaccucgugcgggaucugccucagggcuucucugcucuggaaccccugguggaucugcccaucggcaucaacaucacccgguuucagacacugcuggcccugcacagaagcuaccugacaccuggcgauagcagcagcggauggacagcuggugccgccgcuuacuaugugggcuaccugcagccuagaaccuuccugcugaaguacaacgagaacggcaccaucaccgacgccguggauugugcucuggauccucugagcgagacaaagugcacccugaaguccuucaccguggaaaagggcaucuaccagaccagcaacuuccgggugcagcccaccgaauccaucgugcgguuccccaauaucaccaaucugugccccuucggcgagguguucaaugccaccagauucgccucuguguacgccuggaaccggaagcggaucagcaauugcguggccgacuacuccgugcuguacaacuccgccagcuucagcaccuucaagugcuacggcguguccccuaccaagcugaacgaccugugcuucacaaacguguacgccgacagcuucgugauccggggagaugaagugcggcagauugccccuggacagacaggcaagaucgccgacuacaacuacaagcugcccgacgacuucaccggcugugugauugccuggaacagcaacaaccuggacuccaaagucggcggcaacuacaauuaccgcuaccggcuguuccggaaguccaaucugaagcccuucgagcgggacaucagcaccgaaaucuaucaggccggcagcaccccuugcaacggcguggaaggcuucaacugcuacuucccacugcaguccuacggcuuucagcccacaaauggcgugggcuaucagcccuacagagugguggugcugagcuucgaacugcugcaugcuccugccacagugugcggcccuaagaaaagcaccaaucucgugaagaacaaaugcgugaacuucaacuucaacggccugaccggcaccggcgugcugacagagagcaacaagaaguuccugccauuccagcaguuuggccgggauaucgccgauaccacagacgccguuagagauccccagacacuggaaauccuggacaucaccccaugcagcuucggcggagugucugugaucaccccuggcaccaacaccagcaaucagguggcagugcuguaccagggcgugaacuguaccgaagugcccguggccauucacgccgaucagcugacaccuacauggcggguguacuccaccggcagcaauguguuucagaccagagccggcugucugaucggagccgagcacgugaacaauagcuacgagugcgacauccccaucggcgcuggcaucugugccagcuaccagacacagacaaacagccccagacgggcuagaagcguggccagccagagcaucauugccuacacaaugucucugggcgccgagaacagcguggccuacuccaacaacucuaucgcuauccccaccaacuucaccaucagcgugaccaccgagauccugccuguguccaugaccaagaccagcguggacugcaccauguacaucugcggcgauuccaccgagugcuccaaccugcugcugcaguacggcagcuucugcacccagcugaauagagcccugacagggaucgccguggaacaggacaagaacacccaagagguguucgcccaagugaagcaaaucuacaagaccccuccuaucaaggacuucggcggcuucaauuucagccagauucugcccgauccuagcaagcccagcaagcggagcuucaucgaggaccugcuguucaacaaagugacacuggccgacgccggcuucaucaagcaguauggcgauugucugggcgacauugccgccagggaucugauuugcgcccagaaguuuaacggacugacagugcugccuccucugcugaccgaugagaugaucgcccaguacacaucugcccugcuggccggcacaaucacaagcggcuggacauuuggagcuggcgccgcucugcagauccccuuugcuaugcagauggccuaccgguucaacggcaucggagugacccagaaugugcuguacgagaaccagaagcugaucgccaaccaguucaacagcgccaucggcaagauccaggacagccugagcagcacagcaagcgcccugggaaagcugcaggacguggucaaccagaaugcccaggcacugaacacccuggucaagcagcuguccuccaacuucggcgccaucagcucugugcugaacgauauccugagcagacuggacccuccugaggccgaggugcagaucgacagacugaucacaggcagacugcagagccuccagacauacgugacccagcagcugaucagagccgccgagauuagagccucugccaaucuggccgccaccaagaugucugagugugugcugggccagagcaagagaguggacuuuugcggcaagggcuaccaccugaugagcuucccucagucugccccucacggcgugguguuucugcacgugacauaugugcccgcucaagagaagaauuucaccaccgcuccagccaucugccacgacggcaaagcccacuuuccuagagaaggcguguucguguccaacggcacccauugguucgugacacagcggaacuucuacgagccccagaucaucaccaccgacaacaccuucgugucuggcaacugcgacguugugaucggcauugugaacaauaccguguacgacccucugcagcccgagcuggacagcuucaaagaggaacuggacaaguacuuuaagaaccacacaagccccgacguggaccugggcgauaucagcggaaucaaugccagcgucgugaacauccagaaagagaucgaccggcugaacgagguggccaagaaucugaacgagagccugaucgaccugcaagaacuggggaaguacgagcaguacaucaaguggcccugguacaucuggcugggcuuuaucgccggacugauugccaucgugauggucacaaucaugcuguguugcaugaccagcugcuguagcugccugaagggcuguuguagcuguggcagcugcugcaaguucgacgaggacgauucugagcccgugcugaagggcgugaaacugcacuacaccugaggacuagucccuguucccagagcccacuuuuuuuucuuuuuuugaaauaaaauagccugucuuucagaucucaaaggcucuuuucagagccaccaaaaaaaaaaaaaaaaaaaaaaaaaaaaaaaaaaaaaaaaaaaaaaaaaaaaaaaaaaaaaaaaaaaaaaaaaaaaaaaaaaaaaaaaaaaaaaaaaaaaa

SEQ ID NO: 23827 - RNA, 4191 nt, Artificial Sequence
  SARS-CoV-2/Wuhan/WIV05/2019__EPI_ISL_402128 spike protein mRNA gc mod (1-1273)(K986P_V987P)
aggagagggcgcuuggcuugcaaggacccugagcugcggcauugaagcacacccaacccaacucgacugaagucagccucacugaaccggaucugagaaucuucucucucugggcuugccagggcucuccgaaccuagcuagcauccucuucaauuccaacuagaaagcuuaccauguucguguuccuggugcugcugccucugguguccagccagugugugaaccugaccaccagaacacagcugccuccagccuacaccaacagcuuuaccagaggcguguacuaccccgacaagguguucagauccagcgugcugcacucuacccaggaccuguuccugccuuucuucagcaacgugaccugguuccacgccauccacguguccggcaccaauggcaccaagagauucgacaaccccgugcugcccuucaacgacgggguguacuuugccagcaccgagaaguccaacaucaucagaggcuggaucuucggcaccacacuggacagcaagacccagagccugcugaucgugaacaacgccaccaacguggucaucaaagugugcgaguuccaguucugcaacgaccccuuccugggcgucuacuaccacaagaacaacaagagcuggauggaaagcgaguuccggguguacagcagcgccaacaacugcaccuucgaguacgugucccagccuuuccugauggaccuggaaggcaagcagggcaacuucaagaaccugcgcgaguucguguuuaagaacaucgacggcuacuucaagaucuacagcaagcacaccccuaucaaccucgugcgggaucugccucagggcuucucugcucuggaaccccugguggaucugcccaucggcaucaacaucacccgguuucagacacugcuggcccugcacagaagcuaccugacaccuggcgauagcagcagcggauggacagcuggugccgccgcuuacuaugugggcuaccugcagccuagaaccuuccugcugaaguacaacgagaacggcaccaucaccgacgccguggauugugcucuggauccucugagcgagacaaagugcacccugaaguccuucaccguggaaaagggcaucuaccagaccagcaacuuccgggugcagcccaccgaauccaucgugcgguuccccaauaucaccaaucugugccccuucggcgagguguucaaugccaccagauucgccucuguguacgccuggaaccggaagcggaucagcaauugcguggccgacuacuccgugcuguacaacuccgccagcuucagcaccuucaagugcuacggcguguccccuaccaagcugaacgaccugugcuucacaaacguguacgccgacagcuucgugauccggggagaugaagugcggcagauugccccuggacagacaggcaagaucgccgacuacaacuacaagcugcccgacgacuucaccggcugugugauugccuggaacagcaacaaccuggacuccaaagucggcggcaacuacaauuaccuguaccggcuguuccggaaguccaaucugaagcccuucgagcgggacaucuccaccgagaucuaucaggccggcagcaccccuuguaacggcguggaaggcuucaacugcuacuucccacugcaguccuacggcuuucagcccacaaauggcgugggcuaucagcccuacagagugguggugcugagcuucgaacugcugcaugccccugccacagugugcggcccuaagaaaagcaccaaucucgugaagaacaaaugcgugaacuucaacuucaacggccugaccggcaccggcgugcugacagagagcaacaagaaguuccugccauuccagcaguuuggccgggauaucgccgauaccacagacgccguuagagauccccagacacuggaaauccuggacaucaccccuugcagcuucggcggagugucugugaucaccccuggcaccaacaccagcaaucagguggcagugcuguaccaggacgugaacuguaccgaagugcccguggccauucacgccgaucagcugacaccuacauggcggguguacuccaccggcagcaauguguuucagaccagagccggcugucugaucggagccgagcacgugaacaauagcuacgagugcgacauccccaucggcgcuggaaucugcgccagcuaccagacacagacaaacagcccucggagagccagaagcguggccagccagagcaucauugccuacacaaugucucugggcgccgagaacagcguggccuacuccaacaacucuaucgcuauccccaccaacuucaccaucagcgugaccacagagauccugccuguguccaugaccaagaccagcguggacugcaccauguacaucugcggcgauuccaccgagugcuccaaccugcugcugcaguacggcagcuucugcacccagcugaauagagcccugacagggaucgccguggaacaggacaagaacacccaagagguguucgcccaagugaagcagaucuacaagaccccuccuaucaaggacuucggcggcuucaauuucagccagauucugcccgauccuagcaagcccagcaagcggagcuucaucgaggaccugcuguucaacaaagugacacuggccgacgccggcuucaucaagcaguauggcgauugucugggcgacauugccgccagggaucugauuugcgcccagaaguuuaacggacugacagugcugccuccucugcugaccgaugagaugaucgcccaguacacaucugcccugcuggccggcacaaucacaagcggcuggacauuuggagcaggcgccgcucugcagauccccuuugcuaugcagauggccuaccgguucaacggcaucggagugacccagaaugugcuguacgagaaccagaagcugaucgccaaccaguucaacagcgccaucggcaagauccaggacagccugagcagcacagcaagcgcccugggaaagcugcaggacguggucaaccagaaugcccaggcacugaacacccuggucaagcagcuguccuccaacuucggcgccaucagcucugugcugaacgauauccugagcagacuggacccuccugaggccgaggugcagaucgacagacugaucacaggcagacugcagagccuccagacauacgugacccagcagcugaucagagccgccgagauuagagccucugccaaucuggccgccaccaagaugucugagugugugcugggccagagcaagagaguggacuuuugcggcaagggcuaccaccugaugagcuucccucagucugccccucacggcgugguguuucugcacgugacauaugugcccgcucaagagaagaauuucaccaccgcuccagccaucugccacgacggcaaagcccacuuuccuagagaaggcguguucguguccaacggcacccauugguucgugacacagcggaacuucuacgagccccagaucaucaccaccgacaacaccuucgugucuggcaacugcgacgucgugaucggcauugugaacaauaccguguacgacccucugcagcccgagcuggacagcuucaaagaggaacuggacaaguacuuuaagaaccacacaagccccgacguggaccugggcgauaucagcggaaucaaugccagcgucgugaacauccagaaagagaucgaccggcugaacgagguggccaagaaucugaacgagagccugaucgaccugcaagaacuggggaaguacgagcaguacaucaaguggcccugguacaucuggcugggcuuuaucgccggacugauugccaucgugauggucacaaucaugcuguguugcaugaccagcugcuguagcugccugaagggcuguuguagcuguggcagcugcugcaaguucgacgaggacgauucugagcccgugcugaagggcgugaaacugcacuacacaugaggacuagucccuguucccagagcccacuuuuuuuucuuuuuuugaaauaaaauagccugucuuucagaucucaaaggcucuuuucagagccaccaaaaaaaaaaaaaaaaaaaaaaaaaaaaaaaaaaaaaaaaaaaaaaaaaaaaaaaaaaaaaaaaaaaaaaaaaaaaaaaaaaaaaaaaaaaaaaaaaaaaa

SEQ ID NO: 23828 - RNA, 4191 nt, Artificial Sequence
  SARS-CoV-2/Wuhan/WIV05/2019__EPI_ISL_402128 spike protein mRNA gc mod (1-1273)(K986P_V987P_ D614G)
aggagagggcgcuuggcuugcaaggacccugagcugcggcauugaagcacacccaacccaacucgacugaagucagccucacugaaccggaucugagaaucuucucucucugggcuugccagggcucuccgaaccuagcuagcauccucuucaauuccaacuagaaagcuuaccauguucguguuccuggugcugcugccucugguguccagccagugugugaaccugaccaccagaacacagcugccuccagccuacaccaacagcuuuaccagaggcguguacuaccccgacaagguguucagauccagcgugcugcacucuacccaggaccuguuccugccuuucuucagcaacgugaccugguuccacgccauccacguguccggcaccaauggcaccaagagauucgacaaccccgugcugcccuucaacgacgggguguacuuugccagcaccgagaaguccaacaucaucagaggcuggaucuucggcaccacacuggacagcaagacccagagccugcugaucgugaacaacgccaccaacguggucaucaaagugugcgaguuccaguucugcaacgaccccuuccugggcgucuacuaccacaagaacaacaagagcuggauggaaagcgaguuccggguguacagcagcgccaacaacugcaccuucgaguacgugucccagccuuuccugauggaccuggaaggcaagcagggcaacuucaagaaccugcgcgaguucguguuuaagaacaucgacggcuacuucaagaucuacagcaagcacaccccuaucaaccucgugcgggaucugccucagggcuucucugcucuggaaccccugguggaucugcccaucggcaucaacaucacccgguuucagacacugcuggcccugcacagaagcuaccugacaccuggcgauagcagcagcggauggacagcuggugccgccgcuuacuaugugggcuaccugcagccuagaaccuuccugcugaaguacaacgagaacggcaccaucaccgacgccguggauugugcucuggauccucugagcgagacaaagugcacccugaaguccuucaccguggaaaagggcaucuaccagaccagcaacuuccgggugcagcccaccgaauccaucgugcgguuccccaauaucaccaaucugugccccuucggcgagguguucaaugccaccagauucgccucuguguacgccuggaaccggaagcggaucagcaauugcguggccgacuacuccgugcuguacaacuccgccagcuucagcaccuucaagugcuacggcguguccccuaccaagcugaacgaccugugcuucacaaacguguacgccgacagcuucgugauccggggagaugaagugcggcagauugccccuggacagacaggcaagaucgccgacuacaacuacaagcugcccgacgacuucaccggcugugugauugccuggaacagcaacaaccuggacuccaaagucggcggcaacuacaauuaccuguaccggcuguuccggaaguccaaucugaagcccuucgagcgggacaucuccaccgagaucuaucaggccggcagcaccccuuguaacggcguggaaggcuucaacugcuacuucccacugcaguccuacggcuuucagcccacaaauggcgugggcuaucagcccuacagagugguggugcugagcuucgaacugcugcaugccccugccacagugugcggcccuaagaaaagcaccaaucucgugaagaacaaaugcgugaacuucaacuucaacggccugaccggcaccggcgugcugacagagagcaacaagaaguuccugccauuccagcaguuuggccgggauaucgccgauaccacagacgccguuagagauccccagacacuggaaauccuggacaucaccccuugcagcuucggcggagugucugugaucaccccuggcaccaacaccagcaaucagguggcagugcuguaccagggcgugaacuguaccgaagugcccguggccauucacgccgaucagcugacaccuacauggcggguguacuccaccggcagcaauguguuucagaccagagccggcugucugaucggagccgagcacgugaacaauagcuacgagugcgacauccccaucggcgcuggaaucugcgccagcuaccagacacagacaaacagcccucggagagccagaagcguggccagccagagcaucauugccuacacaaugucucugggcgccgagaacagcguggccuacuccaacaacucuaucgcuauccccaccaacuucaccaucagcgugaccacagagauccugccuguguccaugaccaagaccagcguggacugcaccauguacaucugcggcgauuccaccgagugcuccaaccugcugcugcaguacggcagcuucugcacccagcugaauagagcccugacagggaucgccguggaacaggacaagaacacccaagagguguucgcccaagugaagcagaucuacaagaccccuccuaucaaggacuucggcggcuucaauuucagccagauucugcccgauccuagcaagcccagcaagcggagcuucaucgaggaccugcuguucaacaaagugacacuggccgacgccggcuucaucaagcaguauggcgauugucugggcgacauugccgccagggaucugauuugcgcccagaaguuuaacggacugacagugcugccuccucugcugaccgaugagaugaucgcccaguacacaucugcccugcuggccggcacaaucacaagcggcuggacauuuggagcaggcgccgcucugcagauccccuuugcuaugcagauggccuaccgguucaacggcaucggagugacccagaaugugcuguacgagaaccagaagcugaucgccaaccaguucaacagcgccaucggcaagauccaggacagccugagcagcacagcaagcgcccugggaaagcugcaggacguggucaaccagaaugcccaggcacugaacacccuggucaagcagcuguccuccaacuucggcgccaucagcucugugcugaacgauauccugagcagacuggacccuccugaggccgaggugcagaucgacagacugaucacaggcagacugcagagccuccagacauacgugacccagcagcugaucagagccgccgagauuagagccucugccaaucuggccgccaccaagaugucugagugugugcugggccagagcaagagaguggacuuuugcggcaagggcuaccaccugaugagcuucccucagucugccccucacggcgugguguuucugcacgugacauaugugcccgcucaagagaagaauuucaccaccgcuccagccaucugccacgacggcaaagcccacuuuccuagagaaggcguguucguguccaacggcacccauugguucgugacacagcggaacuucuacgagccccagaucaucaccaccgacaacaccuucgugucuggcaacugcgacgucgugaucggcauugugaacaauaccguguacgacccucugcagcccgagcuggacagcuucaaagaggaacuggacaaguacuuuaagaaccacacaagccccgacguggaccugggcgauaucagcggaaucaaugccagcgucgugaacauccagaaagagaucgaccggcugaacgagguggccaagaaucugaacgagagccugaucgaccugcaagaacuggggaaguacgagcaguacaucaaguggcccugguacaucuggcugggcuuuaucgccggacugauugccaucgugauggucacaaucaugcuguguugcaugaccagcugcuguagcugccugaagggcuguuguagcuguggcagcugcugcaaguucgacgaggacgauucugagcccgugcugaagggcgugaaacugcacuacacaugaggacuagucccuguucccagagcccacuuuuuuuucuuuuuuugaaauaaaauagccugucuuucagaucucaaaggcucuuuucagagccaccaaaaaaaaaaaaaaaaaaaaaaaaaaaaaaaaaaaaaaaaaaaaaaaaaaaaaaaaaaaaaaaaaaaaaaaaaaaaaaaaaaaaaaaaaaaaaaaaaaaaa

SEQ ID NO: 23829 - RNA, 4191 nt, Artificial Sequence
  SARS-CoV-2/Wuhan/WIV05/2019__EPI_ISL_402128 spike protein mRNA gc mod (1-1273)(K986P_V987P_A222V_D614G)
aggagagggcgcuuggcuugcaaggacccugagcugcggcauugaagcacacccaacccaacucgacugaagucagccucacugaaccggaucugagaaucuucucucucugggcuugccagggcucuccgaaccuagcuagcauccucuucaauuccaacuagaaagcuuaccauguucguguuccuggugcugcugccucugguguccagccagugugugaaccugaccaccagaacacagcugccuccagccuacaccaacagcuuuaccagaggcguguacuaccccgacaagguguucagauccagcgugcugcacucuacccaggaccuguuccugccuuucuucagcaacgugaccugguuccacgccauccacguguccggcaccaauggcaccaagagauucgacaaccccgugcugcccuucaacgacgggguguacuuugccagcaccgagaaguccaacaucaucagaggcuggaucuucggcaccacacuggacagcaagacccagagccugcugaucgugaacaacgccaccaacguggucaucaaagugugcgaguuccaguucugcaacgaccccuuccugggcgucuacuaccacaagaacaacaagagcuggauggaaagcgaguuccggguguacagcagcgccaacaacugcaccuucgaguacgugucccagccuuuccugauggaccuggaaggcaagcagggcaacuucaagaaccugcgcgaguucguguuuaagaacaucgacggcuacuucaagaucuacagcaagcacaccccuaucaaccucgugcgggaucugccucagggcuucucugugcuggaaccccugguggaucugcccaucggcaucaacaucacccgguuucagacacugcuggcccugcacagaagcuaccugacaccuggcgauagcagcagcggauggacagcuggugccgccgcuuacuaugugggcuaccugcagccuagaaccuuccugcugaaguacaacgagaacggcaccaucaccgacgccguggauugugcucuggauccucugagcgagacaaagugcacccugaaguccuucaccguggaaaagggcaucuaccagaccagcaacuuccgggugcagcccaccgaauccaucgugcgguuccccaauaucaccaaucugugccccuucggcgagguguucaaugccaccagauucgccucuguguacgccuggaaccggaagcggaucagcaauugcguggccgacuacuccgugcuguacaacuccgccagcuucagcaccuucaagugcuacggcguguccccuaccaagcugaacgaccugugcuucacaaacguguacgccgacagcuucgugauccggggagaugaagugcggcagauugccccuggacagacaggcaagaucgccgacuacaacuacaagcugcccgacgacuucaccggcugugugauugccuggaacagcaacaaccuggacuccaaagucggcggcaacuacaauuaccuguaccggcuguuccggaaguccaaucugaagcccuucgagcgggacaucuccaccgagaucuaucaggccggcagcaccccuuguaacggcguggaaggcuucaacugcuacuucccacugcaguccuacggcuuucagcccacaaauggcgugggcuaucagcccuacagagugguggugcugagcuucgaacugcugcaugccccugccacagugugcggcccuaagaaaagcaccaaucucgugaagaacaaaugcgugaacuucaacuucaacggccugaccggcaccggcgugcugacagagagcaacaagaaguuccugccauuccagcaguuuggccgggauaucgccgauaccacagacgccguuagagauccccagacacuggaaauccuggacaucaccccuugcagcuucggcggagugucugugaucaccccuggcaccaacaccagcaaucagguggcagugcuguaccagggcgugaacuguaccgaagugcccguggccauucacgccgaucagcugacaccuacauggcggguguacuccaccggcagcaauguguuucagaccagagccggcugucugaucggagccgagcacgugaacaauagcuacgagugcgacauccccaucggcgcuggaaucugcgccagcuaccagacacagacaaacagcccucggagagccagaagcguggccagccagagcaucauugccuacacaaugucucugggcgccgagaacagcguggccuacuccaacaacucuaucgcuauccccaccaacuucaccaucagcgugaccacagagauccugccuguguccaugaccaagaccagcguggacugcaccauguacaucugcggcgauuccaccgagugcuccaaccugcugcugcaguacggcagcuucugcacccagcugaauagagcccugacagggaucgccguggaacaggacaagaacacccaagagguguucgcccaagugaagcagaucuacaagaccccuccuaucaaggacuucggcggcuucaauuucagccagauucugcccgauccuagcaagcccagcaagcggagcuucaucgaggaccugcuguucaacaaagugacacuggccgacgccggcuucaucaagcaguauggcgauugucugggcgacauugccgccagggaucugauuugcgcccagaaguuuaacggacugacagugcugccuccucugcugaccgaugagaugaucgcccaguacacaucugcccugcuggccggcacaaucacaagcggcuggacauuuggagcaggcgccgcucugcagauccccuuugcuaugcagauggccuaccgguucaacggcaucggagugacccagaaugugcuguacgagaaccagaagcugaucgccaaccaguucaacagcgccaucggcaagauccaggacagccugagcagcacagcaagcgcccugggaaagcugcaggacguggucaaccagaaugcccaggcacugaacacccuggucaagcagcuguccuccaacuucggcgccaucagcucugugcugaacgauauccugagcagacuggacccuccugaggccgaggugcagaucgacagacugaucacaggcagacugcagagccuccagacauacgugacccagcagcugaucagagccgccgagauuagagccucugccaaucuggccgccaccaagaugucugagugugugcugggccagagcaagagaguggacuuuugcggcaagggcuaccaccugaugagcuucccucagucugccccucacggcgugguguuucugcacgugacauaugugcccgcucaagagaagaauuucaccaccgcuccagccaucugccacgacggcaaagcccacuuuccuagagaaggcguguucguguccaacggcacccauugguucgugacacagcggaacuucuacgagccccagaucaucaccaccgacaacaccuucgugucuggcaacugcgacgucgugaucggcauugugaacaauaccguguacgacccucugcagcccgagcuggacagcuucaaagaggaacuggacaaguacuuuaagaaccacacaagccccgacguggaccugggcgauaucagcggaaucaaugccagcgucgugaacauccagaaagagaucgaccggcugaacgagguggccaagaaucugaacgagagccugaucgaccugcaagaacuggggaaguacgagcaguacaucaaguggcccugguacaucuggcugggcuuuaucgccggacugauugccaucgugauggucacaaucaugcuguguugcaugaccagcugcuguagcugccugaagggcuguuguagcuguggcagcugcugcaaguucgacgaggacgauucugagcccgugcugaagggcgugaaacugcacuacacaugaggacuagucccuguucccagagcccacuuuuuuuucuuuuuuugaaauaaaauagccugucuuucagaucucaaaggcucuuuucagagccaccaaaaaaaaaaaaaaaaaaaaaaaaaaaaaaaaaaaaaaaaaaaaaaaaaaaaaaaaaaaaaaaaaaaaaaaaaaaaaaaaaaaaaaaaaaaaaaaaaaaaa

SEQ ID NO: 23830 - RNA, 4191 nt, Artificial Sequence
  SARS-CoV-2/Wuhan/WIV05/2019__EPI_ISL_402128 spike protein mRNA gc mod (1-1273)(K986P_V987P_N439K_D614G)
aggagagggcgcuuggcuugcaaggacccugagcugcggcauugaagcacacccaacccaacucgacugaagucagccucacugaaccggaucugagaaucuucucucucugggcuugccagggcucuccgaaccuagcuagcauccucuucaauuccaacuagaaagcuuaccauguucguguuccuggugcugcugccucugguguccagccagugugugaaccugaccaccagaacacagcugccuccagccuacaccaacagcuuuaccagaggcguguacuaccccgacaagguguucagauccagcgugcugcacucuacccaggaccuguuccugccuuucuucagcaacgugaccugguuccacgccauccacguguccggcaccaauggcaccaagagauucgacaaccccgugcugcccuucaacgacgggguguacuuugccagcaccgagaaguccaacaucaucagaggcuggaucuucggcaccacacuggacagcaagacccagagccugcugaucgugaacaacgccaccaacguggucaucaaagugugcgaguuccaguucugcaacgaccccuuccugggcgucuacuaccacaagaacaacaagagcuggauggaaagcgaguuccggguguacagcagcgccaacaacugcaccuucgaguacgugucccagccuuuccugauggaccuggaaggcaagcagggcaacuucaagaaccugcgcgaguucguguuuaagaacaucgacggcuacuucaagaucuacagcaagcacaccccuaucaaccucgugcgggaucugccucagggcuucucugcucuggaaccccugguggaucugcccaucggcaucaacaucacccgguuucagacacugcuggcccugcacagaagcuaccugacaccuggcgauagcagcagcggauggacagcuggugccgccgcuuacuaugugggcuaccugcagccuagaaccuuccugcugaaguacaacgagaacggcaccaucaccgacgccguggauugugcucuggauccucugagcgagacaaagugcacccugaaguccuucaccguggaaaagggcaucuaccagaccagcaacuuccgggugcagcccaccgaauccaucgugcgguuccccaauaucaccaaucugugccccuucggcgagguguucaaugccaccagauucgccucuguguacgccuggaaccggaagcggaucagcaauugcguggccgacuacuccgugcuguacaacuccgccagcuucagcaccuucaagugcuacggcguguccccuaccaagcugaacgaccugugcuucacaaacguguacgccgacagcuucgugauccggggagaugaagugcggcagauugccccuggacagacaggcaagaucgccgacuacaacuacaagcugcccgacgacuucaccggcugugugauugccuggaacagcaagaaccuggacuccaaagucggcggcaacuacaauuaccuguaccggcuguuccggaaguccaaucugaagcccuucgagcgggacaucuccaccgagaucuaucaggccggcagcaccccuuguaacggcguggaaggcuucaacugcuacuucccacugcaguccuacggcuuucagcccacaaauggcgugggcuaucagcccuacagagugguggugcugagcuucgaacugcugcaugccccugccacagugugcggcccuaagaaaagcaccaaucucgugaagaacaaaugcgugaacuucaacuucaacggccugaccggcaccggcgugcugacagagagcaacaagaaguuccugccauuccagcaguuuggccgggauaucgccgauaccacagacgccguuagagauccccagacacuggaaauccuggacaucaccccuugcagcuucggcggagugucugugaucaccccuggcaccaacaccagcaaucagguggcagugcuguaccagggcgugaacuguaccgaagugcccguggccauucacgccgaucagcugacaccuacauggcggguguacuccaccggcagcaauguguuucagaccagagccggcugucugaucggagccgagcacgugaacaauagcuacgagugcgacauccccaucggcgcuggaaucugcgccagcuaccagacacagacaaacagcccucggagagccagaagcguggccagccagagcaucauugccuacacaaugucucugggcgccgagaacagcguggccuacuccaacaacucuaucgcuauccccaccaacuucaccaucagcgugaccacagagauccugccuguguccaugaccaagaccagcguggacugcaccauguacaucugcggcgauuccaccgagugcuccaaccugcugcugcaguacggcagcuucugcacccagcugaauagagcccugacagggaucgccguggaacaggacaagaacacccaagagguguucgcccaagugaagcagaucuacaagaccccuccuaucaaggacuucggcggcuucaauuucagccagauucugcccgauccuagcaagcccagcaagcggagcuucaucgaggaccugcuguucaacaaagugacacuggccgacgccggcuucaucaagcaguauggcgauugucugggcgacauugccgccagggaucugauuugcgcccagaaguuuaacggacugacagugcugccuccucugcugaccgaugagaugaucgcccaguacacaucugcccugcuggccggcacaaucacaagcggcuggacauuuggagcaggcgccgcucugcagauccccuuugcuaugcagauggccuaccgguucaacggcaucggagugacccagaaugugcuguacgagaaccagaagcugaucgccaaccaguucaacagcgccaucggcaagauccaggacagccugagcagcacagcaagcgcccugggaaagcugcaggacguggucaaccagaaugcccaggcacugaacacccuggucaagcagcuguccuccaacuucggcgccaucagcucugugcugaacgauauccugagcagacuggacccuccugaggccgaggugcagaucgacagacugaucacaggcagacugcagagccuccagacauacgugacccagcagcugaucagagccgccgagauuagagccucugccaaucuggccgccaccaagaugucugagugugugcugggccagagcaagagaguggacuuuugcggcaagggcuaccaccugaugagcuucccucagucugccccucacggcgugguguuucugcacgugacauaugugcccgcucaagagaagaauuucaccaccgcuccagccaucugccacgacggcaaagcccacuuuccuagagaaggcguguucguguccaacggcacccauugguucgugacacagcggaacuucuacgagccccagaucaucaccaccgacaacaccuucgugucuggcaacugcgacgucgugaucggcauugugaacaauaccguguacgacccucugcagcccgagcuggacagcuucaaagaggaacuggacaaguacuuuaagaaccacacaagccccgacguggaccugggcgauaucagcggaaucaaugccagcgucgugaacauccagaaagagaucgaccggcugaacgagguggccaagaaucugaacgagagccugaucgaccugcaagaacuggggaaguacgagcaguacaucaaguggcccugguacaucuggcugggcuuuaucgccggacugauugccaucgugauggucacaaucaugcuguguugcaugaccagcugcuguagcugccugaagggcuguuguagcuguggcagcugcugcaaguucgacgaggacgauucugagcccgugcugaagggcgugaaacugcacuacacaugaggacuagucccuguucccagagcccacuuuuuuuucuuuuuuugaaauaaaauagccugucuuucagaucucaaaggcucuuuucagagccaccaaaaaaaaaaaaaaaaaaaaaaaaaaaaaaaaaaaaaaaaaaaaaaaaaaaaaaaaaaaaaaaaaaaaaaaaaaaaaaaaaaaaaaaaaaaaaaaaaaaaa

SEQ ID NO: 23831 - RNA, 4191 nt, Artificial Sequence
  SARS-CoV-2/Wuhan/WIV05/2019__EPI_ISL_402128 spike protein mRNA gc mod (1-1273)(K986P_V987P_S477N_D614G)
aggagagggcgcuuggcuugcaaggacccugagcugcggcauugaagcacacccaacccaacucgacugaagucagccucacugaaccggaucugagaaucuucucucucugggcuugccagggcucuccgaaccuagcuagcauccucuucaauuccaacuagaaagcuuaccauguucguguuccuggugcugcugccucugguguccagccagugugugaaccugaccaccagaacacagcugccuccagccuacaccaacagcuuuaccagaggcguguacuaccccgacaagguguucagauccagcgugcugcacucuacccaggaccuguuccugccuuucuucagcaacgugaccugguuccacgccauccacguguccggcaccaauggcaccaagagauucgacaaccccgugcugcccuucaacgacgggguguacuuugccagcaccgagaaguccaacaucaucagaggcuggaucuucggcaccacacuggacagcaagacccagagccugcugaucgugaacaacgccaccaacguggucaucaaagugugcgaguuccaguucugcaacgaccccuuccugggcgucuacuaccacaagaacaacaagagcuggauggaaagcgaguuccggguguacagcagcgccaacaacugcaccuucgaguacgugucccagccuuuccugauggaccuggaaggcaagcagggcaacuucaagaaccugcgcgaguucguguuuaagaacaucgacggcuacuucaagaucuacagcaagcacaccccuaucaaccucgugcgggaucugccucagggcuucucugcucuggaaccccugguggaucugcccaucggcaucaacaucacccgguuucagacacugcuggcccugcacagaagcuaccugacaccuggcgauagcagcagcggauggacagcuggugccgccgcuuacuaugugggcuaccugcagccuagaaccuuccugcugaaguacaacgagaacggcaccaucaccgacgccguggauugugcucuggauccucugagcgagacaaagugcacccugaaguccuucaccguggaaaagggcaucuaccagaccagcaacuuccgggugcagcccaccgaauccaucgugcgguuccccaauaucaccaaucugugccccuucggcgagguguucaaugccaccagauucgccucuguguacgccuggaaccggaagcggaucagcaauugcguggccgacuacuccgugcuguacaacuccgccagcuucagcaccuucaagugcuacggcguguccccuaccaagcugaacgaccugugcuucacaaacguguacgccgacagcuucgugauccggggagaugaagugcggcagauugccccuggacagacaggcaagaucgccgacuacaacuacaagcugcccgacgacuucaccggcugugugauugccuggaacagcaacaaccuggacuccaaagucggcggcaacuacaauuaccuguaccggcuguuccggaaguccaaucugaagcccuucgagcgggacaucuccaccgagaucuaucaggccggcaacaccccuuguaacggcguggaaggcuucaacugcuacuucccacugcaguccuacggcuuucagcccacaaauggcgugggcuaucagcccuacagagugguggugcugagcuucgaacugcugcaugccccugccacagugugcggcccuaagaaaagcaccaaucucgugaagaacaaaugcgugaacuucaacuucaacggccugaccggcaccggcgugcugacagagagcaacaagaaguuccugccauuccagcaguuuggccgggauaucgccgauaccacagacgccguuagagauccccagacacuggaaauccuggacaucaccccuugcagcuucggcggagugucugugaucaccccuggcaccaacaccagcaaucagguggcagugcuguaccagggcgugaacuguaccgaagugcccguggccauucacgccgaucagcugacaccuacauggcggguguacuccaccggcagcaauguguuucagaccagagccggcugucugaucggagccgagcacgugaacaauagcuacgagugcgacauccccaucggcgcuggaaucugcgccagcuaccagacacagacaaacagcccucggagagccagaagcguggccagccagagcaucauugccuacacaaugucucugggcgccgagaacagcguggccuacuccaacaacucuaucgcuauccccaccaacuucaccaucagcgugaccacagagauccugccuguguccaugaccaagaccagcguggacugcaccauguacaucugcggcgauuccaccgagugcuccaaccugcugcugcaguacggcagcuucugcacccagcugaauagagcccugacagggaucgccguggaacaggacaagaacacccaagagguguucgcccaagugaagcagaucuacaagaccccuccuaucaaggacuucggcggcuucaauuucagccagauucugcccgauccuagcaagcccagcaagcggagcuucaucgaggaccugcuguucaacaaagugacacuggccgacgccggcuucaucaagcaguauggcgauugucugggcgacauugccgccagggaucugauuugcgcccagaaguuuaacggacugacagugcugccuccucugcugaccgaugagaugaucgcccaguacacaucugcccugcuggccggcacaaucacaagcggcuggacauuuggagcaggcgccgcucugcagauccccuuugcuaugcagauggccuaccgguucaacggcaucggagugacccagaaugugcuguacgagaaccagaagcugaucgccaaccaguucaacagcgccaucggcaagauccaggacagccugagcagcacagcaagcgcccugggaaagcugcaggacguggucaaccagaaugcccaggcacugaacacccuggucaagcagcuguccuccaacuucggcgccaucagcucugugcugaacgauauccugagcagacuggacccuccugaggccgaggugcagaucgacagacugaucacaggcagacugcagagccuccagacauacgugacccagcagcugaucagagccgccgagauuagagccucugccaaucuggccgccaccaagaugucugagugugugcugggccagagcaagagaguggacuuuugcggcaagggcuaccaccugaugagcuucccucagucugccccucacggcgugguguuucugcacgugacauaugugcccgcucaagagaagaauuucaccaccgcuccagccaucugccacgacggcaaagcccacuuuccuagagaaggcguguucguguccaacggcacccauugguucgugacacagcggaacuucuacgagccccagaucaucaccaccgacaacaccuucgugucuggcaacugcgacgucgugaucggcauugugaacaauaccguguacgacccucugcagcccgagcuggacagcuucaaagaggaacuggacaaguacuuuaagaaccacacaagccccgacguggaccugggcgauaucagcggaaucaaugccagcgucgugaacauccagaaagagaucgaccggcugaacgagguggccaagaaucugaacgagagccugaucgaccugcaagaacuggggaaguacgagcaguacaucaaguggcccugguacaucuggcugggcuuuaucgccggacugauugccaucgugauggucacaaucaugcuguguugcaugaccagcugcuguagcugccugaagggcuguuguagcuguggcagcugcugcaaguucgacgaggacgauucugagcccgugcugaagggcgugaaacugcacuacacaugaggacuagucccuguucccagagcccacuuuuuuuucuuuuuuugaaauaaaauagccugucuuucagaucucaaaggcucuuuucagagccaccaaaaaaaaaaaaaaaaaaaaaaaaaaaaaaaaaaaaaaaaaaaaaaaaaaaaaaaaaaaaaaaaaaaaaaaaaaaaaaaaaaaaaaaaaaaaaaaaaaaaa

SEQ ID NO: 23832 - RNA, 4191 nt, Artificial Sequence
  SARS-CoV-2/Wuhan/WIV05/2019__EPI_ISL_402128 spike protein mRNA gc mod (1-1273)(K986P_V987P_N501Y_D614G)
aggagagggcgcuuggcuugcaaggacccugagcugcggcauugaagcacacccaacccaacucgacugaagucagccucacugaaccggaucugagaaucuucucucucugggcuugccagggcucuccgaaccuagcuagcauccucuucaauuccaacuagaaagcuuaccauguucguguuccuggugcugcugccucugguguccagccagugugugaaccugaccaccagaacacagcugccuccagccuacaccaacagcuuuaccagaggcguguacuaccccgacaagguguucagauccagcgugcugcacucuacccaggaccuguuccugccuuucuucagcaacgugaccugguuccacgccauccacguguccggcaccaauggcaccaagagauucgacaaccccgugcugcccuucaacgacgggguguacuuugccagcaccgagaaguccaacaucaucagaggcuggaucuucggcaccacacuggacagcaagacccagagccugcugaucgugaacaacgccaccaacguggucaucaaagugugcgaguuccaguucugcaacgaccccuuccugggcgucuacuaccacaagaacaacaagagcuggauggaaagcgaguuccggguguacagcagcgccaacaacugcaccuucgaguacgugucccagccuuuccugauggaccuggaaggcaagcagggcaacuucaagaaccugcgcgaguucguguuuaagaacaucgacggcuacuucaagaucuacagcaagcacaccccuaucaaccucgugcgggaucugccucagggcuucucugcucuggaaccccugguggaucugcccaucggcaucaacaucacccgguuucagacacugcuggcccugcacagaagcuaccugacaccuggcgauagcagcagcggauggacagcuggugccgccgcuuacuaugugggcuaccugcagccuagaaccuuccugcugaaguacaacgagaacggcaccaucaccgacgccguggauugugcucuggauccucugagcgagacaaagugcacccugaaguccuucaccguggaaaagggcaucuaccagaccagcaacuuccgggugcagcccaccgaauccaucgugcgguuccccaauaucaccaaucugugccccuucggcgagguguucaaugccaccagauucgccucuguguacgccuggaaccggaagcggaucagcaauugcguggccgacuacuccgugcuguacaacuccgccagcuucagcaccuucaagugcuacggcguguccccuaccaagcugaacgaccugugcuucacaaacguguacgccgacagcuucgugauccggggagaugaagugcggcagauugccccuggacagacaggcaagaucgccgacuacaacuacaagcugcccgacgacuucaccggcugugugauugccuggaacagcaacaaccuggacuccaaagucggcggcaacuacaauuaccuguaccggcuguuccggaaguccaaucugaagcccuucgagcgggacaucuccaccgagaucuaucaggccggcagcaccccuuguaacggcguggaaggcuucaacugcuacuucccacugcaguccuacggcuuucagcccacauacggcgugggcuaucagcccuacagagugguggugcugagcuucgaacugcugcaugccccugccacagugugcggcccuaagaaaagcaccaaucucgugaagaacaaaugcgugaacuucaacuucaacggccugaccggcaccggcgugcugacagagagcaacaagaaguuccugccauuccagcaguuuggccgggauaucgccgauaccacagacgccguuagagauccccagacacuggaaauccuggacaucaccccuugcagcuucggcggagugucugugaucaccccuggcaccaacaccagcaaucagguggcagugcuguaccagggcgugaacuguaccgaagugcccguggccauucacgccgaucagcugacaccuacauggcggguguacuccaccggcagcaauguguuucagaccagagccggcugucugaucggagccgagcacgugaacaauagcuacgagugcgacauccccaucggcgcuggaaucugcgccagcuaccagacacagacaaacagcccucggagagccagaagcguggccagccagagcaucauugccuacacaaugucucugggcgccgagaacagcguggccuacuccaacaacucuaucgcuauccccaccaacuucaccaucagcgugaccacagagauccugccuguguccaugaccaagaccagcguggacugcaccauguacaucugcggcgauuccaccgagugcuccaaccugcugcugcaguacggcagcuucugcacccagcugaauagagcccugacagggaucgccguggaacaggacaagaacacccaagagguguucgcccaagugaagcagaucuacaagaccccuccuaucaaggacuucggcggcuucaauuucagccagauucugcccgauccuagcaagcccagcaagcggagcuucaucgaggaccugcuguucaacaaagugacacuggccgacgccggcuucaucaagcaguauggcgauugucugggcgacauugccgccagggaucugauuugcgcccagaaguuuaacggacugacagugcugccuccucugcugaccgaugagaugaucgcccaguacacaucugcccugcuggccggcacaaucacaagcggcuggacauuuggagcaggcgccgcucugcagauccccuuugcuaugcagauggccuaccgguucaacggcaucggagugacccagaaugugcuguacgagaaccagaagcugaucgccaaccaguucaacagcgccaucggcaagauccaggacagccugagcagcacagcaagcgcccugggaaagcugcaggacguggucaaccagaaugcccaggcacugaacacccuggucaagcagcuguccuccaacuucggcgccaucagcucugugcugaacgauauccugagcagacuggacccuccugaggccgaggugcagaucgacagacugaucacaggcagacugcagagccuccagacauacgugacccagcagcugaucagagccgccgagauuagagccucugccaaucuggccgccaccaagaugucugagugugugcugggccagagcaagagaguggacuuuugcggcaagggcuaccaccugaugagcuucccucagucugccccucacggcgugguguuucugcacgugacauaugugcccgcucaagagaagaauuucaccaccgcuccagccaucugccacgacggcaaagcccacuuuccuagagaaggcguguucguguccaacggcacccauugguucgugacacagcggaacuucuacgagccccagaucaucaccaccgacaacaccuucgugucuggcaacugcgacgucgugaucggcauugugaacaauaccguguacgacccucugcagcccgagcuggacagcuucaaagaggaacuggacaaguacuuuaagaaccacacaagccccgacguggaccugggcgauaucagcggaaucaaugccagcgucgugaacauccagaaagagaucgaccggcugaacgagguggccaagaaucugaacgagagccugaucgaccugcaagaacuggggaaguacgagcaguacaucaaguggcccugguacaucuggcugggcuuuaucgccggacugauugccaucgugauggucacaaucaugcuguguugcaugaccagcugcuguagcugccugaagggcuguuguagcuguggcagcugcugcaaguucgacgaggacgauucugagcccgugcugaagggcgugaaacugcacuacacaugaggacuagucccuguucccagagcccacuuuuuuuucuuuuuuugaaauaaaauagccugucuuucagaucucaaaggcucuuuucagagccaccaaaaaaaaaaaaaaaaaaaaaaaaaaaaaaaaaaaaaaaaaaaaaaaaaaaaaaaaaaaaaaaaaaaaaaaaaaaaaaaaaaaaaaaaaaaaaaaaaaaaa

SEQ ID NO: 23833 - RNA, 4185 nt, Artificial Sequence
  SARS-CoV-2/Wuhan/WIV05/2019__EPI_ISL_402128 spike protein mRNA gc mod (1-1273)(K986P_V987P_H69del_V70del_D614G)
aggagagggcgcuuggcuugcaaggacccugagcugcggcauugaagcacacccaacccaacucgacugaagucagccucacugaaccggaucugagaaucuucucucucugggcuugccagggcucuccgaaccuagcuagcauccucuucaauuccaacuagaaagcuuaccauguucguguuccuggugcugcugccucugguguccagccagugugugaaccugaccaccagaacacagcugccuccagccuacaccaacagcuuuaccagaggcguguacuaccccgacaagguguucagauccagcgugcugcacucuacccaggaccuguuccugccuuucuucagcaacgugaccugguuccacgccaucuccggcaccaauggcaccaagagauucgacaaccccgugcugcccuucaacgacgggguguacuuugccagcaccgagaaguccaacaucaucagaggcuggaucuucggcaccacacuggacagcaagacccagagccugcugaucgugaacaacgccaccaacguggucaucaaagugugcgaguuccaguucugcaacgaccccuuccugggcgucuacuaccacaagaacaacaagagcuggauggaaagcgaguuccggguguacagcagcgccaacaacugcaccuucgaguacgugucccagccuuuccugauggaccuggaaggcaagcagggcaacuucaagaaccugcgcgaguucguguuuaagaacaucgacggcuacuucaagaucuacagcaagcacaccccuaucaaccucgugcgggaucugccucagggcuucucugcucuggaaccccugguggaucugcccaucggcaucaacaucacccgguuucagacacugcuggcccugcacagaagcuaccugacaccuggcgauagcagcagcggauggacagcuggugccgccgcuuacuaugugggcuaccugcagccuagaaccuuccugcugaaguacaacgagaacggcaccaucaccgacgccguggauugugcucuggauccucugagcgagacaaagugcacccugaaguccuucaccguggaaaagggcaucuaccagaccagcaacuuccgggugcagcccaccgaauccaucgugcgguuccccaauaucaccaaucugugccccuucggcgagguguucaaugccaccagauucgccucuguguacgccuggaaccggaagcggaucagcaauugcguggccgacuacuccgugcuguacaacuccgccagcuucagcaccuucaagugcuacggcguguccccuaccaagcugaacgaccugugcuucacaaacguguacgccgacagcuucgugauccggggagaugaagugcggcagauugccccuggacagacaggcaagaucgccgacuacaacuacaagcugcccgacgacuucaccggcugugugauugccuggaacagcaacaaccuggacuccaaagucggcggcaacuacaauuaccuguaccggcuguuccggaaguccaaucugaagcccuucgagcgggacaucuccaccgagaucuaucaggccggcagcaccccuuguaacggcguggaaggcuucaacugcuacuucccacugcaguccuacggcuuucagcccacaaauggcgugggcuaucagcccuacagagugguggugcugagcuucgaacugcugcaugccccugccacagugugcggcccuaagaaaagcaccaaucucgugaagaacaaaugcgugaacuucaacuucaacggccugaccggcaccggcgugcugacagagagcaacaagaaguuccugccauuccagcaguuuggccgggauaucgccgauaccacagacgccguuagagauccccagacacuggaaauccuggacaucaccccuugcagcuucggcggagugucugugaucaccccuggcaccaacaccagcaaucagguggcagugcuguaccagggcgugaacuguaccgaagugcccguggccauucacgccgaucagcugacaccuacauggcggguguacuccaccggcagcaauguguuucagaccagagccggcugucugaucggagccgagcacgugaacaauagcuacgagugcgacauccccaucggcgcuggaaucugcgccagcuaccagacacagacaaacagcccucggagagccagaagcguggccagccagagcaucauugccuacacaaugucucugggcgccgagaacagcguggccuacuccaacaacucuaucgcuauccccaccaacuucaccaucagcgugaccacagagauccugccuguguccaugaccaagaccagcguggacugcaccauguacaucugcggcgauuccaccgagugcuccaaccugcugcugcaguacggcagcuucugcacccagcugaauagagcccugacagggaucgccguggaacaggacaagaacacccaagagguguucgcccaagugaagcagaucuacaagaccccuccuaucaaggacuucggcggcuucaauuucagccagauucugcccgauccuagcaagcccagcaagcggagcuucaucgaggaccugcuguucaacaaagugacacuggccgacgccggcuucaucaagcaguauggcgauugucugggcgacauugccgccagggaucugauuugcgcccagaaguuuaacggacugacagugcugccuccucugcugaccgaugagaugaucgcccaguacacaucugcccugcuggccggcacaaucacaagcggcuggacauuuggagcaggcgccgcucugcagauccccuuugcuaugcagauggccuaccgguucaacggcaucggagugacccagaaugugcuguacgagaaccagaagcugaucgccaaccaguucaacagcgccaucggcaagauccaggacagccugagcagcacagcaagcgcccugggaaagcugcaggacguggucaaccagaaugcccaggcacugaacacccuggucaagcagcuguccuccaacuucggcgccaucagcucugugcugaacgauauccugagcagacuggacccuccugaggccgaggugcagaucgacagacugaucacaggcagacugcagagccuccagacauacgugacccagcagcugaucagagccgccgagauuagagccucugccaaucuggccgccaccaagaugucugagugugugcugggccagagcaagagaguggacuuuugcggcaagggcuaccaccugaugagcuucccucagucugccccucacggcgugguguuucugcacgugacauaugugcccgcucaagagaagaauuucaccaccgcuccagccaucugccacgacggcaaagcccacuuuccuagagaaggcguguucguguccaacggcacccauugguucgugacacagcggaacuucuacgagccccagaucaucaccaccgacaacaccuucgugucuggcaacugcgacgucgugaucggcauugugaacaauaccguguacgacccucugcagcccgagcuggacagcuucaaagaggaacuggacaaguacuuuaagaaccacacaagccccgacguggaccugggcgauaucagcggaaucaaugccagcgucgugaacauccagaaagagaucgaccggcugaacgagguggccaagaaucugaacgagagccugaucgaccugcaagaacuggggaaguacgagcaguacaucaaguggcccugguacaucuggcugggcuuuaucgccggacugauugccaucgugauggucacaaucaugcuguguugcaugaccagcugcuguagcugccugaagggcuguuguagcuguggcagcugcugcaaguucgacgaggacgauucugagcccgugcugaagggcgugaaacugcacuacacaugaggacuagucccuguucccagagcccacuuuuuuuucuuuuuuugaaauaaaauagccugucuuucagaucucaaaggcucuuuucagagccaccaaaaaaaaaaaaaaaaaaaaaaaaaaaaaaaaaaaaaaaaaaaaaaaaaaaaaaaaaaaaaaaaaaaaaaaaaaaaaaaaaaaaaaaaaaaaaaaaaaaaa

SEQ ID NO: 23834 - RNA, 4191 nt, Artificial Sequence
  SARS-CoV-2/Wuhan/WIV05/2019__EPI_ISL_402128 spike protein mRNA gc mod (1-1273)(K986P_V987P_Y453F_D614G)
aggagagggcgcuuggcuugcaaggacccugagcugcggcauugaagcacacccaacccaacucgacugaagucagccucacugaaccggaucugagaaucuucucucucugggcuugccagggcucuccgaaccuagcuagcauccucuucaauuccaacuagaaagcuuaccauguucguguuccuggugcugcugccucugguguccagccagugugugaaccugaccaccagaacacagcugccuccagccuacaccaacagcuuuaccagaggcguguacuaccccgacaagguguucagauccagcgugcugcacucuacccaggaccuguuccugccuuucuucagcaacgugaccugguuccacgccauccacguguccggcaccaauggcaccaagagauucgacaaccccgugcugcccuucaacgacgggguguacuuugccagcaccgagaaguccaacaucaucagaggcuggaucuucggcaccacacuggacagcaagacccagagccugcugaucgugaacaacgccaccaacguggucaucaaagugugcgaguuccaguucugcaacgaccccuuccugggcgucuacuaccacaagaacaacaagagcuggauggaaagcgaguuccggguguacagcagcgccaacaacugcaccuucgaguacgugucccagccuuuccugauggaccuggaaggcaagcagggcaacuucaagaaccugcgcgaguucguguuuaagaacaucgacggcuacuucaagaucuacagcaagcacaccccuaucaaccucgugcgggaucugccucagggcuucucugcucuggaaccccugguggaucugcccaucggcaucaacaucacccgguuucagacacugcuggcccugcacagaagcuaccugacaccuggcgauagcagcagcggauggacagcuggugccgccgcuuacuaugugggcuaccugcagccuagaaccuuccugcugaaguacaacgagaacggcaccaucaccgacgccguggauugugcucuggauccucugagcgagacaaagugcacccugaaguccuucaccguggaaaagggcaucuaccagaccagcaacuuccgggugcagcccaccgaauccaucgugcgguuccccaauaucaccaaucugugccccuucggcgagguguucaaugccaccagauucgccucuguguacgccuggaaccggaagcggaucagcaauugcguggccgacuacuccgugcuguacaacuccgccagcuucagcaccuucaagugcuacggcguguccccuaccaagcugaacgaccugugcuucacaaacguguacgccgacagcuucgugauccggggagaugaagugcggcagauugccccuggacagacaggcaagaucgccgacuacaacuacaagcugcccgacgacuucaccggcugugugauugccuggaacagcaacaaccuggacuccaaagucggcggcaacuacaauuaccuguuccggcuguuccggaaguccaaucugaagcccuucgagcgggacaucuccaccgagaucuaucaggccggcagcaccccuuguaacggcguggaaggcuucaacugcuacuucccacugcaguccuacggcuuucagcccacaaauggcgugggcuaucagcccuacagagugguggugcugagcuucgaacugcugcaugccccugccacagugugcggcccuaagaaaagcaccaaucucgugaagaacaaaugcgugaacuucaacuucaacggccugaccggcaccggcgugcugacagagagcaacaagaaguuccugccauuccagcaguuuggccgggauaucgccgauaccacagacgccguuagagauccccagacacuggaaauccuggacaucaccccuugcagcuucggcggagugucugugaucaccccuggcaccaacaccagcaaucagguggcagugcuguaccagggcgugaacuguaccgaagugcccguggccauucacgccgaucagcugacaccuacauggcggguguacuccaccggcagcaauguguuucagaccagagccggcugucugaucggagccgagcacgugaacaauagcuacgagugcgacauccccaucggcgcuggaaucugcgccagcuaccagacacagacaaacagcccucggagagccagaagcguggccagccagagcaucauugccuacacaaugucucugggcgccgagaacagcguggccuacuccaacaacucuaucgcuauccccaccaacuucaccaucagcgugaccacagagauccugccuguguccaugaccaagaccagcguggacugcaccauguacaucugcggcgauuccaccgagugcuccaaccugcugcugcaguacggcagcuucugcacccagcugaauagagcccugacagggaucgccguggaacaggacaagaacacccaagagguguucgcccaagugaagcagaucuacaagaccccuccuaucaaggacuucggcggcuucaauuucagccagauucugcccgauccuagcaagcccagcaagcggagcuucaucgaggaccugcuguucaacaaagugacacuggccgacgccggcuucaucaagcaguauggcgauugucugggcgacauugccgccagggaucugauuugcgcccagaaguuuaacggacugacagugcugccuccucugcugaccgaugagaugaucgcccaguacacaucugcccugcuggccggcacaaucacaagcggcuggacauuuggagcaggcgccgcucugcagauccccuuugcuaugcagauggccuaccgguucaacggcaucggagugacccagaaugugcuguacgagaaccagaagcugaucgccaaccaguucaacagcgccaucggcaagauccaggacagccugagcagcacagcaagcgcccugggaaagcugcaggacguggucaaccagaaugcccaggcacugaacacccuggucaagcagcuguccuccaacuucggcgccaucagcucugugcugaacgauauccugagcagacuggacccuccugaggccgaggugcagaucgacagacugaucacaggcagacugcagagccuccagacauacgugacccagcagcugaucagagccgccgagauuagagccucugccaaucuggccgccaccaagaugucugagugugugcugggccagagcaagagaguggacuuuugcggcaagggcuaccaccugaugagcuucccucagucugccccucacggcgugguguuucugcacgugacauaugugcccgcucaagagaagaauuucaccaccgcuccagccaucugccacgacggcaaagcccacuuuccuagagaaggcguguucguguccaacggcacccauugguucgugacacagcggaacuucuacgagccccagaucaucaccaccgacaacaccuucgugucuggcaacugcgacgucgugaucggcauugugaacaauaccguguacgacccucugcagcccgagcuggacagcuucaaagaggaacuggacaaguacuuuaagaaccacacaagccccgacguggaccugggcgauaucagcggaaucaaugccagcgucgugaacauccagaaagagaucgaccggcugaacgagguggccaagaaucugaacgagagccugaucgaccugcaagaacuggggaaguacgagcaguacaucaaguggcccugguacaucuggcugggcuuuaucgccggacugauugccaucgugauggucacaaucaugcuguguugcaugaccagcugcuguagcugccugaagggcuguuguagcuguggcagcugcugcaaguucgacgaggacgauucugagcccgugcugaagggcgugaaacugcacuacacaugaggacuagucccuguucccagagcccacuuuuuuuucuuuuuuugaaauaaaauagccugucuuucagaucucaaaggcucuuuucagagccaccaaaaaaaaaaaaaaaaaaaaaaaaaaaaaaaaaaaaaaaaaaaaaaaaaaaaaaaaaaaaaaaaaaaaaaaaaaaaaaaaaaaaaaaaaaaaaaaaaaaaa

SEQ ID NO: 23835 - RNA, 4191 nt, Artificial Sequence
  SARS-CoV-2/Wuhan/WIV05/2019__EPI_ISL_402128 spike protein mRNA gc mod (1-1273)(K986P_V987P_D614G_I692V)
aggagagggcgcuuggcuugcaaggacccugagcugcggcauugaagcacacccaacccaacucgacugaagucagccucacugaaccggaucugagaaucuucucucucugggcuugccagggcucuccgaaccuagcuagcauccucuucaauuccaacuagaaagcuuaccauguucguguuccuggugcugcugccucugguguccagccagugugugaaccugaccaccagaacacagcugccuccagccuacaccaacagcuuuaccagaggcguguacuaccccgacaagguguucagauccagcgugcugcacucuacccaggaccuguuccugccuuucuucagcaacgugaccugguuccacgccauccacguguccggcaccaauggcaccaagagauucgacaaccccgugcugcccuucaacgacgggguguacuuugccagcaccgagaaguccaacaucaucagaggcuggaucuucggcaccacacuggacagcaagacccagagccugcugaucgugaacaacgccaccaacguggucaucaaagugugcgaguuccaguucugcaacgaccccuuccugggcgucuacuaccacaagaacaacaagagcuggauggaaagcgaguuccggguguacagcagcgccaacaacugcaccuucgaguacgugucccagccuuuccugauggaccuggaaggcaagcagggcaacuucaagaaccugcgcgaguucguguuuaagaacaucgacggcuacuucaagaucuacagcaagcacaccccuaucaaccucgugcgggaucugccucagggcuucucugcucuggaaccccugguggaucugcccaucggcaucaacaucacccgguuucagacacugcuggcccugcacagaagcuaccugacaccuggcgauagcagcagcggauggacagcuggugccgccgcuuacuaugugggcuaccugcagccuagaaccuuccugcugaaguacaacgagaacggcaccaucaccgacgccguggauugugcucuggauccucugagcgagacaaagugcacccugaaguccuucaccguggaaaagggcaucuaccagaccagcaacuuccgggugcagcccaccgaauccaucgugcgguuccccaauaucaccaaucugugccccuucggcgagguguucaaugccaccagauucgccucuguguacgccuggaaccggaagcggaucagcaauugcguggccgacuacuccgugcuguacaacuccgccagcuucagcaccuucaagugcuacggcguguccccuaccaagcugaacgaccugugcuucacaaacguguacgccgacagcuucgugauccggggagaugaagugcggcagauugccccuggacagacaggcaagaucgccgacuacaacuacaagcugcccgacgacuucaccggcugugugauugccuggaacagcaacaaccuggacuccaaagucggcggcaacuacaauuaccuguaccggcuguuccggaaguccaaucugaagcccuucgagcgggacaucuccaccgagaucuaucaggccggcagcaccccuuguaacggcguggaaggcuucaacugcuacuucccacugcaguccuacggcuuucagcccacaaauggcgugggcuaucagcccuacagagugguggugcugagcuucgaacugcugcaugccccugccacagugugcggcccuaagaaaagcaccaaucucgugaagaacaaaugcgugaacuucaacuucaacggccugaccggcaccggcgugcugacagagagcaacaagaaguuccugccauuccagcaguuuggccgggauaucgccgauaccacagacgccguuagagauccccagacacuggaaauccuggacaucaccccuugcagcuucggcggagugucugugaucaccccuggcaccaacaccagcaaucagguggcagugcuguaccagggcgugaacuguaccgaagugcccguggccauucacgccgaucagcugacaccuacauggcggguguacuccaccggcagcaauguguuucagaccagagccggcugucugaucggagccgagcacgugaacaauagcuacgagugcgacauccccaucggcgcuggaaucugcgccagcuaccagacacagacaaacagcccucggagagccagaagcguggccagccagagcgugauugccuacacaaugucucugggcgccgagaacagcguggccuacuccaacaacucuaucgcuauccccaccaacuucaccaucagcgugaccacagagauccugccuguguccaugaccaagaccagcguggacugcaccauguacaucugcggcgauuccaccgagugcuccaaccugcugcugcaguacggcagcuucugcacccagcugaauagagcccugacagggaucgccguggaacaggacaagaacacccaagagguguucgcccaagugaagcagaucuacaagaccccuccuaucaaggacuucggcggcuucaauuucagccagauucugcccgauccuagcaagcccagcaagcggagcuucaucgaggaccugcuguucaacaaagugacacuggccgacgccggcuucaucaagcaguauggcgauugucugggcgacauugccgccagggaucugauuugcgcccagaaguuuaacggacugacagugcugccuccucugcugaccgaugagaugaucgcccaguacacaucugcccugcuggccggcacaaucacaagcggcuggacauuuggagcaggcgccgcucugcagauccccuuugcuaugcagauggccuaccgguucaacggcaucggagugacccagaaugugcuguacgagaaccagaagcugaucgccaaccaguucaacagcgccaucggcaagauccaggacagccugagcagcacagcaagcgcccugggaaagcugcaggacguggucaaccagaaugcccaggcacugaacacccuggucaagcagcuguccuccaacuucggcgccaucagcucugugcugaacgauauccugagcagacuggacccuccugaggccgaggugcagaucgacagacugaucacaggcagacugcagagccuccagacauacgugacccagcagcugaucagagccgccgagauuagagccucugccaaucuggccgccaccaagaugucugagugugugcugggccagagcaagagaguggacuuuugcggcaagggcuaccaccugaugagcuucccucagucugccccucacggcgugguguuucugcacgugacauaugugcccgcucaagagaagaauuucaccaccgcuccagccaucugccacgacggcaaagcccacuuuccuagagaaggcguguucguguccaacggcacccauugguucgugacacagcggaacuucuacgagccccagaucaucaccaccgacaacaccuucgugucuggcaacugcgacgucgugaucggcauugugaacaauaccguguacgacccucugcagcccgagcuggacagcuucaaagaggaacuggacaaguacuuuaagaaccacacaagccccgacguggaccugggcgauaucagcggaaucaaugccagcgucgugaacauccagaaagagaucgaccggcugaacgagguggccaagaaucugaacgagagccugaucgaccugcaagaacuggggaaguacgagcaguacaucaaguggcccugguacaucuggcugggcuuuaucgccggacugauugccaucgugauggucacaaucaugcuguguugcaugaccagcugcuguagcugccugaagggcuguuguagcuguggcagcugcugcaaguucgacgaggacgauucugagcccgugcugaagggcgugaaacugcacuacacaugaggacuagucccuguucccagagcccacuuuuuuuucuuuuuuugaaauaaaauagccugucuuucagaucucaaaggcucuuuucagagccaccaaaaaaaaaaaaaaaaaaaaaaaaaaaaaaaaaaaaaaaaaaaaaaaaaaaaaaaaaaaaaaaaaaaaaaaaaaaaaaaaaaaaaaaaaaaaaaaaaaaaa

SEQ ID NO: 23836 - RNA, 4191 nt, Artificial Sequence
  SARS-CoV-2/Wuhan/WIV05/2019__EPI_ISL_402128 spike protein mRNA gc mod (1-1273)(K986P_V987P_D614G_M1229I)
aggagagggcgcuuggcuugcaaggacccugagcugcggcauugaagcacacccaacccaacucgacugaagucagccucacugaaccggaucugagaaucuucucucucugggcuugccagggcucuccgaaccuagcuagcauccucuucaauuccaacuagaaagcuuaccauguucguguuccuggugcugcugccucugguguccagccagugugugaaccugaccaccagaacacagcugccuccagccuacaccaacagcuuuaccagaggcguguacuaccccgacaagguguucagauccagcgugcugcacucuacccaggaccuguuccugccuuucuucagcaacgugaccugguuccacgccauccacguguccggcaccaauggcaccaagagauucgacaaccccgugcugcccuucaacgacgggguguacuuugccagcaccgagaaguccaacaucaucagaggcuggaucuucggcaccacacuggacagcaagacccagagccugcugaucgugaacaacgccaccaacguggucaucaaagugugcgaguuccaguucugcaacgaccccuuccugggcgucuacuaccacaagaacaacaagagcuggauggaaagcgaguuccggguguacagcagcgccaacaacugcaccuucgaguacgugucccagccuuuccugauggaccuggaaggcaagcagggcaacuucaagaaccugcgcgaguucguguuuaagaacaucgacggcuacuucaagaucuacagcaagcacaccccuaucaaccucgugcgggaucugccucagggcuucucugcucuggaaccccugguggaucugcccaucggcaucaacaucacccgguuucagacacugcuggcccugcacagaagcuaccugacaccuggcgauagcagcagcggauggacagcuggugccgccgcuuacuaugugggcuaccugcagccuagaaccuuccugcugaaguacaacgagaacggcaccaucaccgacgccguggauugugcucuggauccucugagcgagacaaagugcacccugaaguccuucaccguggaaaagggcaucuaccagaccagcaacuuccgggugcagcccaccgaauccaucgugcgguuccccaauaucaccaaucugugccccuucggcgagguguucaaugccaccagauucgccucuguguacgccuggaaccggaagcggaucagcaauugcguggccgacuacuccgugcuguacaacuccgccagcuucagcaccuucaagugcuacggcguguccccuaccaagcugaacgaccugugcuucacaaacguguacgccgacagcuucgugauccggggagaugaagugcggcagauugccccuggacagacaggcaagaucgccgacuacaacuacaagcugcccgacgacuucaccggcugugugauugccuggaacagcaacaaccuggacuccaaagucggcggcaacuacaauuaccuguaccggcuguuccggaaguccaaucugaagcccuucgagcgggacaucuccaccgagaucuaucaggccggcagcaccccuuguaacggcguggaaggcuucaacugcuacuucccacugcaguccuacggcuuucagcccacaaauggcgugggcuaucagcccuacagagugguggugcugagcuucgaacugcugcaugccccugccacagugugcggcccuaagaaaagcaccaaucucgugaagaacaaaugcgugaacuucaacuucaacggccugaccggcaccggcgugcugacagagagcaacaagaaguuccugccauuccagcaguuuggccgggauaucgccgauaccacagacgccguuagagauccccagacacuggaaauccuggacaucaccccuugcagcuucggcggagugucugugaucaccccuggcaccaacaccagcaaucagguggcagugcuguaccagggcgugaacuguaccgaagugcccguggccauucacgccgaucagcugacaccuacauggcggguguacuccaccggcagcaauguguuucagaccagagccggcugucugaucggagccgagcacgugaacaauagcuacgagugcgacauccccaucggcgcuggaaucugcgccagcuaccagacacagacaaacagcccucggagagccagaagcguggccagccagagcaucauugccuacacaaugucucugggcgccgagaacagcguggccuacuccaacaacucuaucgcuauccccaccaacuucaccaucagcgugaccacagagauccugccuguguccaugaccaagaccagcguggacugcaccauguacaucugcggcgauuccaccgagugcuccaaccugcugcugcaguacggcagcuucugcacccagcugaauagagcccugacagggaucgccguggaacaggacaagaacacccaagagguguucgcccaagugaagcagaucuacaagaccccuccuaucaaggacuucggcggcuucaauuucagccagauucugcccgauccuagcaagcccagcaagcggagcuucaucgaggaccugcuguucaacaaagugacacuggccgacgccggcuucaucaagcaguauggcgauugucugggcgacauugccgccagggaucugauuugcgcccagaaguuuaacggacugacagugcugccuccucugcugaccgaugagaugaucgcccaguacacaucugcccugcuggccggcacaaucacaagcggcuggacauuuggagcaggcgccgcucugcagauccccuuugcuaugcagauggccuaccgguucaacggcaucggagugacccagaaugugcuguacgagaaccagaagcugaucgccaaccaguucaacagcgccaucggcaagauccaggacagccugagcagcacagcaagcgcccugggaaagcugcaggacguggucaaccagaaugcccaggcacugaacacccuggucaagcagcuguccuccaacuucggcgccaucagcucugugcugaacgauauccugagcagacuggacccuccugaggccgaggugcagaucgacagacugaucacaggcagacugcagagccuccagacauacgugacccagcagcugaucagagccgccgagauuagagccucugccaaucuggccgccaccaagaugucugagugugugcugggccagagcaagagaguggacuuuugcggcaagggcuaccaccugaugagcuucccucagucugccccucacggcgugguguuucugcacgugacauaugugcccgcucaagagaagaauuucaccaccgcuccagccaucugccacgacggcaaagcccacuuuccuagagaaggcguguucguguccaacggcacccauugguucgugacacagcggaacuucuacgagccccagaucaucaccaccgacaacaccuucgugucuggcaacugcgacgucgugaucggcauugugaacaauaccguguacgacccucugcagcccgagcuggacagcuucaaagaggaacuggacaaguacuuuaagaaccacacaagccccgacguggaccugggcgauaucagcggaaucaaugccagcgucgugaacauccagaaagagaucgaccggcugaacgagguggccaagaaucugaacgagagccugaucgaccugcaagaacuggggaaguacgagcaguacaucaaguggcccugguacaucuggcugggcuuuaucgccggacugauugccaucgugaucgucacaaucaugcuguguugcaugaccagcugcuguagcugccugaagggcuguuguagcuguggcagcugcugcaaguucgacgaggacgauucugagcccgugcugaagggcgugaaacugcacuacacaugaggacuagucccuguucccagagcccacuuuuuuuucuuuuuuugaaauaaaauagccugucuuucagaucucaaaggcucuuuucagagccaccaaaaaaaaaaaaaaaaaaaaaaaaaaaaaaaaaaaaaaaaaaaaaaaaaaaaaaaaaaaaaaaaaaaaaaaaaaaaaaaaaaaaaaaaaaaaaaaaaaaaa

SEQ ID NO: 23837 - RNA, 4185 nt, Artificial Sequence
  SARS-CoV-2/Wuhan/WIV05/2019__EPI_ISL_402128 spike protein mRNA gc mod (1-1273)(K986P_V987P_H69del_V70del_A222V_Y453F_S477N_D614G_I692V)
aggagagggcgcuuggcuugcaaggacccugagcugcggcauugaagcacacccaacccaacucgacugaagucagccucacugaaccggaucugagaaucuucucucucugggcuugccagggcucuccgaaccuagcuagcauccucuucaauuccaacuagaaagcuuaccauguucguguuccuggugcugcugccucugguguccagccagugugugaaccugaccaccagaacacagcugccuccagccuacaccaacagcuuuaccagaggcguguacuaccccgacaagguguucagauccagcgugcugcacucuacccaggaccuguuccugccuuucuucagcaacgugaccugguuccacgccaucuccggcaccaauggcaccaagagauucgacaaccccgugcugcccuucaacgacgggguguacuuugccagcaccgagaaguccaacaucaucagaggcuggaucuucggcaccacacuggacagcaagacccagagccugcugaucgugaacaacgccaccaacguggucaucaaagugugcgaguuccaguucugcaacgaccccuuccugggcgucuacuaccacaagaacaacaagagcuggauggaaagcgaguuccggguguacagcagcgccaacaacugcaccuucgaguacgugucccagccuuuccugauggaccuggaaggcaagcagggcaacuucaagaaccugcgcgaguucguguuuaagaacaucgacggcuacuucaagaucuacagcaagcacaccccuaucaaccucgugcgggaucugccucagggcuucucugugcuggaaccccugguggaucugcccaucggcaucaacaucacccgguuucagacacugcuggcccugcacagaagcuaccugacaccuggcgauagcagcagcggauggacagcuggugccgccgcuuacuaugugggcuaccugcagccuagaaccuuccugcugaaguacaacgagaacggcaccaucaccgacgccguggauugugcucuggauccucugagcgagacaaagugcacccugaaguccuucaccguggaaaagggcaucuaccagaccagcaacuuccgggugcagcccaccgaauccaucgugcgguuccccaauaucaccaaucugugccccuucggcgagguguucaaugccaccagauucgccucuguguacgccuggaaccggaagcggaucagcaauugcguggccgacuacuccgugcuguacaacuccgccagcuucagcaccuucaagugcuacggcguguccccuaccaagcugaacgaccugugcuucacaaacguguacgccgacagcuucgugauccggggagaugaagugcggcagauugccccuggacagacaggcaagaucgccgacuacaacuacaagcugcccgacgacuucaccggcugugugauugccuggaacagcaacaaccuggacuccaaagucggcggcaacuacaauuaccuguuccggcuguuccggaaguccaaucugaagcccuucgagcgggacaucuccaccgagaucuaucaggccggcaacaccccuuguaacggcguggaaggcuucaacugcuacuucccacugcaguccuacggcuuucagcccacaaauggcgugggcuaucagcccuacagagugguggugcugagcuucgaacugcugcaugccccugccacagugugcggcccuaagaaaagcaccaaucucgugaagaacaaaugcgugaacuucaacuucaacggccugaccggcaccggcgugcugacagagagcaacaagaaguuccugccauuccagcaguuuggccgggauaucgccgauaccacagacgccguuagagauccccagacacuggaaauccuggacaucaccccuugcagcuucggcggagugucugugaucaccccuggcaccaacaccagcaaucagguggcagugcuguaccagggcgugaacuguaccgaagugcccguggccauucacgccgaucagcugacaccuacauggcggguguacuccaccggcagcaauguguuucagaccagagccggcugucugaucggagccgagcacgugaacaauagcuacgagugcgacauccccaucggcgcuggaaucugcgccagcuaccagacacagacaaacagcccucggagagccagaagcguggccagccagagcgugauugccuacacaaugucucugggcgccgagaacagcguggccuacuccaacaacucuaucgcuauccccaccaacuucaccaucagcgugaccacagagauccugccuguguccaugaccaagaccagcguggacugcaccauguacaucugcggcgauuccaccgagugcuccaaccugcugcugcaguacggcagcuucugcacccagcugaauagagcccugacagggaucgccguggaacaggacaagaacacccaagagguguucgcccaagugaagcagaucuacaagaccccuccuaucaaggacuucggcggcuucaauuucagccagauucugcccgauccuagcaagcccagcaagcggagcuucaucgaggaccugcuguucaacaaagugacacuggccgacgccggcuucaucaagcaguauggcgauugucugggcgacauugccgccagggaucugauuugcgcccagaaguuuaacggacugacagugcugccuccucugcugaccgaugagaugaucgcccaguacacaucugcccugcuggccggcacaaucacaagcggcuggacauuuggagcaggcgccgcucugcagauccccuuugcuaugcagauggccuaccgguucaacggcaucggagugacccagaaugugcuguacgagaaccagaagcugaucgccaaccaguucaacagcgccaucggcaagauccaggacagccugagcagcacagcaagcgcccugggaaagcugcaggacguggucaaccagaaugcccaggcacugaacacccuggucaagcagcuguccuccaacuucggcgccaucagcucugugcugaacgauauccugagcagacuggacccuccugaggccgaggugcagaucgacagacugaucacaggcagacugcagagccuccagacauacgugacccagcagcugaucagagccgccgagauuagagccucugccaaucuggccgccaccaagaugucugagugugugcugggccagagcaagagaguggacuuuugcggcaagggcuaccaccugaugagcuucccucagucugccccucacggcgugguguuucugcacgugacauaugugcccgcucaagagaagaauuucaccaccgcuccagccaucugccacgacggcaaagcccacuuuccuagagaaggcguguucguguccaacggcacccauugguucgugacacagcggaacuucuacgagccccagaucaucaccaccgacaacaccuucgugucuggcaacugcgacgucgugaucggcauugugaacaauaccguguacgacccucugcagcccgagcuggacagcuucaaagaggaacuggacaaguacuuuaagaaccacacaagccccgacguggaccugggcgauaucagcggaaucaaugccagcgucgugaacauccagaaagagaucgaccggcugaacgagguggccaagaaucugaacgagagccugaucgaccugcaagaacuggggaaguacgagcaguacaucaaguggcccugguacaucuggcugggcuuuaucgccggacugauugccaucgugauggucacaaucaugcuguguugcaugaccagcugcuguagcugccugaagggcuguuguagcuguggcagcugcugcaaguucgacgaggacgauucugagcccgugcugaagggcgugaaacugcacuacacaugaggacuagucccuguucccagagcccacuuuuuuuucuuuuuuugaaauaaaauagccugucuuucagaucucaaaggcucuuuucagagccaccaaaaaaaaaaaaaaaaaaaaaaaaaaaaaaaaaaaaaaaaaaaaaaaaaaaaaaaaaaaaaaaaaaaaaaaaaaaaaaaaaaaaaaaaaaaaaaaaaaaaa

SEQ ID NO: 23838 - RNA, 4185 nt, Artificial Sequence
  SARS-CoV-2/Wuhan/WIV05/2019__EPI_ISL_402128 spike protein mRNA gc mod (1-1273)(K986P_V987P_H69del_V70del_Y453F_D614G_I692V_M1229I)
aggagagggcgcuuggcuugcaaggacccugagcugcggcauugaagcacacccaacccaacucgacugaagucagccucacugaaccggaucugagaaucuucucucucugggcuugccagggcucuccgaaccuagcuagcauccucuucaauuccaacuagaaagcuuaccauguucguguuccuggugcugcugccucugguguccagccagugugugaaccugaccaccagaacacagcugccuccagccuacaccaacagcuuuaccagaggcguguacuaccccgacaagguguucagauccagcgugcugcacucuacccaggaccuguuccugccuuucuucagcaacgugaccugguuccacgccaucuccggcaccaauggcaccaagagauucgacaaccccgugcugcccuucaacgacgggguguacuuugccagcaccgagaaguccaacaucaucagaggcuggaucuucggcaccacacuggacagcaagacccagagccugcugaucgugaacaacgccaccaacguggucaucaaagugugcgaguuccaguucugcaacgaccccuuccugggcgucuacuaccacaagaacaacaagagcuggauggaaagcgaguuccggguguacagcagcgccaacaacugcaccuucgaguacgugucccagccuuuccugauggaccuggaaggcaagcagggcaacuucaagaaccugcgcgaguucguguuuaagaacaucgacggcuacuucaagaucuacagcaagcacaccccuaucaaccucgugcgggaucugccucagggcuucucugcucuggaaccccugguggaucugcccaucggcaucaacaucacccgguuucagacacugcuggcccugcacagaagcuaccugacaccuggcgauagcagcagcggauggacagcuggugccgccgcuuacuaugugggcuaccugcagccuagaaccuuccugcugaaguacaacgagaacggcaccaucaccgacgccguggauugugcucuggauccucugagcgagacaaagugcacccugaaguccuucaccguggaaaagggcaucuaccagaccagcaacuuccgggugcagcccaccgaauccaucgugcgguuccccaauaucaccaaucugugccccuucggcgagguguucaaugccaccagauucgccucuguguacgccuggaaccggaagcggaucagcaauugcguggccgacuacuccgugcuguacaacuccgccagcuucagcaccuucaagugcuacggcguguccccuaccaagcugaacgaccugugcuucacaaacguguacgccgacagcuucgugauccggggagaugaagugcggcagauugccccuggacagacaggcaagaucgccgacuacaacuacaagcugcccgacgacuucaccggcugugugauugccuggaacagcaacaaccuggacuccaaagucggcggcaacuacaauuaccuguuccggcuguuccggaaguccaaucugaagcccuucgagcgggacaucuccaccgagaucuaucaggccggcagcaccccuuguaacggcguggaaggcuucaacugcuacuucccacugcaguccuacggcuuucagcccacaaauggcgugggcuaucagcccuacagagugguggugcugagcuucgaacugcugcaugccccugccacagugugcggcccuaagaaaagcaccaaucucgugaagaacaaaugcgugaacuucaacuucaacggccugaccggcaccggcgugcugacagagagcaacaagaaguuccugccauuccagcaguuuggccgggauaucgccgauaccacagacgccguuagagauccccagacacuggaaauccuggacaucaccccuugcagcuucggcggagugucugugaucaccccuggcaccaacaccagcaaucagguggcagugcuguaccagggcgugaacuguaccgaagugcccguggccauucacgccgaucagcugacaccuacauggcggguguacuccaccggcagcaauguguuucagaccagagccggcugucugaucggagccgagcacgugaacaauagcuacgagugcgacauccccaucggcgcuggaaucugcgccagcuaccagacacagacaaacagcccucggagagccagaagcguggccagccagagcgugauugccuacacaaugucucugggcgccgagaacagcguggccuacuccaacaacucuaucgcuauccccaccaacuucaccaucagcgugaccacagagauccugccuguguccaugaccaagaccagcguggacugcaccauguacaucugcggcgauuccaccgagugcuccaaccugcugcugcaguacggcagcuucugcacccagcugaauagagcccugacagggaucgccguggaacaggacaagaacacccaagagguguucgcccaagugaagcagaucuacaagaccccuccuaucaaggacuucggcggcuucaauuucagccagauucugcccgauccuagcaagcccagcaagcggagcuucaucgaggaccugcuguucaacaaagugacacuggccgacgccggcuucaucaagcaguauggcgauugucugggcgacauugccgccagggaucugauuugcgcccagaaguuuaacggacugacagugcugccuccucugcugaccgaugagaugaucgcccaguacacaucugcccugcuggccggcacaaucacaagcggcuggacauuuggagcaggcgccgcucugcagauccccuuugcuaugcagauggccuaccgguucaacggcaucggagugacccagaaugugcuguacgagaaccagaagcugaucgccaaccaguucaacagcgccaucggcaagauccaggacagccugagcagcacagcaagcgcccugggaaagcugcaggacguggucaaccagaaugcccaggcacugaacacccuggucaagcagcuguccuccaacuucggcgccaucagcucugugcugaacgauauccugagcagacuggacccuccugaggccgaggugcagaucgacagacugaucacaggcagacugcagagccuccagacauacgugacccagcagcugaucagagccgccgagauuagagccucugccaaucuggccgccaccaagaugucugagugugugcugggccagagcaagagaguggacuuuugcggcaagggcuaccaccugaugagcuucccucagucugccccucacggcgugguguuucugcacgugacauaugugcccgcucaagagaagaauuucaccaccgcuccagccaucugccacgacggcaaagcccacuuuccuagagaaggcguguucguguccaacggcacccauugguucgugacacagcggaacuucuacgagccccagaucaucaccaccgacaacaccuucgugucuggcaacugcgacgucgugaucggcauugugaacaauaccguguacgacccucugcagcccgagcuggacagcuucaaagaggaacuggacaaguacuuuaagaaccacacaagccccgacguggaccugggcgauaucagcggaaucaaugccagcgucgugaacauccagaaagagaucgaccggcugaacgagguggccaagaaucugaacgagagccugaucgaccugcaagaacuggggaaguacgagcaguacaucaaguggcccugguacaucuggcugggcuuuaucgccggacugauugccaucgugaucgucacaaucaugcuguguugcaugaccagcugcuguagcugccugaagggcuguuguagcuguggcagcugcugcaaguucgacgaggacgauucugagcccgugcugaagggcgugaaacugcacuacacaugaggacuagucccuguucccagagcccacuuuuuuuucuuuuuuugaaauaaaauagccugucuuucagaucucaaaggcucuuuucagagccaccaaaaaaaaaaaaaaaaaaaaaaaaaaaaaaaaaaaaaaaaaaaaaaaaaaaaaaaaaaaaaaaaaaaaaaaaaaaaaaaaaaaaaaaaaaaaaaaaaaaaa

SEQ ID NO: 23839 - RNA, 4182 nt, Artificial Sequence
  SARS-CoV-2/Wuhan/WIV05/2019__EPI_ISL_402128 spike protein mRNA gc mod (1-1273)(K986P_V987P_K986P_V987P_H69del_V70del_Y144del_N501Y_A570 D_D614G_P681H_T716I_S982A_D1118H)
aggagagggcgcuuggcuugcaaggacccugagcugcggcauugaagcacacccaacccaacucgacugaagucagccucacugaaccggaucugagaaucuucucucucugggcuugccagggcucuccgaaccuagcuagcauccucuucaauuccaacuagaaagcuuaccauguucguguuccuggugcugcugccucugguguccagccagugugugaaccugaccaccagaacacagcugccuccagccuacaccaacagcuuuaccagaggcguguacuaccccgacaagguguucagauccagcgugcugcacucuacccaggaccuguuccugccuuucuucagcaacgugaccugguuccacgccaucuccggcaccaauggcaccaagagauucgacaaccccgugcugcccuucaacgacgggguguacuuugccagcaccgagaaguccaacaucaucagaggcuggaucuucggcaccacacuggacagcaagacccagagccugcugaucgugaacaacgccaccaacguggucaucaaagugugcgaguuccaguucugcaacgaccccuuccugggcgucuaccacaagaacaacaagagcuggauggaaagcgaguuccggguguacagcagcgccaacaacugcaccuucgaguacgugucccagccuuuccugauggaccuggaaggcaagcagggcaacuucaagaaccugcgcgaguucguguuuaagaacaucgacggcuacuucaagaucuacagcaagcacaccccuaucaaccucgugcgggaucugccucagggcuucucugcucuggaaccccugguggaucugcccaucggcaucaacaucacccgguuucagacacugcuggcccugcacagaagcuaccugacaccuggcgauagcagcagcggauggacagcuggugccgccgcuuacuaugugggcuaccugcagccuagaaccuuccugcugaaguacaacgagaacggcaccaucaccgacgccguggauugugcucuggauccucugagcgagacaaagugcacccugaaguccuucaccguggaaaagggcaucuaccagaccagcaacuuccgggugcagcccaccgaauccaucgugcgguuccccaauaucaccaaucugugccccuucggcgagguguucaaugccaccagauucgccucuguguacgccuggaaccggaagcggaucagcaauugcguggccgacuacuccgugcuguacaacuccgccagcuucagcaccuucaagugcuacggcguguccccuaccaagcugaacgaccugugcuucacaaacguguacgccgacagcuucgugauccggggagaugaagugcggcagauugccccuggacagacaggcaagaucgccgacuacaacuacaagcugcccgacgacuucaccggcugugugauugccuggaacagcaacaaccuggacuccaaagucggcggcaacuacaauuaccuguaccggcuguuccggaaguccaaucugaagcccuucgagcgggacaucuccaccgagaucuaucaggccggcagcaccccuuguaacggcguggaaggcuucaacugcuacuucccacugcaguccuacggcuuucagcccacauacggcgugggcuaucagcccuacagagugguggugcugagcuucgaacugcugcaugccccugccacagugugcggcccuaagaaaagcaccaaucucgugaagaacaaaugcgugaacuucaacuucaacggccugaccggcaccggcgugcugacagagagcaacaagaaguuccugccauuccagcaguuuggccgggauaucgacgauaccacagacgccguuagagauccccagacacuggaaauccuggacaucaccccuugcagcuucggcggagugucugugaucaccccuggcaccaacaccagcaaucagguggcagugcuguaccagggcgugaacuguaccgaagugcccguggccauucacgccgaucagcugacaccuacauggcggguguacuccaccggcagcaauguguuucagaccagagccggcugucugaucggagccgagcacgugaacaauagcuacgagugcgacauccccaucggcgcuggaaucugcgccagcuaccagacacagacaaacagccaccggagagccagaagcguggccagccagagcaucauugccuacacaaugucucugggcgccgagaacagcguggccuacuccaacaacucuaucgcuauccccaucaacuucaccaucagcgugaccacagagauccugccuguguccaugaccaagaccagcguggacugcaccauguacaucugcggcgauuccaccgagugcuccaaccugcugcugcaguacggcagcuucugcacccagcugaauagagcccugacagggaucgccguggaacaggacaagaacacccaagagguguucgcccaagugaagcagaucuacaagaccccuccuaucaaggacuucggcggcuucaauuucagccagauucugcccgauccuagcaagcccagcaagcggagcuucaucgaggaccugcuguucaacaaagugacacuggccgacgccggcuucaucaagcaguauggcgauugucugggcgacauugccgccagggaucugauuugcgcccagaaguuuaacggacugacagugcugccuccucugcugaccgaugagaugaucgcccaguacacaucugcccugcuggccggcacaaucacaagcggcuggacauuuggagcaggcgccgcucugcagauccccuuugcuaugcagauggccuaccgguucaacggcaucggagugacccagaaugugcuguacgagaaccagaagcugaucgccaaccaguucaacagcgccaucggcaagauccaggacagccugagcagcacagcaagcgcccugggaaagcugcaggacguggucaaccagaaugcccaggcacugaacacccuggucaagcagcuguccuccaacuucggcgccaucagcucugugcugaacgauauccuggccagacuggacccuccugaggccgaggugcagaucgacagacugaucacaggcagacugcagagccuccagacauacgugacccagcagcugaucagagccgccgagauuagagccucugccaaucuggccgccaccaagaugucugagugugugcugggccagagcaagagaguggacuuuugcggcaagggcuaccaccugaugagcuucccucagucugccccucacggcgugguguuucugcacgugacauaugugcccgcucaagagaagaauuucaccaccgcuccagccaucugccacgacggcaaagcccacuuuccuagagaaggcguguucguguccaacggcacccauugguucgugacacagcggaacuucuacgagccccagaucaucaccacccacaacaccuucgugucuggcaacugcgacgucgugaucggcauugugaacaauaccguguacgacccucugcagcccgagcuggacagcuucaaagaggaacuggacaaguacuuuaagaaccacacaagccccgacguggaccugggcgauaucagcggaaucaaugccagcgucgugaacauccagaaagagaucgaccggcugaacgagguggccaagaaucugaacgagagccugaucgaccugcaagaacuggggaaguacgagcaguacaucaaguggcccugguacaucuggcugggcuuuaucgccggacugauugccaucgugauggucacaaucaugcuguguugcaugaccagcugcuguagcugccugaagggcuguuguagcuguggcagcugcugcaaguucgacgaggacgauucugagcccgugcugaagggcgugaaacugcacuacacaugaggacuagucccuguucccagagcccacuuuuuuuucuuuuuuugaaauaaaauagccugucuuucagaucucaaaggcucuuuucagagccaccaaaaaaaaaaaaaaaaaaaaaaaaaaaaaaaaaaaaaaaaaaaaaaaaaaaaaaaaaaaaaaaaaaaaaaaaaaaaaaaaaaaaaaaaaaaaaaaaaaaaa

SEQ ID NO: 23840 - RNA, 4191 nt, Artificial Sequence
  SARS-CoV-2/Wuhan/WIV05/2019__EPI_ISL_402128 spike protein mRNA gc mod (1-1273)(K986P_V987P_K986P_V987P_K417N_E484K_N501Y_D614G)
aggagagggcgcuuggcuugcaaggacccugagcugcggcauugaagcacacccaacccaacucgacugaagucagccucacugaaccggaucugagaaucuucucucucugggcuugccagggcucuccgaaccuagcuagcauccucuucaauuccaacuagaaagcuuaccauguucguguuccuggugcugcugccucugguguccagccagugugugaaccugaccaccagaacacagcugccuccagccuacaccaacagcuuuaccagaggcguguacuaccccgacaagguguucagauccagcgugcugcacucuacccaggaccuguuccugccuuucuucagcaacgugaccugguuccacgccauccacguguccggcaccaauggcaccaagagauucgacaaccccgugcugcccuucaacgacgggguguacuuugccagcaccgagaaguccaacaucaucagaggcuggaucuucggcaccacacuggacagcaagacccagagccugcugaucgugaacaacgccaccaacguggucaucaaagugugcgaguuccaguucugcaacgaccccuuccugggcgucuacuaccacaagaacaacaagagcuggauggaaagcgaguuccggguguacagcagcgccaacaacugcaccuucgaguacgugucccagccuuuccugauggaccuggaaggcaagcagggcaacuucaagaaccugcgcgaguucguguuuaagaacaucgacggcuacuucaagaucuacagcaagcacaccccuaucaaccucgugcgggaucugccucagggcuucucugcucuggaaccccugguggaucugcccaucggcaucaacaucacccgguuucagacacugcuggcccugcacagaagcuaccugacaccuggcgauagcagcagcggauggacagcuggugccgccgcuuacuaugugggcuaccugcagccuagaaccuuccugcugaaguacaacgagaacggcaccaucaccgacgccguggauugugcucuggauccucugagcgagacaaagugcacccugaaguccuucaccguggaaaagggcaucuaccagaccagcaacuuccgggugcagcccaccgaauccaucgugcgguuccccaauaucaccaaucugugccccuucggcgagguguucaaugccaccagauucgccucuguguacgccuggaaccggaagcggaucagcaauugcguggccgacuacuccgugcuguacaacuccgccagcuucagcaccuucaagugcuacggcguguccccuaccaagcugaacgaccugugcuucacaaacguguacgccgacagcuucgugauccggggagaugaagugcggcagauugccccuggacagacaggcaacaucgccgacuacaacuacaagcugcccgacgacuucaccggcugugugauugccuggaacagcaacaaccuggacuccaaagucggcggcaacuacaauuaccuguaccggcuguuccggaaguccaaucugaagcccuucgagcgggacaucuccaccgagaucuaucaggccggcagcaccccuuguaacggcgugaagggcuucaacugcuacuucccacugcaguccuacggcuuucagcccacauacggcgugggcuaucagcccuacagagugguggugcugagcuucgaacugcugcaugccccugccacagugugcggcccuaagaaaagcaccaaucucgugaagaacaaaugcgugaacuucaacuucaacggccugaccggcaccggcgugcugacagagagcaacaagaaguuccugccauuccagcaguuuggccgggauaucgccgauaccacagacgccguuagagauccccagacacuggaaauccuggacaucaccccuugcagcuucggcggagugucugugaucaccccuggcaccaacaccagcaaucagguggcagugcuguaccagggcgugaacuguaccgaagugcccguggccauucacgccgaucagcugacaccuacauggcggguguacuccaccggcagcaauguguuucagaccagagccggcugucugaucggagccgagcacgugaacaauagcuacgagugcgacauccccaucggcgcuggaaucugcgccagcuaccagacacagacaaacagcccucggagagccagaagcguggccagccagagcaucauugccuacacaaugucucugggcgccgagaacagcguggccuacuccaacaacucuaucgcuauccccaccaacuucaccaucagcgugaccacagagauccugccuguguccaugaccaagaccagcguggacugcaccauguacaucugcggcgauuccaccgagugcuccaaccugcugcugcaguacggcagcuucugcacccagcugaauagagcccugacagggaucgccguggaacaggacaagaacacccaagagguguucgcccaagugaagcagaucuacaagaccccuccuaucaaggacuucggcggcuucaauuucagccagauucugcccgauccuagcaagcccagcaagcggagcuucaucgaggaccugcuguucaacaaagugacacuggccgacgccggcuucaucaagcaguauggcgauugucugggcgacauugccgccagggaucugauuugcgcccagaaguuuaacggacugacagugcugccuccucugcugaccgaugagaugaucgcccaguacacaucugcccugcuggccggcacaaucacaagcggcuggacauuuggagcaggcgccgcucugcagauccccuuugcuaugcagauggccuaccgguucaacggcaucggagugacccagaaugugcuguacgagaaccagaagcugaucgccaaccaguucaacagcgccaucggcaagauccaggacagccugagcagcacagcaagcgcccugggaaagcugcaggacguggucaaccagaaugcccaggcacugaacacccuggucaagcagcuguccuccaacuucggcgccaucagcucugugcugaacgauauccugagcagacuggacccuccugaggccgaggugcagaucgacagacugaucacaggcagacugcagagccuccagacauacgugacccagcagcugaucagagccgccgagauuagagccucugccaaucuggccgccaccaagaugucugagugugugcugggccagagcaagagaguggacuuuugcggcaagggcuaccaccugaugagcuucccucagucugccccucacggcgugguguuucugcacgugacauaugugcccgcucaagagaagaauuucaccaccgcuccagccaucugccacgacggcaaagcccacuuuccuagagaaggcguguucguguccaacggcacccauugguucgugacacagcggaacuucuacgagccccagaucaucaccaccgacaacaccuucgugucuggcaacugcgacgucgugaucggcauugugaacaauaccguguacgacccucugcagcccgagcuggacagcuucaaagaggaacuggacaaguacuuuaagaaccacacaagccccgacguggaccugggcgauaucagcggaaucaaugccagcgucgugaacauccagaaagagaucgaccggcugaacgagguggccaagaaucugaacgagagccugaucgaccugcaagaacuggggaaguacgagcaguacaucaaguggcccugguacaucuggcugggcuuuaucgccggacugauugccaucgugauggucacaaucaugcuguguugcaugaccagcugcuguagcugccugaagggcuguuguagcuguggcagcugcugcaaguucgacgaggacgauucugagcccgugcugaagggcgugaaacugcacuacacaugaggacuagucccuguucccagagcccacuuuuuuuucuuuuuuugaaauaaaauagccugucuuucagaucucaaaggcucuuuucagagccaccaaaaaaaaaaaaaaaaaaaaaaaaaaaaaaaaaaaaaaaaaaaaaaaaaaaaaaaaaaaaaaaaaaaaaaaaaaaaaaaaaaaaaaaaaaaaaaaaaaaaa

SEQ ID NO: 23841 - RNA, 4182 nt, Artificial Sequence
  SARS-CoV-2/Wuhan/WIV05/2019__EPI_ISL_402128 spike protein mRNA gc mod (1-1273)(K986P_V987P_K986P_V987P_L18F_D80A_D215G_L242del_A243del_ L244del_R246I_K417N_E484K_N501Y_D614G_A701V)
aggagagggcgcuuggcuugcaaggacccugagcugcggcauugaagcacacccaacccaacucgacugaagucagccucacugaaccggaucugagaaucuucucucucugggcuugccagggcucuccgaaccuagcuagcauccucuucaauuccaacuagaaagcuuaccauguucguguuccuggugcugcugccucugguguccagccagugugugaacuucaccaccagaacacagcugccuccagccuacaccaacagcuuuaccagaggcguguacuaccccgacaagguguucagauccagcgugcugcacucuacccaggaccuguuccugccuuucuucagcaacgugaccugguuccacgccauccacguguccggcaccaauggcaccaagagauucgccaaccccgugcugcccuucaacgacgggguguacuuugccagcaccgagaaguccaacaucaucagaggcuggaucuucggcaccacacuggacagcaagacccagagccugcugaucgugaacaacgccaccaacguggucaucaaagugugcgaguuccaguucugcaacgaccccuuccugggcgucuacuaccacaagaacaacaagagcuggauggaaagcgaguuccggguguacagcagcgccaacaacugcaccuucgaguacgugucccagccuuuccugauggaccuggaaggcaagcagggcaacuucaagaaccugcgcgaguucguguuuaagaacaucgacggcuacuucaagaucuacagcaagcacaccccuaucaaccucgugcggggccugccucagggcuucucugcucuggaaccccugguggaucugcccaucggcaucaacaucacccgguuucagacacugcacaucagcuaccugacaccuggcgauagcagcagcggauggacagcuggugccgccgcuuacuaugugggcuaccugcagccuagaaccuuccugcugaaguacaacgagaacggcaccaucaccgacgccguggauugugcucuggauccucugagcgagacaaagugcacccugaaguccuucaccguggaaaagggcaucuaccagaccagcaacuuccgggugcagcccaccgaauccaucgugcgguuccccaauaucaccaaucugugccccuucggcgagguguucaaugccaccagauucgccucuguguacgccuggaaccggaagcggaucagcaauugcguggccgacuacuccgugcuguacaacuccgccagcuucagcaccuucaagugcuacggcguguccccuaccaagcugaacgaccugugcuucacaaacguguacgccgacagcuucgugauccggggagaugaagugcggcagauugccccuggacagacaggcaacaucgccgacuacaacuacaagcugcccgacgacuucaccggcugugugauugccuggaacagcaacaaccuggacuccaaagucggcggcaacuacaauuaccuguaccggcuguuccggaaguccaaucugaagcccuucgagcgggacaucuccaccgagaucuaucaggccggcagcaccccuuguaacggcgugaagggcuucaacugcuacuucccacugcaguccuacggcuuucagcccacauacggcgugggcuaucagcccuacagagugguggugcugagcuucgaacugcugcaugccccugccacagugugcggcccuaagaaaagcaccaaucucgugaagaacaaaugcgugaacuucaacuucaacggccugaccggcaccggcgugcugacagagagcaacaagaaguuccugccauuccagcaguuuggccgggauaucgccgauaccacagacgccguuagagauccccagacacuggaaauccuggacaucaccccuugcagcuucggcggagugucugugaucaccccuggcaccaacaccagcaaucagguggcagugcuguaccagggcgugaacuguaccgaagugcccguggccauucacgccgaucagcugacaccuacauggcggguguacuccaccggcagcaauguguuucagaccagagccggcugucugaucggagccgagcacgugaacaauagcuacgagugcgacauccccaucggcgcuggaaucugcgccagcuaccagacacagacaaacagcccucggagagccagaagcguggccagccagagcaucauugccuacacaaugucucugggcguggagaacagcguggccuacuccaacaacucuaucgcuauccccaccaacuucaccaucagcgugaccacagagauccugccuguguccaugaccaagaccagcguggacugcaccauguacaucugcggcgauuccaccgagugcuccaaccugcugcugcaguacggcagcuucugcacccagcugaauagagcccugacagggaucgccguggaacaggacaagaacacccaagagguguucgcccaagugaagcagaucuacaagaccccuccuaucaaggacuucggcggcuucaauuucagccagauucugcccgauccuagcaagcccagcaagcggagcuucaucgaggaccugcuguucaacaaagugacacuggccgacgccggcuucaucaagcaguauggcgauugucugggcgacauugccgccagggaucugauuugcgcccagaaguuuaacggacugacagugcugccuccucugcugaccgaugagaugaucgcccaguacacaucugcccugcuggccggcacaaucacaagcggcuggacauuuggagcaggcgccgcucugcagauccccuuugcuaugcagauggccuaccgguucaacggcaucggagugacccagaaugugcuguacgagaaccagaagcugaucgccaaccaguucaacagcgccaucggcaagauccaggacagccugagcagcacagcaagcgcccugggaaagcugcaggacguggucaaccagaaugcccaggcacugaacacccuggucaagcagcuguccuccaacuucggcgccaucagcucugugcugaacgauauccugagcagacuggacccuccugaggccgaggugcagaucgacagacugaucacaggcagacugcagagccuccagacauacgugacccagcagcugaucagagccgccgagauuagagccucugccaaucuggccgccaccaagaugucugagugugugcugggccagagcaagagaguggacuuuugcggcaagggcuaccaccugaugagcuucccucagucugccccucacggcgugguguuucugcacgugacauaugugcccgcucaagagaagaauuucaccaccgcuccagccaucugccacgacggcaaagcccacuuuccuagagaaggcguguucguguccaacggcacccauugguucgugacacagcggaacuucuacgagccccagaucaucaccaccgacaacaccuucgugucuggcaacugcgacgucgugaucggcauugugaacaauaccguguacgacccucugcagcccgagcuggacagcuucaaagaggaacuggacaaguacuuuaagaaccacacaagccccgacguggaccugggcgauaucagcggaaucaaugccagcgucgugaacauccagaaagagaucgaccggcugaacgagguggccaagaaucugaacgagagccugaucgaccugcaagaacuggggaaguacgagcaguacaucaaguggcccugguacaucuggcugggcuuuaucgccggacugauugccaucgugauggucacaaucaugcuguguugcaugaccagcugcuguagcugccugaagggcuguuguagcuguggcagcugcugcaaguucgacgaggacgauucugagcccgugcugaagggcgugaaacugcacuacacaugaggacuagucccuguucccagagcccacuuuuuuuucuuuuuuugaaauaaaauagccugucuuucagaucucaaaggcucuuuucagagccaccaaaaaaaaaaaaaaaaaaaaaaaaaaaaaaaaaaaaaaaaaaaaaaaaaaaaaaaaaaaaaaaaaaaaaaaaaaaaaaaaaaaaaaaaaaaaaaaaaaaaa

SEQ ID NO: 23842 - RNA, 4191 nt, Artificial Sequence
  SARS-CoV-2/Wuhan/WIV05/2019__EPI_ISL_402128 spike protein mRNA gc mod (1-1273)(K986P_V987P_K986P_V987P_E484K_D614G)
aggagagggcgcuuggcuugcaaggacccugagcugcggcauugaagcacacccaacccaacucgacugaagucagccucacugaaccggaucugagaaucuucucucucugggcuugccagggcucuccgaaccuagcuagcauccucuucaauuccaacuagaaagcuuaccauguucguguuccuggugcugcugccucugguguccagccagugugugaaccugaccaccagaacacagcugccuccagccuacaccaacagcuuuaccagaggcguguacuaccccgacaagguguucagauccagcgugcugcacucuacccaggaccuguuccugccuuucuucagcaacgugaccugguuccacgccauccacguguccggcaccaauggcaccaagagauucgacaaccccgugcugcccuucaacgacgggguguacuuugccagcaccgagaaguccaacaucaucagaggcuggaucuucggcaccacacuggacagcaagacccagagccugcugaucgugaacaacgccaccaacguggucaucaaagugugcgaguuccaguucugcaacgaccccuuccugggcgucuacuaccacaagaacaacaagagcuggauggaaagcgaguuccggguguacagcagcgccaacaacugcaccuucgaguacgugucccagccuuuccugauggaccuggaaggcaagcagggcaacuucaagaaccugcgcgaguucguguuuaagaacaucgacggcuacuucaagaucuacagcaagcacaccccuaucaaccucgugcgggaucugccucagggcuucucugcucuggaaccccugguggaucugcccaucggcaucaacaucacccgguuucagacacugcuggcccugcacagaagcuaccugacaccuggcgauagcagcagcggauggacagcuggugccgccgcuuacuaugugggcuaccugcagccuagaaccuuccugcugaaguacaacgagaacggcaccaucaccgacgccguggauugugcucuggauccucugagcgagacaaagugcacccugaaguccuucaccguggaaaagggcaucuaccagaccagcaacuuccgggugcagcccaccgaauccaucgugcgguuccccaauaucaccaaucugugccccuucggcgagguguucaaugccaccagauucgccucuguguacgccuggaaccggaagcggaucagcaauugcguggccgacuacuccgugcuguacaacuccgccagcuucagcaccuucaagugcuacggcguguccccuaccaagcugaacgaccugugcuucacaaacguguacgccgacagcuucgugauccggggagaugaagugcggcagauugccccuggacagacaggcaagaucgccgacuacaacuacaagcugcccgacgacuucaccggcugugugauugccuggaacagcaacaaccuggacuccaaagucggcggcaacuacaauuaccuguaccggcuguuccggaaguccaaucugaagcccuucgagcgggacaucuccaccgagaucuaucaggccggcagcaccccuuguaacggcgugaagggcuucaacugcuacuucccacugcaguccuacggcuuucagcccacaaauggcgugggcuaucagcccuacagagugguggugcugagcuucgaacugcugcaugccccugccacagugugcggcccuaagaaaagcaccaaucucgugaagaacaaaugcgugaacuucaacuucaacggccugaccggcaccggcgugcugacagagagcaacaagaaguuccugccauuccagcaguuuggccgggauaucgccgauaccacagacgccguuagagauccccagacacuggaaauccuggacaucaccccuugcagcuucggcggagugucugugaucaccccuggcaccaacaccagcaaucagguggcagugcuguaccagggcgugaacuguaccgaagugcccguggccauucacgccgaucagcugacaccuacauggcggguguacuccaccggcagcaauguguuucagaccagagccggcugucugaucggagccgagcacgugaacaauagcuacgagugcgacauccccaucggcgcuggaaucugcgccagcuaccagacacagacaaacagcccucggagagccagaagcguggccagccagagcaucauugccuacacaaugucucugggcgccgagaacagcguggccuacuccaacaacucuaucgcuauccccaccaacuucaccaucagcgugaccacagagauccugccuguguccaugaccaagaccagcguggacugcaccauguacaucugcggcgauuccaccgagugcuccaaccugcugcugcaguacggcagcuucugcacccagcugaauagagcccugacagggaucgccguggaacaggacaagaacacccaagagguguucgcccaagugaagcagaucuacaagaccccuccuaucaaggacuucggcggcuucaauuucagccagauucugcccgauccuagcaagcccagcaagcggagcuucaucgaggaccugcuguucaacaaagugacacuggccgacgccggcuucaucaagcaguauggcgauugucugggcgacauugccgccagggaucugauuugcgcccagaaguuuaacggacugacagugcugccuccucugcugaccgaugagaugaucgcccaguacacaucugcccugcuggccggcacaaucacaagcggcuggacauuuggagcaggcgccgcucugcagauccccuuugcuaugcagauggccuaccgguucaacggcaucggagugacccagaaugugcuguacgagaaccagaagcugaucgccaaccaguucaacagcgccaucggcaagauccaggacagccugagcagcacagcaagcgcccugggaaagcugcaggacguggucaaccagaaugcccaggcacugaacacccuggucaagcagcuguccuccaacuucggcgccaucagcucugugcugaacgauauccugagcagacuggacccuccugaggccgaggugcagaucgacagacugaucacaggcagacugcagagccuccagacauacgugacccagcagcugaucagagccgccgagauuagagccucugccaaucuggccgccaccaagaugucugagugugugcugggccagagcaagagaguggacuuuugcggcaagggcuaccaccugaugagcuucccucagucugccccucacggcgugguguuucugcacgugacauaugugcccgcucaagagaagaauuucaccaccgcuccagccaucugccacgacggcaaagcccacuuuccuagagaaggcguguucguguccaacggcacccauugguucgugacacagcggaacuucuacgagccccagaucaucaccaccgacaacaccuucgugucuggcaacugcgacgucgugaucggcauugugaacaauaccguguacgacccucugcagcccgagcuggacagcuucaaagaggaacuggacaaguacuuuaagaaccacacaagccccgacguggaccugggcgauaucagcggaaucaaugccagcgucgugaacauccagaaagagaucgaccggcugaacgagguggccaagaaucugaacgagagccugaucgaccugcaagaacuggggaaguacgagcaguacaucaaguggcccugguacaucuggcugggcuuuaucgccggacugauugccaucgugauggucacaaucaugcuguguugcaugaccagcugcuguagcugccugaagggcuguuguagcuguggcagcugcugcaaguucgacgaggacgauucugagcccgugcugaagggcgugaaacugcacuacacaugaggacuagucccuguucccagagcccacuuuuuuuucuuuuuuugaaauaaaauagccugucuuucagaucucaaaggcucuuuucagagccaccaaaaaaaaaaaaaaaaaaaaaaaaaaaaaaaaaaaaaaaaaaaaaaaaaaaaaaaaaaaaaaaaaaaaaaaaaaaaaaaaaaaaaaaaaaaaaaaaaaaaa

SEQ ID NO: 23843 - RNA, 4191 nt, Artificial Sequence
  SARS-CoV-2/Wuhan/WIV05/2019__EPI_ISL_402128 spike protein mRNA gc mod (1-1273)(K986P_V987P_K986P_V987P_L18F_T20N_P26S_D138Y_R190S_K417T _E484K_N501Y_D614G_H655Y_T1027I)
aggagagggcgcuuggcuugcaaggacccugagcugcggcauugaagcacacccaacccaacucgacugaagucagccucacugaaccggaucugagaaucuucucucucugggcuugccagggcucuccgaaccuagcuagcauccucuucaauuccaacuagaaagcuuaccauguucguguuccuggugcugcugccucugguguccagccagugugugaacuucaccaacagaacacagcugccuagcgccuacaccaacagcuuuaccagaggcguguacuaccccgacaagguguucagauccagcgugcugcacucuacccaggaccuguuccugccuuucuucagcaacgugaccugguuccacgccauccacguguccggcaccaauggcaccaagagauucgacaaccccgugcugcccuucaacgacgggguguacuuugccagcaccgagaaguccaacaucaucagaggcuggaucuucggcaccacacuggacagcaagacccagagccugcugaucgugaacaacgccaccaacguggucaucaaagugugcgaguuccaguucugcaacuaccccuuccugggcgucuacuaccacaagaacaacaagagcuggauggaaagcgaguuccggguguacagcagcgccaacaacugcaccuucgaguacgugucccagccuuuccugauggaccuggaaggcaagcagggcaacuucaagaaccugagcgaguucguguuuaagaacaucgacggcuacuucaagaucuacagcaagcacaccccuaucaaccucgugcgggaucugccucagggcuucucugcucuggaaccccugguggaucugcccaucggcaucaacaucacccgguuucagacacugcuggcccugcacagaagcuaccugacaccuggcgauagcagcagcggauggacagcuggugccgccgcuuacuaugugggcuaccugcagccuagaaccuuccugcugaaguacaacgagaacggcaccaucaccgacgccguggauugugcucuggauccucugagcgagacaaagugcacccugaaguccuucaccguggaaaagggcaucuaccagaccagcaacuuccgggugcagcccaccgaauccaucgugcgguuccccaauaucaccaaucugugccccuucggcgagguguucaaugccaccagauucgccucuguguacgccuggaaccggaagcggaucagcaauugcguggccgacuacuccgugcuguacaacuccgccagcuucagcaccuucaagugcuacggcguguccccuaccaagcugaacgaccugugcuucacaaacguguacgccgacagcuucgugauccggggagaugaagugcggcagauugccccuggacagacaggcaccaucgccgacuacaacuacaagcugcccgacgacuucaccggcugugugauugccuggaacagcaacaaccuggacuccaaagucggcggcaacuacaauuaccuguaccggcuguuccggaaguccaaucugaagcccuucgagcgggacaucuccaccgagaucuaucaggccggcagcaccccuuguaacggcgugaagggcuucaacugcuacuucccacugcaguccuacggcuuucagcccacauacggcgugggcuaucagcccuacagagugguggugcugagcuucgaacugcugcaugccccugccacagugugcggcccuaagaaaagcaccaaucucgugaagaacaaaugcgugaacuucaacuucaacggccugaccggcaccggcgugcugacagagagcaacaagaaguuccugccauuccagcaguuuggccgggauaucgccgauaccacagacgccguuagagauccccagacacuggaaauccuggacaucaccccuugcagcuucggcggagugucugugaucaccccuggcaccaacaccagcaaucagguggcagugcuguaccagggcgugaacuguaccgaagugcccguggccauucacgccgaucagcugacaccuacauggcggguguacuccaccggcagcaauguguuucagaccagagccggcugucugaucggagccgaguacgugaacaauagcuacgagugcgacauccccaucggcgcuggaaucugcgccagcuaccagacacagacaaacagcccucggagagccagaagcguggccagccagagcaucauugccuacacaaugucucugggcgccgagaacagcguggccuacuccaacaacucuaucgcuauccccaccaacuucaccaucagcgugaccacagagauccugccuguguccaugaccaagaccagcguggacugcaccauguacaucugcggcgauuccaccgagugcuccaaccugcugcugcaguacggcagcuucugcacccagcugaauagagcccugacagggaucgccguggaacaggacaagaacacccaagagguguucgcccaagugaagcagaucuacaagaccccuccuaucaaggacuucggcggcuucaauuucagccagauucugcccgauccuagcaagcccagcaagcggagcuucaucgaggaccugcuguucaacaaagugacacuggccgacgccggcuucaucaagcaguauggcgauugucugggcgacauugccgccagggaucugauuugcgcccagaaguuuaacggacugacagugcugccuccucugcugaccgaugagaugaucgcccaguacacaucugcccugcuggccggcacaaucacaagcggcuggacauuuggagcaggcgccgcucugcagauccccuuugcuaugcagauggccuaccgguucaacggcaucggagugacccagaaugugcuguacgagaaccagaagcugaucgccaaccaguucaacagcgccaucggcaagauccaggacagccugagcagcacagcaagcgcccugggaaagcugcaggacguggucaaccagaaugcccaggcacugaacacccuggucaagcagcuguccuccaacuucggcgccaucagcucugugcugaacgauauccugagcagacuggacccuccugaggccgaggugcagaucgacagacugaucacaggcagacugcagagccuccagacauacgugacccagcagcugaucagagccgccgagauuagagccucugccaaucuggccgccaucaagaugucugagugugugcugggccagagcaagagaguggacuuuugcggcaagggcuaccaccugaugagcuucccucagucugccccucacggcgugguguuucugcacgugacauaugugcccgcucaagagaagaauuucaccaccgcuccagccaucugccacgacggcaaagcccacuuuccuagagaaggcguguucguguccaacggcacccauugguucgugacacagcggaacuucuacgagccccagaucaucaccaccgacaacaccuucgugucuggcaacugcgacgucgugaucggcauugugaacaauaccguguacgacccucugcagcccgagcuggacagcuucaaagaggaacuggacaaguacuuuaagaaccacacaagccccgacguggaccugggcgauaucagcggaaucaaugccagcgucgugaacauccagaaagagaucgaccggcugaacgagguggccaagaaucugaacgagagccugaucgaccugcaagaacuggggaaguacgagcaguacaucaaguggcccugguacaucuggcugggcuuuaucgccggacugauugccaucgugauggucacaaucaugcuguguugcaugaccagcugcuguagcugccugaagggcuguuguagcuguggcagcugcugcaaguucgacgaggacgauucugagcccgugcugaagggcgugaaacugcacuacacaugaggacuagucccuguucccagagcccacuuuuuuuucuuuuuuugaaauaaaauagccugucuuucagaucucaaaggcucuuuucagagccaccaaaaaaaaaaaaaaaaaaaaaaaaaaaaaaaaaaaaaaaaaaaaaaaaaaaaaaaaaaaaaaaaaaaaaaaaaaaaaaaaaaaaaaaaaaaaaaaaaaaaa

SEQ ID NO: 23844 - RNA, 4191 nt, Artificial Sequence
  SARS-CoV-2/Wuhan/WIV05/2019__EPI_ISL_402128 spike protein mRNA gc mod (1-1273)(K986P_V987P_K986P_V987P_S13I_W152C_L452R_D614G)
aggagagggcgcuuggcuugcaaggacccugagcugcggcauugaagcacacccaacccaacucgacugaagucagccucacugaaccggaucugagaaucuucucucucugggcuugccagggcucuccgaaccuagcuagcauccucuucaauuccaacuagaaagcuuaccauguucguguuccuggugcugcugccucugguguccauccagugugugaaccugaccaccagaacacagcugccuccagccuacaccaacagcuuuaccagaggcguguacuaccccgacaagguguucagauccagcgugcugcacucuacccaggaccuguuccugccuuucuucagcaacgugaccugguuccacgccauccacguguccggcaccaauggcaccaagagauucgacaaccccgugcugcccuucaacgacgggguguacuuugccagcaccgagaaguccaacaucaucagaggcuggaucuucggcaccacacuggacagcaagacccagagccugcugaucgugaacaacgccaccaacguggucaucaaagugugcgaguuccaguucugcaacgaccccuuccugggcgucuacuaccacaagaacaacaagagcugcauggaaagcgaguuccggguguacagcagcgccaacaacugcaccuucgaguacgugucccagccuuuccugauggaccuggaaggcaagcagggcaacuucaagaaccugcgcgaguucguguuuaagaacaucgacggcuacuucaagaucuacagcaagcacaccccuaucaaccucgugcgggaucugccucagggcuucucugcucuggaaccccugguggaucugcccaucggcaucaacaucacccgguuucagacacugcuggcccugcacagaagcuaccugacaccuggcgauagcagcagcggauggacagcuggugccgccgcuuacuaugugggcuaccugcagccuagaaccuuccugcugaaguacaacgagaacggcaccaucaccgacgccguggauugugcucuggauccucugagcgagacaaagugcacccugaaguccuucaccguggaaaagggcaucuaccagaccagcaacuuccgggugcagcccaccgaauccaucgugcgguuccccaauaucaccaaucugugccccuucggcgagguguucaaugccaccagauucgccucuguguacgccuggaaccggaagcggaucagcaauugcguggccgacuacuccgugcuguacaacuccgccagcuucagcaccuucaagugcuacggcguguccccuaccaagcugaacgaccugugcuucacaaacguguacgccgacagcuucgugauccggggagaugaagugcggcagauugccccuggacagacaggcaagaucgccgacuacaacuacaagcugcccgacgacuucaccggcugugugauugccuggaacagcaacaaccuggacuccaaagucggcggcaacuacaauuaccgcuaccggcuguuccggaaguccaaucugaagcccuucgagcgggacaucuccaccgagaucuaucaggccggcagcaccccuuguaacggcguggaaggcuucaacugcuacuucccacugcaguccuacggcuuucagcccacaaauggcgugggcuaucagcccuacagagugguggugcugagcuucgaacugcugcaugccccugccacagugugcggcccuaagaaaagcaccaaucucgugaagaacaaaugcgugaacuucaacuucaacggccugaccggcaccggcgugcugacagagagcaacaagaaguuccugccauuccagcaguuuggccgggauaucgccgauaccacagacgccguuagagauccccagacacuggaaauccuggacaucaccccuugcagcuucggcggagugucugugaucaccccuggcaccaacaccagcaaucagguggcagugcuguaccagggcgugaacuguaccgaagugcccguggccauucacgccgaucagcugacaccuacauggcggguguacuccaccggcagcaauguguuucagaccagagccggcugucugaucggagccgagcacgugaacaauagcuacgagugcgacauccccaucggcgcuggaaucugcgccagcuaccagacacagacaaacagcccucggagagccagaagcguggccagccagagcaucauugccuacacaaugucucugggcgccgagaacagcguggccuacuccaacaacucuaucgcuauccccaccaacuucaccaucagcgugaccacagagauccugccuguguccaugaccaagaccagcguggacugcaccauguacaucugcggcgauuccaccgagugcuccaaccugcugcugcaguacggcagcuucugcacccagcugaauagagcccugacagggaucgccguggaacaggacaagaacacccaagagguguucgcccaagugaagcagaucuacaagaccccuccuaucaaggacuucggcggcuucaauuucagccagauucugcccgauccuagcaagcccagcaagcggagcuucaucgaggaccugcuguucaacaaagugacacuggccgacgccggcuucaucaagcaguauggcgauugucugggcgacauugccgccagggaucugauuugcgcccagaaguuuaacggacugacagugcugccuccucugcugaccgaugagaugaucgcccaguacacaucugcccugcuggccggcacaaucacaagcggcuggacauuuggagcaggcgccgcucugcagauccccuuugcuaugcagauggccuaccgguucaacggcaucggagugacccagaaugugcuguacgagaaccagaagcugaucgccaaccaguucaacagcgccaucggcaagauccaggacagccugagcagcacagcaagcgcccugggaaagcugcaggacguggucaaccagaaugcccaggcacugaacacccuggucaagcagcuguccuccaacuucggcgccaucagcucugugcugaacgauauccugagcagacuggacccuccugaggccgaggugcagaucgacagacugaucacaggcagacugcagagccuccagacauacgugacccagcagcugaucagagccgccgagauuagagccucugccaaucuggccgccaccaagaugucugagugugugcugggccagagcaagagaguggacuuuugcggcaagggcuaccaccugaugagcuucccucagucugccccucacggcgugguguuucugcacgugacauaugugcccgcucaagagaagaauuucaccaccgcuccagccaucugccacgacggcaaagcccacuuuccuagagaaggcguguucguguccaacggcacccauugguucgugacacagcggaacuucuacgagccccagaucaucaccaccgacaacaccuucgugucuggcaacugcgacgucgugaucggcauugugaacaauaccguguacgacccucugcagcccgagcuggacagcuucaaagaggaacuggacaaguacuuuaagaaccacacaagccccgacguggaccugggcgauaucagcggaaucaaugccagcgucgugaacauccagaaagagaucgaccggcugaacgagguggccaagaaucugaacgagagccugaucgaccugcaagaacuggggaaguacgagcaguacaucaaguggcccugguacaucuggcugggcuuuaucgccggacugauugccaucgugauggucacaaucaugcuguguugcaugaccagcugcuguagcugccugaagggcuguuguagcuguggcagcugcugcaaguucgacgaggacgauucugagcccgugcugaagggcgugaaacugcacuacacaugaggacuagucccuguucccagagcccacuuuuuuuucuuuuuuugaaauaaaauagccugucuuucagaucucaaaggcucuuuucagagccaccaaaaaaaaaaaaaaaaaaaaaaaaaaaaaaaaaaaaaaaaaaaaaaaaaaaaaaaaaaaaaaaaaaaaaaaaaaaaaaaaaaaaaaaaaaaaaaaaaaaaa

SEQ ID NO: 23845 - RNA, 1459 nt, Artificial Sequence
  SARS-CoV-2/Wuhan/WIV05/2019__EPI_ISL_402128 spike protein mRNA gc (1-15,334-528) Ferritin construct
aggagacccgugacccggaaguuguacggcuacgcgacuuucccucccacaaacccucgcgcccuuccuuuccuacuugggcccggcagaaagcuuaccauguucguguuccugguccuccugccccuggugagcucccagugcaaccugugccccuucggcgagguguucaacgccacccgguucgccagcgucuacgccuggaaccgcaagcggaucuccaacugcguggcggacuacagcgugcuguacaacuccgccagcuucuccacguucaagugcuacggcgucagccccaccaagcucaacgaccugugcuucaccaacguguacgccgacuccuucgugauccgcggggacgagguccggcagaucgcccccggccagaccgggaagaucgccgacuacaacuacaagcugccggacgacuucacgggcugcgugaucgcguggaacagcaacaaccucgacuccaaggucgggggcaacuacaacuaccuguaccgccuguuccgcaagagcaaccucaagcccuucgagcgggacaucuccaccgagaucuaccaggccggcagcacccccugcaacgggguggagggcuucaacugcuacuucccccugcaguccuacggguuccagccgaccaacggcgugggguaccagcccuaccggguggucgugcugagcuucgagcuccugcacgcccccgccacggugugcggccccaagggcggggguggaagcggcggggguggaagugacaucaucaagcuccugaacgagcaggucaacaaggagaugcaguccagcaaccuguacauguccaugagcuccuggugcuacacccacagccucgacggcgccgggcuguuccuguucgaccacgccgcggaggaguacgagcacgccaagaagcucaucaucuuccugaacgagaacaacgugcccgugcagcugaccuccaucagcgccccggagcacaaguucgagggccucacgcagaucuuccagaaggccuacgagcacgagcagcacaucuccgagagcaucaacaacaucguggaccacgccaucaaguccaaggaccacgcgaccuucaacuuccugcagugguacgucgccgagcagcacgaggaggaggugcuguucaaggacauccucgacaagaucgagcugaucgggaacgagaaccacggccuguaccucgccgaccaguacgugaaggggaucgccaagagccgcaaguccugaggacuaguguccaccugucccuccugggcugcuggauugucucguuuuccugccaaauaaacaggaucagcgcuuuacagaucucaaaggcucuuuucagagccaccaaaaaaaaaaaaaaaaaaaaaaaaaaaaaaaaaaaaaaaaaaaaaaaaaaaaaaaaaaaaaaaaaaaaaaaaaaaaaaaaaaaaaaaaaaaaaaaaaaaaa

SEQ ID NO: 23846 - RNA, 1057 nt, Artificial Sequence
  SARS-CoV-2/Wuhan/WIV05/2019__EPI_ISL_402128 spike protein mRNA gc (334-528) Foldon construct
aggagacccgugacccggaaguuguacggcuacgcgacuuucccucccacaaacccucgcgcccuuccuuuccuacuugggcccggcagaaagcuuaccaugcccaugggcagccugcagccgcucgccacccuguaccugcucgggaugcugguggccuccguccuggcgaaccugugccccuucggcgagguguucaacgccacccgguucgccagcgucuacgccuggaaccgcaagcggaucuccaacugcguggcggacuacagcgugcuguacaacuccgccagcuucuccacguucaagugcuacggcgucagccccaccaagcucaacgaccugugcuucaccaacguguacgccgacuccuucgugauccgcggggacgagguccggcagaucgcccccggccagaccgggaagaucgccgacuacaacuacaagcugccggacgacuucacgggcugcgugaucgcguggaacagcaacaaccucgacuccaaggucgggggcaacuacaacuaccuguaccgccuguuccgcaagagcaaccucaagcccuucgagcgggacaucuccaccgagaucuaccaggccggcagcacccccugcaacgggguggagggcuucaacugcuacuucccccugcaguccuacggguuccagccgaccaacggcgugggguaccagcccuaccggguggucgugcugagcuucgagcuccugcacgcccccgccacggugugcggccccaagggcagcggcggguacauccccgaggccccgcgcgacggccaggccuacgugcggaaggacggcgaguggguccugcugagcaccuuccucugaggacuaguguccaccugucccuccugggcugcuggauugucucguuuuccugccaaauaaacaggaucagcgcuuuacagaucucaaaggcucuuuucagagccaccaaaaaaaaaaaaaaaaaaaaaaaaaaaaaaaaaaaaaaaaaaaaaaaaaaaaaaaaaaaaaaaaaaaaaaaaaaaaaaaaaaaaaaaaaaaaaaaaaaaaa

SEQ ID NO: 23847 - RNA, 1435 nt, Artificial Sequence
  SARS-CoV-2/Wuhan/WIV05/2019__EPI_ISL_402128 spike protein mRNA gc (1-15,334-528) LumSynth construct
aggagacccgugacccggaaguuguacggcuacgcgacuuucccucccacaaacccucgcgcccuuccuuuccuacuugggcccggcagaaagcuuaccauguucguguuccugguccuccugccccuggugagcucccagugcaaccugugccccuucggcgagguguucaacgccacccgguucgccagcgucuacgccuggaaccgcaagcggaucuccaacugcguggcggacuacagcgugcuguacaacuccgccagcuucuccacguucaagugcuacggcgucagccccaccaagcucaacgaccugugcuucaccaacguguacgccgacuccuucgugauccgcggggacgagguccggcagaucgcccccggccagaccgggaagaucgccgacuacaacuacaagcugccggacgacuucacgggcugcgugaucgcguggaacagcaacaaccucgacuccaaggucgggggcaacuacaacuaccuguaccgccuguuccgcaagagcaaccucaagcccuucgagcgggacaucuccaccgagaucuaccaggccggcagcacccccugcaacgggguggagggcuucaacugcuacuucccccugcaguccuacggguuccagccgaccaacggcgugggguaccagcccuaccggguggucgugcugagcuucgagcuccugcacgcccccgccacggugugcggccccaagggcggcggcggcuccggaggcggagguagcgggggacagaucuacgagggcaagcugaccgccgaggggcuccgcuucggcaucguggccagccgguucaaccacgcgcuggucgaccgccugguggagggggccaucgacgccaucgugcggcacggcgggcgcgaggaggacaucacccucguccgggugcccggcuccugggagaucccgguggccgccggcgagcuggcccgcaaggaggacaucgacgcggucaucgccaucggggugcugauccggggcgccacgccccacuucgacuacaucgccagcgagguguccaaggggcucgcggaccugagccuggagcuccgcaagcccaucaccuucggcgucaucaccgccgacacccuggagcaggccaucgagcgggccgggacgaagcacggcaacaagggcugggaggccgcgcuguccgccaucgagauggccaaccucuucaagagccugcgcugaggacuaguguccaccugucccuccugggcugcuggauugucucguuuuccugccaaauaaacaggaucagcgcuuuacagaucucaaaggcucuuuucagagccaccaaaaaaaaaaaaaaaaaaaaaaaaaaaaaaaaaaaaaaaaaaaaaaaaaaaaaaaaaaaaaaaaaaaaaaaaaaaaaaaaaaaaaaaaaaaaaaaaaaaaa

SEQ ID NO: 23848 - RNA, 1396 nt, Artificial Sequence
  SARS-CoV-2/Wuhan/WIV05/2019__EPI_ISL_402128 spike protein mRNA gc (334-528) LumSynth construct
aggagacccgugacccggaaguuguacggcuacgcgacuuucccucccacaaacccucgcgcccuuccuuuccuacuugggcccggcagaaagcuuaccaugcagaucuacgagggcaagcugaccgccgaggggcuccgcuucggcaucguggccagccgguucaaccacgcgcuggucgaccgccugguggagggggccaucgacgccaucgugcggcacggcgggcgcgaggaggacaucacccucguccgggugcccggcuccugggagaucccgguggccgccggcgagcuggcccgcaaggaggacaucgacgcggucaucgccaucggggugcugauccggggcgccacgccccacuucgacuacaucgccagcgagguguccaaggggcucgcggaccugagccuggagcuccgcaagcccaucaccuucggcgucaucaccgccgacacccuggagcaggccaucgagcgggccgggacgaagcacggcaacaagggcugggaggccgcgcuguccgccaucgagauggccaaccucuucaagagccugcgcggcgggggcgggagcggcgggggcggcuccgggggcgggaaccugugccccuucggcgagguguucaacgccacccgguucgccagcgucuacgccuggaaccgcaagcggaucuccaacugcguggcggacuacagcgugcuguacaacuccgccagcuucuccacguucaagugcuacggcgucagccccaccaagcucaacgaccugugcuucaccaacguguacgccgacuccuucgugauccgcggggacgagguccggcagaucgcccccggccagaccgggaagaucgccgacuacaacuacaagcugccggacgacuucacgggcugcgugaucgcguggaacagcaacaaccucgacuccaaggucgggggcaacuacaacuaccuguaccgccuguuccgcaagagcaaccucaagcccuucgagcgggacaucuccaccgagaucuaccaggccggcagcacccccugcaacgggguggagggcuucaacugcuacuucccccugcaguccuacggguuccagccgaccaacggcgugggguaccagcccuaccggguggucgugcugagcuucgagcuccugcacgcccccgccacggugugcggccccaagugaggacuaguguccaccugucccuccugggcugcuggauugucucguuuuccugccaaauaaacaggaucagcgcuuuacagaucucaaaggcucuuuucagagccaccaaaaaaaaaaaaaaaaaaaaaaaaaaaaaaaaaaaaaaaaaaaaaaaaaaaaaaaaaaaaaaaaaaaaaaaaaaaaaaaaaaaaaaaaaaaaaaaaaaaaa

SEQ ID NO: 23849 - RNA, 4129 nt, Artificial Sequence
  SARS-CoV-2/Wuhan/WIV05/2019__EPI_ISL_402128 spike protein mRNA gc (1-1273)
aggagacccgugacccggaaguuguacggcuacgcgacuuucccucccacaaacccucgcgcccuuccuuuccuacuugggcccggcagaaagcuuaccauguucguguuccugguccuccugccccuggugagcucccagugcgugaaccucaccacccgcacgcagcugccgcccgccuacaccaacagcuucacccggggcgucuacuaccccgacaagguguuccgcuccagcgugcugcacuccacccaggaccucuuccugcccuucuucagcaacgucacgugguuccacgccauccacguguccgggaccaacggcaccaagcgguucgacaacccggugcugcccuucaacgacggggucuacuucgcgagcaccgagaaguccaacaucauccgcggcuggaucuucgggacgacccucgacagcaagacccagucccugcugaucgugaacaacgccaccaacguggucaucaaggugugcgaguuccaguucugcaacgaccccuuccucggcguguacuaccacaagaacaacaagagcuggauggaguccgaguuccgggucuacagcuccgccaacaacugcacguucgaguacgugagccagcccuuccugauggaccuggagggcaagcaggggaacuucaagaaccuccgcgaguucguguucaagaacaucgacggcuacuucaagaucuacuccaagcacaccccgaucaaccugguccgggaccugccccagggguucagcgcccucgagccccugguggaccugcccaucggcaucaacaucacccgcuuccagacccuccuggcccugcaccgguccuaccucacgccgggggacagcagcuccggcuggaccgcgggcgccgccgccuacuacgugggguaccugcagccccgcaccuuccugcucaaguacaacgagaacggcaccaucacggacgcggucgacugcgcccuggacccccugagcgagaccaagugcacccucaaguccuucaccguggagaaggggaucuaccagacgagcaacuuccgggugcagcccaccgaguccaucguccgcuucccgaacaucaccaaccugugccccuucggcgagguguucaacgccacccgguucgccagcgucuacgccuggaaccgcaagcggaucuccaacugcguggcggacuacagcgugcuguacaacuccgccagcuucuccacguucaagugcuacggcgucagccccaccaagcucaacgaccugugcuucaccaacguguacgccgacuccuucgugauccgcggggacgagguccggcagaucgcccccggccagaccgggaagaucgccgacuacaacuacaagcugccggacgacuucacgggcugcgugaucgcguggaacagcaacaaccucgacuccaaggucgggggcaacuacaacuaccuguaccgccuguuccgcaagagcaaccucaagcccuucgagcgggacaucuccaccgagaucuaccaggccggcagcacccccugcaacgggguggagggcuucaacugcuacuucccccugcaguccuacggguuccagccgaccaacggcgugggguaccagcccuaccggguggucgugcugagcuucgagcuccugcacgcccccgccacggugugcggccccaagaaguccaccaaccuggucaagaacaagugcgugaacuucaacuucaacggccucaccgggaccggcgugcugaccgagagcaacaagaaguuccugccguuccagcaguucgggcgcgacaucgccgacacgaccgacgcgguccgcgacccccagacccuggagauccucgacaucacccccugcagcuucggcgggguguccgugaucacgccgggcaccaacaccagcaaccaggucgccgugcuguaccaggacgugaacugcaccgagguccccguggccauccacgccgaccagcugacgcccaccuggcggguguacuccaccggcagcaacgucuuccagacccgcgccgggugccucaucggcgcggagcacgugaacaacuccuacgagugcgacauccccaucggggccggcaucugcgccagcuaccagacgcagaccaacuccccgcggcgcgcccggagcguggcgucccagagcaucaucgccuacaccaugucccugggcgccgagaacagcgucgccuacuccaacaacagcaucgccauccccaccaacuucacgaucuccgugaccaccgagauccugcccgugagcaugaccaagacgagcgucgacugcaccauguacaucugcggggacuccaccgagugcagcaaccuccugcugcaguacggcuccuucugcacccagcucaaccgcgcgcugacggggaucgccguggagcaggacaagaacacccaggagguguucgcccaggucaagcagaucuacaagacgcccccgaucaaggacuucggcggguucaacuucagccagauccugcccgaccccuccaagcccagcaagcgguccuucaucgaggaccuccuguucaacaaggugacccuggccgacgccggcuucaucaagcaguacggcgacugccucggggacaucgcggcccgcgaccugaucugcgcccagaaguucaacggccugaccgugcucccgccccugcugaccgacgagaugaucgcccaguacaccagcgcccuccuggcggggaccaucacguccggcuggaccuucggggccggcgccgcccugcagauccccuucgcgaugcagauggccuaccgguucaacggcaucggggucacccagaacgugcucuacgagaaccagaagcugaucgccaaccaguucaacagcgccaucggcaagauccaggacucccugagcuccaccgccagcgcgcucgggaagcugcaggacguggucaaccagaacgcccaggcccugaacacgcucgugaagcagcuguccagcaacuucggcgccaucuccagcgugcugaacgacauccucucccgccuggacaaggucgaggccgaggugcagaucgaccggcugaucaccgggcgccuccagagccugcagaccuacgugacccagcagcugauccgggcggccgagauccgcgccagcgccaaccucgccgcgaccaagauguccgagugcguccugggccagagcaagcggguggacuucugcggcaagggguaccaccugauguccuucccccagagcgccccgcacggcguggucuuccuccacgugacguacguccccgcccaggagaagaacuucaccaccgcccccgcgaucugccacgacgggaaggcccacuucccccgcgagggcguguucguguccaacgggacccacugguucgucacgcagcggaacuucuacgagccgcagaucaucaccaccgacaacaccuucgugagcggcaacugcgacguggucaucggcaucgugaacaacacgguguacgacccccugcagcccgagcuggacuccuucaaggaggagcucgacaaguacuucaagaaccacaccagccccgacgucgaccugggggacaucuccggcaucaacgccagcguggugaacauccagaaggagaucgaccgccugaacgaggucgccaagaaccucaacgagucccugaucgaccugcaggagcucgggaaguacgagcaguacaucaaguggccgugguacaucuggcugggcuucaucgccggccugaucgcgaucgugauggugaccaucaugcucugcugcaugaccagcugcugcuccugccugaaggggugcugcagcugcggcuccugcugcaaguucgacgaggacgacagcgagcccguccugaagggggugaagcuccacuacacgugaggacuaguguccaccugucccuccugggcugcuggauugucucguuuuccugccaaauaaacaggaucagcgcuuuacagaucucaaaggcucuuuucagagccaccaaaaaaaaaaaaaaaaaaaaaaaaaaaaaaaaaaaaaaaaaaaaaaaaaaaaaaaaaaaaaaaaaaaaaaaaaaaaaaaaaaaaaaaaaaaaaaaaaaaaa

SEQ ID NO: 23850 - RNA, 4129 nt, Artificial Sequence
  SARS-CoV-2/Wuhan/WIV05/2019__EPI_ISL_402128 spike protein mRNA gc (1-1273)(D614G)
aggagacccgugacccggaaguuguacggcuacgcgacuuucccucccacaaacccucgcgcccuuccuuuccuacuugggcccggcagaaagcuuaccauguucguguuccugguccuccugccccuggugagcucccagugcgugaaccucaccacccgcacgcagcugccgcccgccuacaccaacagcuucacccggggcgucuacuaccccgacaagguguuccgcuccagcgugcugcacuccacccaggaccucuuccugcccuucuucagcaacgucacgugguuccacgccauccacguguccgggaccaacggcaccaagcgguucgacaacccggugcugcccuucaacgacggggucuacuucgcgagcaccgagaaguccaacaucauccgcggcuggaucuucgggacgacccucgacagcaagacccagucccugcugaucgugaacaacgccaccaacguggucaucaaggugugcgaguuccaguucugcaacgaccccuuccucggcguguacuaccacaagaacaacaagagcuggauggaguccgaguuccgggucuacagcuccgccaacaacugcacguucgaguacgugagccagcccuuccugauggaccuggagggcaagcaggggaacuucaagaaccuccgcgaguucguguucaagaacaucgacggcuacuucaagaucuacuccaagcacaccccgaucaaccugguccgggaccugccccagggguucagcgcccucgagccccugguggaccugcccaucggcaucaacaucacccgcuuccagacccuccuggcccugcaccgguccuaccucacgccgggggacagcagcuccggcuggaccgcgggcgccgccgccuacuacgugggguaccugcagccccgcaccuuccugcucaaguacaacgagaacggcaccaucacggacgcggucgacugcgcccuggacccccugagcgagaccaagugcacccucaaguccuucaccguggagaaggggaucuaccagacgagcaacuuccgggugcagcccaccgaguccaucguccgcuucccgaacaucaccaaccugugccccuucggcgagguguucaacgccacccgguucgccagcgucuacgccuggaaccgcaagcggaucuccaacugcguggcggacuacagcgugcuguacaacuccgccagcuucuccacguucaagugcuacggcgucagccccaccaagcucaacgaccugugcuucaccaacguguacgccgacuccuucgugauccgcggggacgagguccggcagaucgcccccggccagaccgggaagaucgccgacuacaacuacaagcugccggacgacuucacgggcugcgugaucgcguggaacagcaacaaccucgacuccaaggucgggggcaacuacaacuaccuguaccgccuguuccgcaagagcaaccucaagcccuucgagcgggacaucuccaccgagaucuaccaggccggcagcacccccugcaacgggguggagggcuucaacugcuacuucccccugcaguccuacggguuccagccgaccaacggcgugggguaccagcccuaccggguggucgugcugagcuucgagcuccugcacgcccccgccacggugugcggccccaagaaguccaccaaccuggucaagaacaagugcgugaacuucaacuucaacggccucaccgggaccggcgugcugaccgagagcaacaagaaguuccugccguuccagcaguucgggcgcgacaucgccgacacgaccgacgcgguccgcgacccccagacccuggagauccucgacaucacccccugcagcuucggcgggguguccgugaucacgccgggcaccaacaccagcaaccaggucgccgugcuguaccagggcgugaacugcaccgagguccccguggccauccacgccgaccagcugacgcccaccuggcggguguacuccaccggcagcaacgucuuccagacccgcgccgggugccucaucggcgcggagcacgugaacaacuccuacgagugcgacauccccaucggggccggcaucugcgccagcuaccagacgcagaccaacuccccgcggcgcgcccggagcguggcgucccagagcaucaucgccuacaccaugucccugggcgccgagaacagcgucgccuacuccaacaacagcaucgccauccccaccaacuucacgaucuccgugaccaccgagauccugcccgugagcaugaccaagacgagcgucgacugcaccauguacaucugcggggacuccaccgagugcagcaaccuccugcugcaguacggcuccuucugcacccagcucaaccgcgcgcugacggggaucgccguggagcaggacaagaacacccaggagguguucgcccaggucaagcagaucuacaagacgcccccgaucaaggacuucggcggguucaacuucagccagauccugcccgaccccuccaagcccagcaagcgguccuucaucgaggaccuccuguucaacaaggugacccuggccgacgccggcuucaucaagcaguacggcgacugccucggggacaucgcggcccgcgaccugaucugcgcccagaaguucaacggccugaccgugcucccgccccugcugaccgacgagaugaucgcccaguacaccagcgcccuccuggcggggaccaucacguccggcuggaccuucggggccggcgccgcccugcagauccccuucgcgaugcagauggccuaccgguucaacggcaucggggucacccagaacgugcucuacgagaaccagaagcugaucgccaaccaguucaacagcgccaucggcaagauccaggacucccugagcuccaccgccagcgcgcucgggaagcugcaggacguggucaaccagaacgcccaggcccugaacacgcucgugaagcagcuguccagcaacuucggcgccaucuccagcgugcugaacgacauccucucccgccuggacaaggucgaggccgaggugcagaucgaccggcugaucaccgggcgccuccagagccugcagaccuacgugacccagcagcugauccgggcggccgagauccgcgccagcgccaaccucgccgcgaccaagauguccgagugcguccugggccagagcaagcggguggacuucugcggcaagggguaccaccugauguccuucccccagagcgccccgcacggcguggucuuccuccacgugacguacguccccgcccaggagaagaacuucaccaccgcccccgcgaucugccacgacgggaaggcccacuucccccgcgagggcguguucguguccaacgggacccacugguucgucacgcagcggaacuucuacgagccgcagaucaucaccaccgacaacaccuucgugagcggcaacugcgacguggucaucggcaucgugaacaacacgguguacgacccccugcagcccgagcuggacuccuucaaggaggagcucgacaaguacuucaagaaccacaccagccccgacgucgaccugggggacaucuccggcaucaacgccagcguggugaacauccagaaggagaucgaccgccugaacgaggucgccaagaaccucaacgagucccugaucgaccugcaggagcucgggaaguacgagcaguacaucaaguggccgugguacaucuggcugggcuucaucgccggccugaucgcgaucgugauggugaccaucaugcucugcugcaugaccagcugcugcuccugccugaaggggugcugcagcugcggcuccugcugcaaguucgacgaggacgacagcgagcccguccugaagggggugaagcuccacuacacgugaggacuaguguccaccugucccuccugggcugcuggauugucucguuuuccugccaaauaaacaggaucagcgcuuuacagaucucaaaggcucuuuucagagccaccaaaaaaaaaaaaaaaaaaaaaaaaaaaaaaaaaaaaaaaaaaaaaaaaaaaaaaaaaaaaaaaaaaaaaaaaaaaaaaaaaaaaaaaaaaaaaaaaaaaaa

SEQ ID NO: 23851 - RNA, 4129 nt, Artificial Sequence
  SARS-CoV-2/Wuhan/WIV05/2019__EPI_ISL_402128 spike protein mRNA gc (1-1273)(A222V_D614G)
aggagacccgugacccggaaguuguacggcuacgcgacuuucccucccacaaacccucgcgcccuuccuuuccuacuugggcccggcagaaagcuuaccauguucguguuccugguccuccugccccuggugagcucccagugcgugaaccucaccacccgcacgcagcugccgcccgccuacaccaacagcuucacccggggcgucuacuaccccgacaagguguuccgcuccagcgugcugcacuccacccaggaccucuuccugcccuucuucagcaacgucacgugguuccacgccauccacguguccgggaccaacggcaccaagcgguucgacaacccggugcugcccuucaacgacggggucuacuucgcgagcaccgagaaguccaacaucauccgcggcuggaucuucgggacgacccucgacagcaagacccagucccugcugaucgugaacaacgccaccaacguggucaucaaggugugcgaguuccaguucugcaacgaccccuuccucggcguguacuaccacaagaacaacaagagcuggauggaguccgaguuccgggucuacagcuccgccaacaacugcacguucgaguacgugagccagcccuuccugauggaccuggagggcaagcaggggaacuucaagaaccuccgcgaguucguguucaagaacaucgacggcuacuucaagaucuacuccaagcacaccccgaucaaccugguccgggaccugccccagggguucagcguccucgagccccugguggaccugcccaucggcaucaacaucacccgcuuccagacccuccuggcccugcaccgguccuaccucacgccgggggacagcagcuccggcuggaccgcgggcgccgccgccuacuacgugggguaccugcagccccgcaccuuccugcucaaguacaacgagaacggcaccaucacggacgcggucgacugcgcccuggacccccugagcgagaccaagugcacccucaaguccuucaccguggagaaggggaucuaccagacgagcaacuuccgggugcagcccaccgaguccaucguccgcuucccgaacaucaccaaccugugccccuucggcgagguguucaacgccacccgguucgccagcgucuacgccuggaaccgcaagcggaucuccaacugcguggcggacuacagcgugcuguacaacuccgccagcuucuccacguucaagugcuacggcgucagccccaccaagcucaacgaccugugcuucaccaacguguacgccgacuccuucgugauccgcggggacgagguccggcagaucgcccccggccagaccgggaagaucgccgacuacaacuacaagcugccggacgacuucacgggcugcgugaucgcguggaacagcaacaaccucgacuccaaggucgggggcaacuacaacuaccuguaccgccuguuccgcaagagcaaccucaagcccuucgagcgggacaucuccaccgagaucuaccaggccggcagcacccccugcaacgggguggagggcuucaacugcuacuucccccugcaguccuacggguuccagccgaccaacggcgugggguaccagcccuaccggguggucgugcugagcuucgagcuccugcacgcccccgccacggugugcggccccaagaaguccaccaaccuggucaagaacaagugcgugaacuucaacuucaacggccucaccgggaccggcgugcugaccgagagcaacaagaaguuccugccguuccagcaguucgggcgcgacaucgccgacacgaccgacgcgguccgcgacccccagacccuggagauccucgacaucacccccugcagcuucggcgggguguccgugaucacgccgggcaccaacaccagcaaccaggucgccgugcuguaccagggcgugaacugcaccgagguccccguggccauccacgccgaccagcugacgcccaccuggcggguguacuccaccggcagcaacgucuuccagacccgcgccgggugccucaucggcgcggagcacgugaacaacuccuacgagugcgacauccccaucggggccggcaucugcgccagcuaccagacgcagaccaacuccccgcggcgcgcccggagcguggcgucccagagcaucaucgccuacaccaugucccugggcgccgagaacagcgucgccuacuccaacaacagcaucgccauccccaccaacuucacgaucuccgugaccaccgagauccugcccgugagcaugaccaagacgagcgucgacugcaccauguacaucugcggggacuccaccgagugcagcaaccuccugcugcaguacggcuccuucugcacccagcucaaccgcgcgcugacggggaucgccguggagcaggacaagaacacccaggagguguucgcccaggucaagcagaucuacaagacgcccccgaucaaggacuucggcggguucaacuucagccagauccugcccgaccccuccaagcccagcaagcgguccuucaucgaggaccuccuguucaacaaggugacccuggccgacgccggcuucaucaagcaguacggcgacugccucggggacaucgcggcccgcgaccugaucugcgcccagaaguucaacggccugaccgugcucccgccccugcugaccgacgagaugaucgcccaguacaccagcgcccuccuggcggggaccaucacguccggcuggaccuucggggccggcgccgcccugcagauccccuucgcgaugcagauggccuaccgguucaacggcaucggggucacccagaacgugcucuacgagaaccagaagcugaucgccaaccaguucaacagcgccaucggcaagauccaggacucccugagcuccaccgccagcgcgcucgggaagcugcaggacguggucaaccagaacgcccaggcccugaacacgcucgugaagcagcuguccagcaacuucggcgccaucuccagcgugcugaacgacauccucucccgccuggacaaggucgaggccgaggugcagaucgaccggcugaucaccgggcgccuccagagccugcagaccuacgugacccagcagcugauccgggcggccgagauccgcgccagcgccaaccucgccgcgaccaagauguccgagugcguccugggccagagcaagcggguggacuucugcggcaagggguaccaccugauguccuucccccagagcgccccgcacggcguggucuuccuccacgugacguacguccccgcccaggagaagaacuucaccaccgcccccgcgaucugccacgacgggaaggcccacuucccccgcgagggcguguucguguccaacgggacccacugguucgucacgcagcggaacuucuacgagccgcagaucaucaccaccgacaacaccuucgugagcggcaacugcgacguggucaucggcaucgugaacaacacgguguacgacccccugcagcccgagcuggacuccuucaaggaggagcucgacaaguacuucaagaaccacaccagccccgacgucgaccugggggacaucuccggcaucaacgccagcguggugaacauccagaaggagaucgaccgccugaacgaggucgccaagaaccucaacgagucccugaucgaccugcaggagcucgggaaguacgagcaguacaucaaguggccgugguacaucuggcugggcuucaucgccggccugaucgcgaucgugauggugaccaucaugcucugcugcaugaccagcugcugcuccugccugaaggggugcugcagcugcggcuccugcugcaaguucgacgaggacgacagcgagcccguccugaagggggugaagcuccacuacacgugaggacuaguguccaccugucccuccugggcugcuggauugucucguuuuccugccaaauaaacaggaucagcgcuuuacagaucucaaaggcucuuuucagagccaccaaaaaaaaaaaaaaaaaaaaaaaaaaaaaaaaaaaaaaaaaaaaaaaaaaaaaaaaaaaaaaaaaaaaaaaaaaaaaaaaaaaaaaaaaaaaaaaaaaaaa

SEQ ID NO: 23852 - RNA, 4129 nt, Artificial Sequence
  SARS-CoV-2/Wuhan/WIV05/2019__EPI_ISL_402128 spike protein mRNA gc (1-1273)(N439K_D614G)
aggagacccgugacccggaaguuguacggcuacgcgacuuucccucccacaaacccucgcgcccuuccuuuccuacuugggcccggcagaaagcuuaccauguucguguuccugguccuccugccccuggugagcucccagugcgugaaccucaccacccgcacgcagcugccgcccgccuacaccaacagcuucacccggggcgucuacuaccccgacaagguguuccgcuccagcgugcugcacuccacccaggaccucuuccugcccuucuucagcaacgucacgugguuccacgccauccacguguccgggaccaacggcaccaagcgguucgacaacccggugcugcccuucaacgacggggucuacuucgcgagcaccgagaaguccaacaucauccgcggcuggaucuucgggacgacccucgacagcaagacccagucccugcugaucgugaacaacgccaccaacguggucaucaaggugugcgaguuccaguucugcaacgaccccuuccucggcguguacuaccacaagaacaacaagagcuggauggaguccgaguuccgggucuacagcuccgccaacaacugcacguucgaguacgugagccagcccuuccugauggaccuggagggcaagcaggggaacuucaagaaccuccgcgaguucguguucaagaacaucgacggcuacuucaagaucuacuccaagcacaccccgaucaaccugguccgggaccugccccagggguucagcgcccucgagccccugguggaccugcccaucggcaucaacaucacccgcuuccagacccuccuggcccugcaccgguccuaccucacgccgggggacagcagcuccggcuggaccgcgggcgccgccgccuacuacgugggguaccugcagccccgcaccuuccugcucaaguacaacgagaacggcaccaucacggacgcggucgacugcgcccuggacccccugagcgagaccaagugcacccucaaguccuucaccguggagaaggggaucuaccagacgagcaacuuccgggugcagcccaccgaguccaucguccgcuucccgaacaucaccaaccugugccccuucggcgagguguucaacgccacccgguucgccagcgucuacgccuggaaccgcaagcggaucuccaacugcguggcggacuacagcgugcuguacaacuccgccagcuucuccacguucaagugcuacggcgucagccccaccaagcucaacgaccugugcuucaccaacguguacgccgacuccuucgugauccgcggggacgagguccggcagaucgcccccggccagaccgggaagaucgccgacuacaacuacaagcugccggacgacuucacgggcugcgugaucgcguggaacagcaagaaccucgacuccaaggucgggggcaacuacaacuaccuguaccgccuguuccgcaagagcaaccucaagcccuucgagcgggacaucuccaccgagaucuaccaggccggcagcacccccugcaacgggguggagggcuucaacugcuacuucccccugcaguccuacggguuccagccgaccaacggcgugggguaccagcccuaccggguggucgugcugagcuucgagcuccugcacgcccccgccacggugugcggccccaagaaguccaccaaccuggucaagaacaagugcgugaacuucaacuucaacggccucaccgggaccggcgugcugaccgagagcaacaagaaguuccugccguuccagcaguucgggcgcgacaucgccgacacgaccgacgcgguccgcgacccccagacccuggagauccucgacaucacccccugcagcuucggcgggguguccgugaucacgccgggcaccaacaccagcaaccaggucgccgugcuguaccagggcgugaacugcaccgagguccccguggccauccacgccgaccagcugacgcccaccuggcggguguacuccaccggcagcaacgucuuccagacccgcgccgggugccucaucggcgcggagcacgugaacaacuccuacgagugcgacauccccaucggggccggcaucugcgccagcuaccagacgcagaccaacuccccgcggcgcgcccggagcguggcgucccagagcaucaucgccuacaccaugucccugggcgccgagaacagcgucgccuacuccaacaacagcaucgccauccccaccaacuucacgaucuccgugaccaccgagauccugcccgugagcaugaccaagacgagcgucgacugcaccauguacaucugcggggacuccaccgagugcagcaaccuccugcugcaguacggcuccuucugcacccagcucaaccgcgcgcugacggggaucgccguggagcaggacaagaacacccaggagguguucgcccaggucaagcagaucuacaagacgcccccgaucaaggacuucggcggguucaacuucagccagauccugcccgaccccuccaagcccagcaagcgguccuucaucgaggaccuccuguucaacaaggugacccuggccgacgccggcuucaucaagcaguacggcgacugccucggggacaucgcggcccgcgaccugaucugcgcccagaaguucaacggccugaccgugcucccgccccugcugaccgacgagaugaucgcccaguacaccagcgcccuccuggcggggaccaucacguccggcuggaccuucggggccggcgccgcccugcagauccccuucgcgaugcagauggccuaccgguucaacggcaucggggucacccagaacgugcucuacgagaaccagaagcugaucgccaaccaguucaacagcgccaucggcaagauccaggacucccugagcuccaccgccagcgcgcucgggaagcugcaggacguggucaaccagaacgcccaggcccugaacacgcucgugaagcagcuguccagcaacuucggcgccaucuccagcgugcugaacgacauccucucccgccuggacaaggucgaggccgaggugcagaucgaccggcugaucaccgggcgccuccagagccugcagaccuacgugacccagcagcugauccgggcggccgagauccgcgccagcgccaaccucgccgcgaccaagauguccgagugcguccugggccagagcaagcggguggacuucugcggcaagggguaccaccugauguccuucccccagagcgccccgcacggcguggucuuccuccacgugacguacguccccgcccaggagaagaacuucaccaccgcccccgcgaucugccacgacgggaaggcccacuucccccgcgagggcguguucguguccaacgggacccacugguucgucacgcagcggaacuucuacgagccgcagaucaucaccaccgacaacaccuucgugagcggcaacugcgacguggucaucggcaucgugaacaacacgguguacgacccccugcagcccgagcuggacuccuucaaggaggagcucgacaaguacuucaagaaccacaccagccccgacgucgaccugggggacaucuccggcaucaacgccagcguggugaacauccagaaggagaucgaccgccugaacgaggucgccaagaaccucaacgagucccugaucgaccugcaggagcucgggaaguacgagcaguacaucaaguggccgugguacaucuggcugggcuucaucgccggccugaucgcgaucgugauggugaccaucaugcucugcugcaugaccagcugcugcuccugccugaaggggugcugcagcugcggcuccugcugcaaguucgacgaggacgacagcgagcccguccugaagggggugaagcuccacuacacgugaggacuaguguccaccugucccuccugggcugcuggauugucucguuuuccugccaaauaaacaggaucagcgcuuuacagaucucaaaggcucuuuucagagccaccaaaaaaaaaaaaaaaaaaaaaaaaaaaaaaaaaaaaaaaaaaaaaaaaaaaaaaaaaaaaaaaaaaaaaaaaaaaaaaaaaaaaaaaaaaaaaaaaaaaaa

SEQ ID NO: 23853 - RNA, 4129 nt, Artificial Sequence
  SARS-CoV-2/Wuhan/WIV05/2019__EPI_ISL_402128 spike protein mRNA gc (1-1273)(S477N_D614G)
aggagacccgugacccggaaguuguacggcuacgcgacuuucccucccacaaacccucgcgcccuuccuuuccuacuugggcccggcagaaagcuuaccauguucguguuccugguccuccugccccuggugagcucccagugcgugaaccucaccacccgcacgcagcugccgcccgccuacaccaacagcuucacccggggcgucuacuaccccgacaagguguuccgcuccagcgugcugcacuccacccaggaccucuuccugcccuucuucagcaacgucacgugguuccacgccauccacguguccgggaccaacggcaccaagcgguucgacaacccggugcugcccuucaacgacggggucuacuucgcgagcaccgagaaguccaacaucauccgcggcuggaucuucgggacgacccucgacagcaagacccagucccugcugaucgugaacaacgccaccaacguggucaucaaggugugcgaguuccaguucugcaacgaccccuuccucggcguguacuaccacaagaacaacaagagcuggauggaguccgaguuccgggucuacagcuccgccaacaacugcacguucgaguacgugagccagcccuuccugauggaccuggagggcaagcaggggaacuucaagaaccuccgcgaguucguguucaagaacaucgacggcuacuucaagaucuacuccaagcacaccccgaucaaccugguccgggaccugccccagggguucagcgcccucgagccccugguggaccugcccaucggcaucaacaucacccgcuuccagacccuccuggcccugcaccgguccuaccucacgccgggggacagcagcuccggcuggaccgcgggcgccgccgccuacuacgugggguaccugcagccccgcaccuuccugcucaaguacaacgagaacggcaccaucacggacgcggucgacugcgcccuggacccccugagcgagaccaagugcacccucaaguccuucaccguggagaaggggaucuaccagacgagcaacuuccgggugcagcccaccgaguccaucguccgcuucccgaacaucaccaaccugugccccuucggcgagguguucaacgccacccgguucgccagcgucuacgccuggaaccgcaagcggaucuccaacugcguggcggacuacagcgugcuguacaacuccgccagcuucuccacguucaagugcuacggcgucagccccaccaagcucaacgaccugugcuucaccaacguguacgccgacuccuucgugauccgcggggacgagguccggcagaucgcccccggccagaccgggaagaucgccgacuacaacuacaagcugccggacgacuucacgggcugcgugaucgcguggaacagcaacaaccucgacuccaaggucgggggcaacuacaacuaccuguaccgccuguuccgcaagagcaaccucaagcccuucgagcgggacaucuccaccgagaucuaccaggccggcaacacccccugcaacgggguggagggcuucaacugcuacuucccccugcaguccuacggguuccagccgaccaacggcgugggguaccagcccuaccggguggucgugcugagcuucgagcuccugcacgcccccgccacggugugcggccccaagaaguccaccaaccuggucaagaacaagugcgugaacuucaacuucaacggccucaccgggaccggcgugcugaccgagagcaacaagaaguuccugccguuccagcaguucgggcgcgacaucgccgacacgaccgacgcgguccgcgacccccagacccuggagauccucgacaucacccccugcagcuucggcgggguguccgugaucacgccgggcaccaacaccagcaaccaggucgccgugcuguaccagggcgugaacugcaccgagguccccguggccauccacgccgaccagcugacgcccaccuggcggguguacuccaccggcagcaacgucuuccagacccgcgccgggugccucaucggcgcggagcacgugaacaacuccuacgagugcgacauccccaucggggccggcaucugcgccagcuaccagacgcagaccaacuccccgcggcgcgcccggagcguggcgucccagagcaucaucgccuacaccaugucccugggcgccgagaacagcgucgccuacuccaacaacagcaucgccauccccaccaacuucacgaucuccgugaccaccgagauccugcccgugagcaugaccaagacgagcgucgacugcaccauguacaucugcggggacuccaccgagugcagcaaccuccugcugcaguacggcuccuucugcacccagcucaaccgcgcgcugacggggaucgccguggagcaggacaagaacacccaggagguguucgcccaggucaagcagaucuacaagacgcccccgaucaaggacuucggcggguucaacuucagccagauccugcccgaccccuccaagcccagcaagcgguccuucaucgaggaccuccuguucaacaaggugacccuggccgacgccggcuucaucaagcaguacggcgacugccucggggacaucgcggcccgcgaccugaucugcgcccagaaguucaacggccugaccgugcucccgccccugcugaccgacgagaugaucgcccaguacaccagcgcccuccuggcggggaccaucacguccggcuggaccuucggggccggcgccgcccugcagauccccuucgcgaugcagauggccuaccgguucaacggcaucggggucacccagaacgugcucuacgagaaccagaagcugaucgccaaccaguucaacagcgccaucggcaagauccaggacucccugagcuccaccgccagcgcgcucgggaagcugcaggacguggucaaccagaacgcccaggcccugaacacgcucgugaagcagcuguccagcaacuucggcgccaucuccagcgugcugaacgacauccucucccgccuggacaaggucgaggccgaggugcagaucgaccggcugaucaccgggcgccuccagagccugcagaccuacgugacccagcagcugauccgggcggccgagauccgcgccagcgccaaccucgccgcgaccaagauguccgagugcguccugggccagagcaagcggguggacuucugcggcaagggguaccaccugauguccuucccccagagcgccccgcacggcguggucuuccuccacgugacguacguccccgcccaggagaagaacuucaccaccgcccccgcgaucugccacgacgggaaggcccacuucccccgcgagggcguguucguguccaacgggacccacugguucgucacgcagcggaacuucuacgagccgcagaucaucaccaccgacaacaccuucgugagcggcaacugcgacguggucaucggcaucgugaacaacacgguguacgacccccugcagcccgagcuggacuccuucaaggaggagcucgacaaguacuucaagaaccacaccagccccgacgucgaccugggggacaucuccggcaucaacgccagcguggugaacauccagaaggagaucgaccgccugaacgaggucgccaagaaccucaacgagucccugaucgaccugcaggagcucgggaaguacgagcaguacaucaaguggccgugguacaucuggcugggcuucaucgccggccugaucgcgaucgugauggugaccaucaugcucugcugcaugaccagcugcugcuccugccugaaggggugcugcagcugcggcuccugcugcaaguucgacgaggacgacagcgagcccguccugaagggggugaagcuccacuacacgugaggacuaguguccaccugucccuccugggcugcuggauugucucguuuuccugccaaauaaacaggaucagcgcuuuacagaucucaaaggcucuuuucagagccaccaaaaaaaaaaaaaaaaaaaaaaaaaaaaaaaaaaaaaaaaaaaaaaaaaaaaaaaaaaaaaaaaaaaaaaaaaaaaaaaaaaaaaaaaaaaaaaaaaaaaa

SEQ ID NO: 23854 - RNA, 4129 nt, Artificial Sequence
  SARS-CoV-2/Wuhan/WIV05/2019__EPI_ISL_402128 spike protein mRNA gc (1-1273)(N501Y_D614G)
aggagacccgugacccggaaguuguacggcuacgcgacuuucccucccacaaacccucgcgcccuuccuuuccuacuugggcccggcagaaagcuuaccauguucguguuccugguccuccugccccuggugagcucccagugcgugaaccucaccacccgcacgcagcugccgcccgccuacaccaacagcuucacccggggcgucuacuaccccgacaagguguuccgcuccagcgugcugcacuccacccaggaccucuuccugcccuucuucagcaacgucacgugguuccacgccauccacguguccgggaccaacggcaccaagcgguucgacaacccggugcugcccuucaacgacggggucuacuucgcgagcaccgagaaguccaacaucauccgcggcuggaucuucgggacgacccucgacagcaagacccagucccugcugaucgugaacaacgccaccaacguggucaucaaggugugcgaguuccaguucugcaacgaccccuuccucggcguguacuaccacaagaacaacaagagcuggauggaguccgaguuccgggucuacagcuccgccaacaacugcacguucgaguacgugagccagcccuuccugauggaccuggagggcaagcaggggaacuucaagaaccuccgcgaguucguguucaagaacaucgacggcuacuucaagaucuacuccaagcacaccccgaucaaccugguccgggaccugccccagggguucagcgcccucgagccccugguggaccugcccaucggcaucaacaucacccgcuuccagacccuccuggcccugcaccgguccuaccucacgccgggggacagcagcuccggcuggaccgcgggcgccgccgccuacuacgugggguaccugcagccccgcaccuuccugcucaaguacaacgagaacggcaccaucacggacgcggucgacugcgcccuggacccccugagcgagaccaagugcacccucaaguccuucaccguggagaaggggaucuaccagacgagcaacuuccgggugcagcccaccgaguccaucguccgcuucccgaacaucaccaaccugugccccuucggcgagguguucaacgccacccgguucgccagcgucuacgccuggaaccgcaagcggaucuccaacugcguggcggacuacagcgugcuguacaacuccgccagcuucuccacguucaagugcuacggcgucagccccaccaagcucaacgaccugugcuucaccaacguguacgccgacuccuucgugauccgcggggacgagguccggcagaucgcccccggccagaccgggaagaucgccgacuacaacuacaagcugccggacgacuucacgggcugcgugaucgcguggaacagcaacaaccucgacuccaaggucgggggcaacuacaacuaccuguaccgccuguuccgcaagagcaaccucaagcccuucgagcgggacaucuccaccgagaucuaccaggccggcagcacccccugcaacgggguggagggcuucaacugcuacuucccccugcaguccuacggguuccagccgaccuacggcgugggguaccagcccuaccggguggucgugcugagcuucgagcuccugcacgcccccgccacggugugcggccccaagaaguccaccaaccuggucaagaacaagugcgugaacuucaacuucaacggccucaccgggaccggcgugcugaccgagagcaacaagaaguuccugccguuccagcaguucgggcgcgacaucgccgacacgaccgacgcgguccgcgacccccagacccuggagauccucgacaucacccccugcagcuucggcgggguguccgugaucacgccgggcaccaacaccagcaaccaggucgccgugcuguaccagggcgugaacugcaccgagguccccguggccauccacgccgaccagcugacgcccaccuggcggguguacuccaccggcagcaacgucuuccagacccgcgccgggugccucaucggcgcggagcacgugaacaacuccuacgagugcgacauccccaucggggccggcaucugcgccagcuaccagacgcagaccaacuccccgcggcgcgcccggagcguggcgucccagagcaucaucgccuacaccaugucccugggcgccgagaacagcgucgccuacuccaacaacagcaucgccauccccaccaacuucacgaucuccgugaccaccgagauccugcccgugagcaugaccaagacgagcgucgacugcaccauguacaucugcggggacuccaccgagugcagcaaccuccugcugcaguacggcuccuucugcacccagcucaaccgcgcgcugacggggaucgccguggagcaggacaagaacacccaggagguguucgcccaggucaagcagaucuacaagacgcccccgaucaaggacuucggcggguucaacuucagccagauccugcccgaccccuccaagcccagcaagcgguccuucaucgaggaccuccuguucaacaaggugacccuggccgacgccggcuucaucaagcaguacggcgacugccucggggacaucgcggcccgcgaccugaucugcgcccagaaguucaacggccugaccgugcucccgccccugcugaccgacgagaugaucgcccaguacaccagcgcccuccuggcggggaccaucacguccggcuggaccuucggggccggcgccgcccugcagauccccuucgcgaugcagauggccuaccgguucaacggcaucggggucacccagaacgugcucuacgagaaccagaagcugaucgccaaccaguucaacagcgccaucggcaagauccaggacucccugagcuccaccgccagcgcgcucgggaagcugcaggacguggucaaccagaacgcccaggcccugaacacgcucgugaagcagcuguccagcaacuucggcgccaucuccagcgugcugaacgacauccucucccgccuggacaaggucgaggccgaggugcagaucgaccggcugaucaccgggcgccuccagagccugcagaccuacgugacccagcagcugauccgggcggccgagauccgcgccagcgccaaccucgccgcgaccaagauguccgagugcguccugggccagagcaagcggguggacuucugcggcaagggguaccaccugauguccuucccccagagcgccccgcacggcguggucuuccuccacgugacguacguccccgcccaggagaagaacuucaccaccgcccccgcgaucugccacgacgggaaggcccacuucccccgcgagggcguguucguguccaacgggacccacugguucgucacgcagcggaacuucuacgagccgcagaucaucaccaccgacaacaccuucgugagcggcaacugcgacguggucaucggcaucgugaacaacacgguguacgacccccugcagcccgagcuggacuccuucaaggaggagcucgacaaguacuucaagaaccacaccagccccgacgucgaccugggggacaucuccggcaucaacgccagcguggugaacauccagaaggagaucgaccgccugaacgaggucgccaagaaccucaacgagucccugaucgaccugcaggagcucgggaaguacgagcaguacaucaaguggccgugguacaucuggcugggcuucaucgccggccugaucgcgaucgugauggugaccaucaugcucugcugcaugaccagcugcugcuccugccugaaggggugcugcagcugcggcuccugcugcaaguucgacgaggacgacagcgagcccguccugaagggggugaagcuccacuacacgugaggacuaguguccaccugucccuccugggcugcuggauugucucguuuuccugccaaauaaacaggaucagcgcuuuacagaucucaaaggcucuuuucagagccaccaaaaaaaaaaaaaaaaaaaaaaaaaaaaaaaaaaaaaaaaaaaaaaaaaaaaaaaaaaaaaaaaaaaaaaaaaaaaaaaaaaaaaaaaaaaaaaaaaaaaa

SEQ ID NO: 23855 - RNA, 4123 nt, Artificial Sequence
  SARS-CoV-2/Wuhan/WIV05/2019__EPI_ISL_402128 spike protein mRNA gc (1-1273)(H69del_V70del_D614G)
aggagacccgugacccggaaguuguacggcuacgcgacuuucccucccacaaacccucgcgcccuuccuuuccuacuugggcccggcagaaagcuuaccauguucguguuccugguccuccugccccuggugagcucccagugcgugaaccucaccacccgcacgcagcugccgcccgccuacaccaacagcuucacccggggcgucuacuaccccgacaagguguuccgcuccagcgugcugcacuccacccaggaccucuuccugcccuucuucagcaacgucacgugguuccacgccaucuccgggaccaacggcaccaagcgguucgacaacccggugcugcccuucaacgacggggucuacuucgcgagcaccgagaaguccaacaucauccgcggcuggaucuucgggacgacccucgacagcaagacccagucccugcugaucgugaacaacgccaccaacguggucaucaaggugugcgaguuccaguucugcaacgaccccuuccucggcguguacuaccacaagaacaacaagagcuggauggaguccgaguuccgggucuacagcuccgccaacaacugcacguucgaguacgugagccagcccuuccugauggaccuggagggcaagcaggggaacuucaagaaccuccgcgaguucguguucaagaacaucgacggcuacuucaagaucuacuccaagcacaccccgaucaaccugguccgggaccugccccagggguucagcgcccucgagccccugguggaccugcccaucggcaucaacaucacccgcuuccagacccuccuggcccugcaccgguccuaccucacgccgggggacagcagcuccggcuggaccgcgggcgccgccgccuacuacgugggguaccugcagccccgcaccuuccugcucaaguacaacgagaacggcaccaucacggacgcggucgacugcgcccuggacccccugagcgagaccaagugcacccucaaguccuucaccguggagaaggggaucuaccagacgagcaacuuccgggugcagcccaccgaguccaucguccgcuucccgaacaucaccaaccugugccccuucggcgagguguucaacgccacccgguucgccagcgucuacgccuggaaccgcaagcggaucuccaacugcguggcggacuacagcgugcuguacaacuccgccagcuucuccacguucaagugcuacggcgucagccccaccaagcucaacgaccugugcuucaccaacguguacgccgacuccuucgugauccgcggggacgagguccggcagaucgcccccggccagaccgggaagaucgccgacuacaacuacaagcugccggacgacuucacgggcugcgugaucgcguggaacagcaacaaccucgacuccaaggucgggggcaacuacaacuaccuguaccgccuguuccgcaagagcaaccucaagcccuucgagcgggacaucuccaccgagaucuaccaggccggcagcacccccugcaacgggguggagggcuucaacugcuacuucccccugcaguccuacggguuccagccgaccaacggcgugggguaccagcccuaccggguggucgugcugagcuucgagcuccugcacgcccccgccacggugugcggccccaagaaguccaccaaccuggucaagaacaagugcgugaacuucaacuucaacggccucaccgggaccggcgugcugaccgagagcaacaagaaguuccugccguuccagcaguucgggcgcgacaucgccgacacgaccgacgcgguccgcgacccccagacccuggagauccucgacaucacccccugcagcuucggcgggguguccgugaucacgccgggcaccaacaccagcaaccaggucgccgugcuguaccagggcgugaacugcaccgagguccccguggccauccacgccgaccagcugacgcccaccuggcggguguacuccaccggcagcaacgucuuccagacccgcgccgggugccucaucggcgcggagcacgugaacaacuccuacgagugcgacauccccaucggggccggcaucugcgccagcuaccagacgcagaccaacuccccgcggcgcgcccggagcguggcgucccagagcaucaucgccuacaccaugucccugggcgccgagaacagcgucgccuacuccaacaacagcaucgccauccccaccaacuucacgaucuccgugaccaccgagauccugcccgugagcaugaccaagacgagcgucgacugcaccauguacaucugcggggacuccaccgagugcagcaaccuccugcugcaguacggcuccuucugcacccagcucaaccgcgcgcugacggggaucgccguggagcaggacaagaacacccaggagguguucgcccaggucaagcagaucuacaagacgcccccgaucaaggacuucggcggguucaacuucagccagauccugcccgaccccuccaagcccagcaagcgguccuucaucgaggaccuccuguucaacaaggugacccuggccgacgccggcuucaucaagcaguacggcgacugccucggggacaucgcggcccgcgaccugaucugcgcccagaaguucaacggccugaccgugcucccgccccugcugaccgacgagaugaucgcccaguacaccagcgcccuccuggcggggaccaucacguccggcuggaccuucggggccggcgccgcccugcagauccccuucgcgaugcagauggccuaccgguucaacggcaucggggucacccagaacgugcucuacgagaaccagaagcugaucgccaaccaguucaacagcgccaucggcaagauccaggacucccugagcuccaccgccagcgcgcucgggaagcugcaggacguggucaaccagaacgcccaggcccugaacacgcucgugaagcagcuguccagcaacuucggcgccaucuccagcgugcugaacgacauccucucccgccuggacaaggucgaggccgaggugcagaucgaccggcugaucaccgggcgccuccagagccugcagaccuacgugacccagcagcugauccgggcggccgagauccgcgccagcgccaaccucgccgcgaccaagauguccgagugcguccugggccagagcaagcggguggacuucugcggcaagggguaccaccugauguccuucccccagagcgccccgcacggcguggucuuccuccacgugacguacguccccgcccaggagaagaacuucaccaccgcccccgcgaucugccacgacgggaaggcccacuucccccgcgagggcguguucguguccaacgggacccacugguucgucacgcagcggaacuucuacgagccgcagaucaucaccaccgacaacaccuucgugagcggcaacugcgacguggucaucggcaucgugaacaacacgguguacgacccccugcagcccgagcuggacuccuucaaggaggagcucgacaaguacuucaagaaccacaccagccccgacgucgaccugggggacaucuccggcaucaacgccagcguggugaacauccagaaggagaucgaccgccugaacgaggucgccaagaaccucaacgagucccugaucgaccugcaggagcucgggaaguacgagcaguacaucaaguggccgugguacaucuggcugggcuucaucgccggccugaucgcgaucgugauggugaccaucaugcucugcugcaugaccagcugcugcuccugccugaaggggugcugcagcugcggcuccugcugcaaguucgacgaggacgacagcgagcccguccugaagggggugaagcuccacuacacgugaggacuaguguccaccugucccuccugggcugcuggauugucucguuuuccugccaaauaaacaggaucagcgcuuuacagaucucaaaggcucuuuucagagccaccaaaaaaaaaaaaaaaaaaaaaaaaaaaaaaaaaaaaaaaaaaaaaaaaaaaaaaaaaaaaaaaaaaaaaaaaaaaaaaaaaaaaaaaaaaaaaaaaaaaaa

SEQ ID NO: 23856 - RNA, 4129 nt, Artificial Sequence
  SARS-CoV-2/Wuhan/WIV05/2019__EPI_ISL_402128 spike protein mRNA gc (1-1273)(Y453F_D614G)
aggagacccgugacccggaaguuguacggcuacgcgacuuucccucccacaaacccucgcgcccuuccuuuccuacuugggcccggcagaaagcuuaccauguucguguuccugguccuccugccccuggugagcucccagugcgugaaccucaccacccgcacgcagcugccgcccgccuacaccaacagcuucacccggggcgucuacuaccccgacaagguguuccgcuccagcgugcugcacuccacccaggaccucuuccugcccuucuucagcaacgucacgugguuccacgccauccacguguccgggaccaacggcaccaagcgguucgacaacccggugcugcccuucaacgacggggucuacuucgcgagcaccgagaaguccaacaucauccgcggcuggaucuucgggacgacccucgacagcaagacccagucccugcugaucgugaacaacgccaccaacguggucaucaaggugugcgaguuccaguucugcaacgaccccuuccucggcguguacuaccacaagaacaacaagagcuggauggaguccgaguuccgggucuacagcuccgccaacaacugcacguucgaguacgugagccagcccuuccugauggaccuggagggcaagcaggggaacuucaagaaccuccgcgaguucguguucaagaacaucgacggcuacuucaagaucuacuccaagcacaccccgaucaaccugguccgggaccugccccagggguucagcgcccucgagccccugguggaccugcccaucggcaucaacaucacccgcuuccagacccuccuggcccugcaccgguccuaccucacgccgggggacagcagcuccggcuggaccgcgggcgccgccgccuacuacgugggguaccugcagccccgcaccuuccugcucaaguacaacgagaacggcaccaucacggacgcggucgacugcgcccuggacccccugagcgagaccaagugcacccucaaguccuucaccguggagaaggggaucuaccagacgagcaacuuccgggugcagcccaccgaguccaucguccgcuucccgaacaucaccaaccugugccccuucggcgagguguucaacgccacccgguucgccagcgucuacgccuggaaccgcaagcggaucuccaacugcguggcggacuacagcgugcuguacaacuccgccagcuucuccacguucaagugcuacggcgucagccccaccaagcucaacgaccugugcuucaccaacguguacgccgacuccuucgugauccgcggggacgagguccggcagaucgcccccggccagaccgggaagaucgccgacuacaacuacaagcugccggacgacuucacgggcugcgugaucgcguggaacagcaacaaccucgacuccaaggucgggggcaacuacaacuaccuguuccgccuguuccgcaagagcaaccucaagcccuucgagcgggacaucuccaccgagaucuaccaggccggcagcacccccugcaacgggguggagggcuucaacugcuacuucccccugcaguccuacggguuccagccgaccaacggcgugggguaccagcccuaccggguggucgugcugagcuucgagcuccugcacgcccccgccacggugugcggccccaagaaguccaccaaccuggucaagaacaagugcgugaacuucaacuucaacggccucaccgggaccggcgugcugaccgagagcaacaagaaguuccugccguuccagcaguucgggcgcgacaucgccgacacgaccgacgcgguccgcgacccccagacccuggagauccucgacaucacccccugcagcuucggcgggguguccgugaucacgccgggcaccaacaccagcaaccaggucgccgugcuguaccagggcgugaacugcaccgagguccccguggccauccacgccgaccagcugacgcccaccuggcggguguacuccaccggcagcaacgucuuccagacccgcgccgggugccucaucggcgcggagcacgugaacaacuccuacgagugcgacauccccaucggggccggcaucugcgccagcuaccagacgcagaccaacuccccgcggcgcgcccggagcguggcgucccagagcaucaucgccuacaccaugucccugggcgccgagaacagcgucgccuacuccaacaacagcaucgccauccccaccaacuucacgaucuccgugaccaccgagauccugcccgugagcaugaccaagacgagcgucgacugcaccauguacaucugcggggacuccaccgagugcagcaaccuccugcugcaguacggcuccuucugcacccagcucaaccgcgcgcugacggggaucgccguggagcaggacaagaacacccaggagguguucgcccaggucaagcagaucuacaagacgcccccgaucaaggacuucggcggguucaacuucagccagauccugcccgaccccuccaagcccagcaagcgguccuucaucgaggaccuccuguucaacaaggugacccuggccgacgccggcuucaucaagcaguacggcgacugccucggggacaucgcggcccgcgaccugaucugcgcccagaaguucaacggccugaccgugcucccgccccugcugaccgacgagaugaucgcccaguacaccagcgcccuccuggcggggaccaucacguccggcuggaccuucggggccggcgccgcccugcagauccccuucgcgaugcagauggccuaccgguucaacggcaucggggucacccagaacgugcucuacgagaaccagaagcugaucgccaaccaguucaacagcgccaucggcaagauccaggacucccugagcuccaccgccagcgcgcucgggaagcugcaggacguggucaaccagaacgcccaggcccugaacacgcucgugaagcagcuguccagcaacuucggcgccaucuccagcgugcugaacgacauccucucccgccuggacaaggucgaggccgaggugcagaucgaccggcugaucaccgggcgccuccagagccugcagaccuacgugacccagcagcugauccgggcggccgagauccgcgccagcgccaaccucgccgcgaccaagauguccgagugcguccugggccagagcaagcggguggacuucugcggcaagggguaccaccugauguccuucccccagagcgccccgcacggcguggucuuccuccacgugacguacguccccgcccaggagaagaacuucaccaccgcccccgcgaucugccacgacgggaaggcccacuucccccgcgagggcguguucguguccaacgggacccacugguucgucacgcagcggaacuucuacgagccgcagaucaucaccaccgacaacaccuucgugagcggcaacugcgacguggucaucggcaucgugaacaacacgguguacgacccccugcagcccgagcuggacuccuucaaggaggagcucgacaaguacuucaagaaccacaccagccccgacgucgaccugggggacaucuccggcaucaacgccagcguggugaacauccagaaggagaucgaccgccugaacgaggucgccaagaaccucaacgagucccugaucgaccugcaggagcucgggaaguacgagcaguacaucaaguggccgugguacaucuggcugggcuucaucgccggccugaucgcgaucgugauggugaccaucaugcucugcugcaugaccagcugcugcuccugccugaaggggugcugcagcugcggcuccugcugcaaguucgacgaggacgacagcgagcccguccugaagggggugaagcuccacuacacgugaggacuaguguccaccugucccuccugggcugcuggauugucucguuuuccugccaaauaaacaggaucagcgcuuuacagaucucaaaggcucuuuucagagccaccaaaaaaaaaaaaaaaaaaaaaaaaaaaaaaaaaaaaaaaaaaaaaaaaaaaaaaaaaaaaaaaaaaaaaaaaaaaaaaaaaaaaaaaaaaaaaaaaaaaaa

SEQ ID NO: 23857 - RNA, 4129 nt, Artificial Sequence
  SARS-CoV-2/Wuhan/WIV05/2019__EPI_ISL_402128 spike protein mRNA gc (1-1273)(D614G_I692V)
aggagacccgugacccggaaguuguacggcuacgcgacuuucccucccacaaacccucgcgcccuuccuuuccuacuugggcccggcagaaagcuuaccauguucguguuccugguccuccugccccuggugagcucccagugcgugaaccucaccacccgcacgcagcugccgcccgccuacaccaacagcuucacccggggcgucuacuaccccgacaagguguuccgcuccagcgugcugcacuccacccaggaccucuuccugcccuucuucagcaacgucacgugguuccacgccauccacguguccgggaccaacggcaccaagcgguucgacaacccggugcugcccuucaacgacggggucuacuucgcgagcaccgagaaguccaacaucauccgcggcuggaucuucgggacgacccucgacagcaagacccagucccugcugaucgugaacaacgccaccaacguggucaucaaggugugcgaguuccaguucugcaacgaccccuuccucggcguguacuaccacaagaacaacaagagcuggauggaguccgaguuccgggucuacagcuccgccaacaacugcacguucgaguacgugagccagcccuuccugauggaccuggagggcaagcaggggaacuucaagaaccuccgcgaguucguguucaagaacaucgacggcuacuucaagaucuacuccaagcacaccccgaucaaccugguccgggaccugccccagggguucagcgcccucgagccccugguggaccugcccaucggcaucaacaucacccgcuuccagacccuccuggcccugcaccgguccuaccucacgccgggggacagcagcuccggcuggaccgcgggcgccgccgccuacuacgugggguaccugcagccccgcaccuuccugcucaaguacaacgagaacggcaccaucacggacgcggucgacugcgcccuggacccccugagcgagaccaagugcacccucaaguccuucaccguggagaaggggaucuaccagacgagcaacuuccgggugcagcccaccgaguccaucguccgcuucccgaacaucaccaaccugugccccuucggcgagguguucaacgccacccgguucgccagcgucuacgccuggaaccgcaagcggaucuccaacugcguggcggacuacagcgugcuguacaacuccgccagcuucuccacguucaagugcuacggcgucagccccaccaagcucaacgaccugugcuucaccaacguguacgccgacuccuucgugauccgcggggacgagguccggcagaucgcccccggccagaccgggaagaucgccgacuacaacuacaagcugccggacgacuucacgggcugcgugaucgcguggaacagcaacaaccucgacuccaaggucgggggcaacuacaacuaccuguaccgccuguuccgcaagagcaaccucaagcccuucgagcgggacaucuccaccgagaucuaccaggccggcagcacccccugcaacgggguggagggcuucaacugcuacuucccccugcaguccuacggguuccagccgaccaacggcgugggguaccagcccuaccggguggucgugcugagcuucgagcuccugcacgcccccgccacggugugcggccccaagaaguccaccaaccuggucaagaacaagugcgugaacuucaacuucaacggccucaccgggaccggcgugcugaccgagagcaacaagaaguuccugccguuccagcaguucgggcgcgacaucgccgacacgaccgacgcgguccgcgacccccagacccuggagauccucgacaucacccccugcagcuucggcgggguguccgugaucacgccgggcaccaacaccagcaaccaggucgccgugcuguaccagggcgugaacugcaccgagguccccguggccauccacgccgaccagcugacgcccaccuggcggguguacuccaccggcagcaacgucuuccagacccgcgccgggugccucaucggcgcggagcacgugaacaacuccuacgagugcgacauccccaucggggccggcaucugcgccagcuaccagacgcagaccaacuccccgcggcgcgcccggagcguggcgucccagagcgucaucgccuacaccaugucccugggcgccgagaacagcgucgccuacuccaacaacagcaucgccauccccaccaacuucacgaucuccgugaccaccgagauccugcccgugagcaugaccaagacgagcgucgacugcaccauguacaucugcggggacuccaccgagugcagcaaccuccugcugcaguacggcuccuucugcacccagcucaaccgcgcgcugacggggaucgccguggagcaggacaagaacacccaggagguguucgcccaggucaagcagaucuacaagacgcccccgaucaaggacuucggcggguucaacuucagccagauccugcccgaccccuccaagcccagcaagcgguccuucaucgaggaccuccuguucaacaaggugacccuggccgacgccggcuucaucaagcaguacggcgacugccucggggacaucgcggcccgcgaccugaucugcgcccagaaguucaacggccugaccgugcucccgccccugcugaccgacgagaugaucgcccaguacaccagcgcccuccuggcggggaccaucacguccggcuggaccuucggggccggcgccgcccugcagauccccuucgcgaugcagauggccuaccgguucaacggcaucggggucacccagaacgugcucuacgagaaccagaagcugaucgccaaccaguucaacagcgccaucggcaagauccaggacucccugagcuccaccgccagcgcgcucgggaagcugcaggacguggucaaccagaacgcccaggcccugaacacgcucgugaagcagcuguccagcaacuucggcgccaucuccagcgugcugaacgacauccucucccgccuggacaaggucgaggccgaggugcagaucgaccggcugaucaccgggcgccuccagagccugcagaccuacgugacccagcagcugauccgggcggccgagauccgcgccagcgccaaccucgccgcgaccaagauguccgagugcguccugggccagagcaagcggguggacuucugcggcaagggguaccaccugauguccuucccccagagcgccccgcacggcguggucuuccuccacgugacguacguccccgcccaggagaagaacuucaccaccgcccccgcgaucugccacgacgggaaggcccacuucccccgcgagggcguguucguguccaacgggacccacugguucgucacgcagcggaacuucuacgagccgcagaucaucaccaccgacaacaccuucgugagcggcaacugcgacguggucaucggcaucgugaacaacacgguguacgacccccugcagcccgagcuggacuccuucaaggaggagcucgacaaguacuucaagaaccacaccagccccgacgucgaccugggggacaucuccggcaucaacgccagcguggugaacauccagaaggagaucgaccgccugaacgaggucgccaagaaccucaacgagucccugaucgaccugcaggagcucgggaaguacgagcaguacaucaaguggccgugguacaucuggcugggcuucaucgccggccugaucgcgaucgugauggugaccaucaugcucugcugcaugaccagcugcugcuccugccugaaggggugcugcagcugcggcuccugcugcaaguucgacgaggacgacagcgagcccguccugaagggggugaagcuccacuacacgugaggacuaguguccaccugucccuccugggcugcuggauugucucguuuuccugccaaauaaacaggaucagcgcuuuacagaucucaaaggcucuuuucagagccaccaaaaaaaaaaaaaaaaaaaaaaaaaaaaaaaaaaaaaaaaaaaaaaaaaaaaaaaaaaaaaaaaaaaaaaaaaaaaaaaaaaaaaaaaaaaaaaaaaaaaa

SEQ ID NO: 23858 - RNA, 4129 nt, Artificial Sequence
  SARS-CoV-2/Wuhan/WIV05/2019__EPI_ISL_402128 spike protein mRNA gc (1-1273)(D614G_M1229I)
aggagacccgugacccggaaguuguacggcuacgcgacuuucccucccacaaacccucgcgcccuuccuuuccuacuugggcccggcagaaagcuuaccauguucguguuccugguccuccugccccuggugagcucccagugcgugaaccucaccacccgcacgcagcugccgcccgccuacaccaacagcuucacccggggcgucuacuaccccgacaagguguuccgcuccagcgugcugcacuccacccaggaccucuuccugcccuucuucagcaacgucacgugguuccacgccauccacguguccgggaccaacggcaccaagcgguucgacaacccggugcugcccuucaacgacggggucuacuucgcgagcaccgagaaguccaacaucauccgcggcuggaucuucgggacgacccucgacagcaagacccagucccugcugaucgugaacaacgccaccaacguggucaucaaggugugcgaguuccaguucugcaacgaccccuuccucggcguguacuaccacaagaacaacaagagcuggauggaguccgaguuccgggucuacagcuccgccaacaacugcacguucgaguacgugagccagcccuuccugauggaccuggagggcaagcaggggaacuucaagaaccuccgcgaguucguguucaagaacaucgacggcuacuucaagaucuacuccaagcacaccccgaucaaccugguccgggaccugccccagggguucagcgcccucgagccccugguggaccugcccaucggcaucaacaucacccgcuuccagacccuccuggcccugcaccgguccuaccucacgccgggggacagcagcuccggcuggaccgcgggcgccgccgccuacuacgugggguaccugcagccccgcaccuuccugcucaaguacaacgagaacggcaccaucacggacgcggucgacugcgcccuggacccccugagcgagaccaagugcacccucaaguccuucaccguggagaaggggaucuaccagacgagcaacuuccgggugcagcccaccgaguccaucguccgcuucccgaacaucaccaaccugugccccuucggcgagguguucaacgccacccgguucgccagcgucuacgccuggaaccgcaagcggaucuccaacugcguggcggacuacagcgugcuguacaacuccgccagcuucuccacguucaagugcuacggcgucagccccaccaagcucaacgaccugugcuucaccaacguguacgccgacuccuucgugauccgcggggacgagguccggcagaucgcccccggccagaccgggaagaucgccgacuacaacuacaagcugccggacgacuucacgggcugcgugaucgcguggaacagcaacaaccucgacuccaaggucgggggcaacuacaacuaccuguaccgccuguuccgcaagagcaaccucaagcccuucgagcgggacaucuccaccgagaucuaccaggccggcagcacccccugcaacgggguggagggcuucaacugcuacuucccccugcaguccuacggguuccagccgaccaacggcgugggguaccagcccuaccggguggucgugcugagcuucgagcuccugcacgcccccgccacggugugcggccccaagaaguccaccaaccuggucaagaacaagugcgugaacuucaacuucaacggccucaccgggaccggcgugcugaccgagagcaacaagaaguuccugccguuccagcaguucgggcgcgacaucgccgacacgaccgacgcgguccgcgacccccagacccuggagauccucgacaucacccccugcagcuucggcgggguguccgugaucacgccgggcaccaacaccagcaaccaggucgccgugcuguaccagggcgugaacugcaccgagguccccguggccauccacgccgaccagcugacgcccaccuggcggguguacuccaccggcagcaacgucuuccagacccgcgccgggugccucaucggcgcggagcacgugaacaacuccuacgagugcgacauccccaucggggccggcaucugcgccagcuaccagacgcagaccaacuccccgcggcgcgcccggagcguggcgucccagagcaucaucgccuacaccaugucccugggcgccgagaacagcgucgccuacuccaacaacagcaucgccauccccaccaacuucacgaucuccgugaccaccgagauccugcccgugagcaugaccaagacgagcgucgacugcaccauguacaucugcggggacuccaccgagugcagcaaccuccugcugcaguacggcuccuucugcacccagcucaaccgcgcgcugacggggaucgccguggagcaggacaagaacacccaggagguguucgcccaggucaagcagaucuacaagacgcccccgaucaaggacuucggcggguucaacuucagccagauccugcccgaccccuccaagcccagcaagcgguccuucaucgaggaccuccuguucaacaaggugacccuggccgacgccggcuucaucaagcaguacggcgacugccucggggacaucgcggcccgcgaccugaucugcgcccagaaguucaacggccugaccgugcucccgccccugcugaccgacgagaugaucgcccaguacaccagcgcccuccuggcggggaccaucacguccggcuggaccuucggggccggcgccgcccugcagauccccuucgcgaugcagauggccuaccgguucaacggcaucggggucacccagaacgugcucuacgagaaccagaagcugaucgccaaccaguucaacagcgccaucggcaagauccaggacucccugagcuccaccgccagcgcgcucgggaagcugcaggacguggucaaccagaacgcccaggcccugaacacgcucgugaagcagcuguccagcaacuucggcgccaucuccagcgugcugaacgacauccucucccgccuggacaaggucgaggccgaggugcagaucgaccggcugaucaccgggcgccuccagagccugcagaccuacgugacccagcagcugauccgggcggccgagauccgcgccagcgccaaccucgccgcgaccaagauguccgagugcguccugggccagagcaagcggguggacuucugcggcaagggguaccaccugauguccuucccccagagcgccccgcacggcguggucuuccuccacgugacguacguccccgcccaggagaagaacuucaccaccgcccccgcgaucugccacgacgggaaggcccacuucccccgcgagggcguguucguguccaacgggacccacugguucgucacgcagcggaacuucuacgagccgcagaucaucaccaccgacaacaccuucgugagcggcaacugcgacguggucaucggcaucgugaacaacacgguguacgacccccugcagcccgagcuggacuccuucaaggaggagcucgacaaguacuucaagaaccacaccagccccgacgucgaccugggggacaucuccggcaucaacgccagcguggugaacauccagaaggagaucgaccgccugaacgaggucgccaagaaccucaacgagucccugaucgaccugcaggagcucgggaaguacgagcaguacaucaaguggccgugguacaucuggcugggcuucaucgccggccugaucgcgaucgugaucgugaccaucaugcucugcugcaugaccagcugcugcuccugccugaaggggugcugcagcugcggcuccugcugcaaguucgacgaggacgacagcgagcccguccugaagggggugaagcuccacuacacgugaggacuaguguccaccugucccuccugggcugcuggauugucucguuuuccugccaaauaaacaggaucagcgcuuuacagaucucaaaggcucuuuucagagccaccaaaaaaaaaaaaaaaaaaaaaaaaaaaaaaaaaaaaaaaaaaaaaaaaaaaaaaaaaaaaaaaaaaaaaaaaaaaaaaaaaaaaaaaaaaaaaaaaaaaaa

SEQ ID NO: 23859 - RNA, 4123 nt, Artificial Sequence
  SARS-CoV-2/Wuhan/WIV05/2019__EPI_ISL_402128 spike protein mRNA gc (1-1273)(H69del_V70del_A222V_Y453F_S477N_D614G_I692V)
aggagacccgugacccggaaguuguacggcuacgcgacuuucccucccacaaacccucgcgcccuuccuuuccuacuugggcccggcagaaagcuuaccauguucguguuccugguccuccugccccuggugagcucccagugcgugaaccucaccacccgcacgcagcugccgcccgccuacaccaacagcuucacccggggcgucuacuaccccgacaagguguuccgcuccagcgugcugcacuccacccaggaccucuuccugcccuucuucagcaacgucacgugguuccacgccaucuccgggaccaacggcaccaagcgguucgacaacccggugcugcccuucaacgacggggucuacuucgcgagcaccgagaaguccaacaucauccgcggcuggaucuucgggacgacccucgacagcaagacccagucccugcugaucgugaacaacgccaccaacguggucaucaaggugugcgaguuccaguucugcaacgaccccuuccucggcguguacuaccacaagaacaacaagagcuggauggaguccgaguuccgggucuacagcuccgccaacaacugcacguucgaguacgugagccagcccuuccugauggaccuggagggcaagcaggggaacuucaagaaccuccgcgaguucguguucaagaacaucgacggcuacuucaagaucuacuccaagcacaccccgaucaaccugguccgggaccugccccagggguucagcguccucgagccccugguggaccugcccaucggcaucaacaucacccgcuuccagacccuccuggcccugcaccgguccuaccucacgccgggggacagcagcuccggcuggaccgcgggcgccgccgccuacuacgugggguaccugcagccccgcaccuuccugcucaaguacaacgagaacggcaccaucacggacgcggucgacugcgcccuggacccccugagcgagaccaagugcacccucaaguccuucaccguggagaaggggaucuaccagacgagcaacuuccgggugcagcccaccgaguccaucguccgcuucccgaacaucaccaaccugugccccuucggcgagguguucaacgccacccgguucgccagcgucuacgccuggaaccgcaagcggaucuccaacugcguggcggacuacagcgugcuguacaacuccgccagcuucuccacguucaagugcuacggcgucagccccaccaagcucaacgaccugugcuucaccaacguguacgccgacuccuucgugauccgcggggacgagguccggcagaucgcccccggccagaccgggaagaucgccgacuacaacuacaagcugccggacgacuucacgggcugcgugaucgcguggaacagcaacaaccucgacuccaaggucgggggcaacuacaacuaccuguuccgccuguuccgcaagagcaaccucaagcccuucgagcgggacaucuccaccgagaucuaccaggccggcaacacccccugcaacgggguggagggcuucaacugcuacuucccccugcaguccuacggguuccagccgaccaacggcgugggguaccagcccuaccggguggucgugcugagcuucgagcuccugcacgcccccgccacggugugcggccccaagaaguccaccaaccuggucaagaacaagugcgugaacuucaacuucaacggccucaccgggaccggcgugcugaccgagagcaacaagaaguuccugccguuccagcaguucgggcgcgacaucgccgacacgaccgacgcgguccgcgacccccagacccuggagauccucgacaucacccccugcagcuucggcgggguguccgugaucacgccgggcaccaacaccagcaaccaggucgccgugcuguaccagggcgugaacugcaccgagguccccguggccauccacgccgaccagcugacgcccaccuggcggguguacuccaccggcagcaacgucuuccagacccgcgccgggugccucaucggcgcggagcacgugaacaacuccuacgagugcgacauccccaucggggccggcaucugcgccagcuaccagacgcagaccaacuccccgcggcgcgcccggagcguggcgucccagagcgucaucgccuacaccaugucccugggcgccgagaacagcgucgccuacuccaacaacagcaucgccauccccaccaacuucacgaucuccgugaccaccgagauccugcccgugagcaugaccaagacgagcgucgacugcaccauguacaucugcggggacuccaccgagugcagcaaccuccugcugcaguacggcuccuucugcacccagcucaaccgcgcgcugacggggaucgccguggagcaggacaagaacacccaggagguguucgcccaggucaagcagaucuacaagacgcccccgaucaaggacuucggcggguucaacuucagccagauccugcccgaccccuccaagcccagcaagcgguccuucaucgaggaccuccuguucaacaaggugacccuggccgacgccggcuucaucaagcaguacggcgacugccucggggacaucgcggcccgcgaccugaucugcgcccagaaguucaacggccugaccgugcucccgccccugcugaccgacgagaugaucgcccaguacaccagcgcccuccuggcggggaccaucacguccggcuggaccuucggggccggcgccgcccugcagauccccuucgcgaugcagauggccuaccgguucaacggcaucggggucacccagaacgugcucuacgagaaccagaagcugaucgccaaccaguucaacagcgccaucggcaagauccaggacucccugagcuccaccgccagcgcgcucgggaagcugcaggacguggucaaccagaacgcccaggcccugaacacgcucgugaagcagcuguccagcaacuucggcgccaucuccagcgugcugaacgacauccucucccgccuggacaaggucgaggccgaggugcagaucgaccggcugaucaccgggcgccuccagagccugcagaccuacgugacccagcagcugauccgggcggccgagauccgcgccagcgccaaccucgccgcgaccaagauguccgagugcguccugggccagagcaagcggguggacuucugcggcaagggguaccaccugauguccuucccccagagcgccccgcacggcguggucuuccuccacgugacguacguccccgcccaggagaagaacuucaccaccgcccccgcgaucugccacgacgggaaggcccacuucccccgcgagggcguguucguguccaacgggacccacugguucgucacgcagcggaacuucuacgagccgcagaucaucaccaccgacaacaccuucgugagcggcaacugcgacguggucaucggcaucgugaacaacacgguguacgacccccugcagcccgagcuggacuccuucaaggaggagcucgacaaguacuucaagaaccacaccagccccgacgucgaccugggggacaucuccggcaucaacgccagcguggugaacauccagaaggagaucgaccgccugaacgaggucgccaagaaccucaacgagucccugaucgaccugcaggagcucgggaaguacgagcaguacaucaaguggccgugguacaucuggcugggcuucaucgccggccugaucgcgaucgugauggugaccaucaugcucugcugcaugaccagcugcugcuccugccugaaggggugcugcagcugcggcuccugcugcaaguucgacgaggacgacagcgagcccguccugaagggggugaagcuccacuacacgugaggacuaguguccaccugucccuccugggcugcuggauugucucguuuuccugccaaauaaacaggaucagcgcuuuacagaucucaaaggcucuuuucagagccaccaaaaaaaaaaaaaaaaaaaaaaaaaaaaaaaaaaaaaaaaaaaaaaaaaaaaaaaaaaaaaaaaaaaaaaaaaaaaaaaaaaaaaaaaaaaaaaaaaaaaa

SEQ ID NO: 23860 - RNA, 4123 nt, Artificial Sequence
  SARS-CoV-2/Wuhan/WIV05/2019__EPI_ISL_402128 spike protein mRNA gc (1-1273)(H69del_V70del_Y453F_D614G_I692V_M1229I)
aggagacccgugacccggaaguuguacggcuacgcgacuuucccucccacaaacccucgcgcccuuccuuuccuacuugggcccggcagaaagcuuaccauguucguguuccugguccuccugccccuggugagcucccagugcgugaaccucaccacccgcacgcagcugccgcccgccuacaccaacagcuucacccggggcgucuacuaccccgacaagguguuccgcuccagcgugcugcacuccacccaggaccucuuccugcccuucuucagcaacgucacgugguuccacgccaucuccgggaccaacggcaccaagcgguucgacaacccggugcugcccuucaacgacggggucuacuucgcgagcaccgagaaguccaacaucauccgcggcuggaucuucgggacgacccucgacagcaagacccagucccugcugaucgugaacaacgccaccaacguggucaucaaggugugcgaguuccaguucugcaacgaccccuuccucggcguguacuaccacaagaacaacaagagcuggauggaguccgaguuccgggucuacagcuccgccaacaacugcacguucgaguacgugagccagcccuuccugauggaccuggagggcaagcaggggaacuucaagaaccuccgcgaguucguguucaagaacaucgacggcuacuucaagaucuacuccaagcacaccccgaucaaccugguccgggaccugccccagggguucagcgcccucgagccccugguggaccugcccaucggcaucaacaucacccgcuuccagacccuccuggcccugcaccgguccuaccucacgccgggggacagcagcuccggcuggaccgcgggcgccgccgccuacuacgugggguaccugcagccccgcaccuuccugcucaaguacaacgagaacggcaccaucacggacgcggucgacugcgcccuggacccccugagcgagaccaagugcacccucaaguccuucaccguggagaaggggaucuaccagacgagcaacuuccgggugcagcccaccgaguccaucguccgcuucccgaacaucaccaaccugugccccuucggcgagguguucaacgccacccgguucgccagcgucuacgccuggaaccgcaagcggaucuccaacugcguggcggacuacagcgugcuguacaacuccgccagcuucuccacguucaagugcuacggcgucagccccaccaagcucaacgaccugugcuucaccaacguguacgccgacuccuucgugauccgcggggacgagguccggcagaucgcccccggccagaccgggaagaucgccgacuacaacuacaagcugccggacgacuucacgggcugcgugaucgcguggaacagcaacaaccucgacuccaaggucgggggcaacuacaacuaccuguuccgccuguuccgcaagagcaaccucaagcccuucgagcgggacaucuccaccgagaucuaccaggccggcagcacccccugcaacgggguggagggcuucaacugcuacuucccccugcaguccuacggguuccagccgaccaacggcgugggguaccagcccuaccggguggucgugcugagcuucgagcuccugcacgcccccgccacggugugcggccccaagaaguccaccaaccuggucaagaacaagugcgugaacuucaacuucaacggccucaccgggaccggcgugcugaccgagagcaacaagaaguuccugccguuccagcaguucgggcgcgacaucgccgacacgaccgacgcgguccgcgacccccagacccuggagauccucgacaucacccccugcagcuucggcgggguguccgugaucacgccgggcaccaacaccagcaaccaggucgccgugcuguaccagggcgugaacugcaccgagguccccguggccauccacgccgaccagcugacgcccaccuggcggguguacuccaccggcagcaacgucuuccagacccgcgccgggugccucaucggcgcggagcacgugaacaacuccuacgagugcgacauccccaucggggccggcaucugcgccagcuaccagacgcagaccaacuccccgcggcgcgcccggagcguggcgucccagagcgugaucgccuacaccaugucccugggcgccgagaacagcgucgccuacuccaacaacagcaucgccauccccaccaacuucacgaucuccgugaccaccgagauccugcccgugagcaugaccaagacgagcgucgacugcaccauguacaucugcggggacuccaccgagugcagcaaccuccugcugcaguacggcuccuucugcacccagcucaaccgcgcgcugacggggaucgccguggagcaggacaagaacacccaggagguguucgcccaggucaagcagaucuacaagacgcccccgaucaaggacuucggcggguucaacuucagccagauccugcccgaccccuccaagcccagcaagcgguccuucaucgaggaccuccuguucaacaaggugacccuggccgacgccggcuucaucaagcaguacggcgacugccucggggacaucgcggcccgcgaccugaucugcgcccagaaguucaacggccugaccgugcucccgccccugcugaccgacgagaugaucgcccaguacaccagcgcccuccuggcggggaccaucacguccggcuggaccuucggggccggcgccgcccugcagauccccuucgcgaugcagauggccuaccgguucaacggcaucggggucacccagaacgugcucuacgagaaccagaagcugaucgccaaccaguucaacagcgccaucggcaagauccaggacucccugagcuccaccgccagcgcgcucgggaagcugcaggacguggucaaccagaacgcccaggcccugaacacgcucgugaagcagcuguccagcaacuucggcgccaucuccagcgugcugaacgacauccucucccgccuggacaaggucgaggccgaggugcagaucgaccggcugaucaccgggcgccuccagagccugcagaccuacgugacccagcagcugauccgggcggccgagauccgcgccagcgccaaccucgccgcgaccaagauguccgagugcguccugggccagagcaagcggguggacuucugcggcaagggguaccaccugauguccuucccccagagcgccccgcacggcguggucuuccuccacgugacguacguccccgcccaggagaagaacuucaccaccgcccccgcgaucugccacgacgggaaggcccacuucccccgcgagggcguguucguguccaacgggacccacugguucgucacgcagcggaacuucuacgagccgcagaucaucaccaccgacaacaccuucgugagcggcaacugcgacguggucaucggcaucgugaacaacacgguguacgacccccugcagcccgagcuggacuccuucaaggaggagcucgacaaguacuucaagaaccacaccagccccgacgucgaccugggggacaucuccggcaucaacgccagcguggugaacauccagaaggagaucgaccgccugaacgaggucgccaagaaccucaacgagucccugaucgaccugcaggagcucgggaaguacgagcaguacaucaaguggccgugguacaucuggcugggcuucaucgccggccugaucgcgaucgugaucgugaccaucaugcucugcugcaugaccagcugcugcuccugccugaaggggugcugcagcugcggcuccugcugcaaguucgacgaggacgacagcgagcccguccugaagggggugaagcuccacuacacgugaggacuaguguccaccugucccuccugggcugcuggauugucucguuuuccugccaaauaaacaggaucagcgcuuuacagaucucaaaggcucuuuucagagccaccaaaaaaaaaaaaaaaaaaaaaaaaaaaaaaaaaaaaaaaaaaaaaaaaaaaaaaaaaaaaaaaaaaaaaaaaaaaaaaaaaaaaaaaaaaaaaaaaaaaaa

SEQ ID NO: 23861 - RNA, 4120 nt, Artificial Sequence
  SARS-CoV-2/Wuhan/WIV05/2019__EPI_ISL_402128 spike protein mRNA gc (1-1273)(H69del_V70del_Y144del_N501Y_A570D_D614G_P681H_T716I_S982 A_D1118H)
aggagacccgugacccggaaguuguacggcuacgcgacuuucccucccacaaacccucgcgcccuuccuuuccuacuugggcccggcagaaagcuuaccauguucguguuccugguccuccugccccuggugagcucccagugcgugaaccucaccacccgcacgcagcugccgcccgccuacaccaacagcuucacccggggcgucuacuaccccgacaagguguuccgcuccagcgugcugcacuccacccaggaccucuuccugcccuucuucagcaacgucacgugguuccacgccaucuccgggaccaacggcaccaagcgguucgacaacccggugcugcccuucaacgacggggucuacuucgcgagcaccgagaaguccaacaucauccgcggcuggaucuucgggacgacccucgacagcaagacccagucccugcugaucgugaacaacgccaccaacguggucaucaaggugugcgaguuccaguucugcaacgaccccuuccucggcguguaccacaagaacaacaagagcuggauggaguccgaguuccgggucuacagcuccgccaacaacugcacguucgaguacgugagccagcccuuccugauggaccuggagggcaagcaggggaacuucaagaaccuccgcgaguucguguucaagaacaucgacggcuacuucaagaucuacuccaagcacaccccgaucaaccugguccgggaccugccccagggguucagcgcccucgagccccugguggaccugcccaucggcaucaacaucacccgcuuccagacccuccuggcccugcaccgguccuaccucacgccgggggacagcagcuccggcuggaccgcgggcgccgccgccuacuacgugggguaccugcagccccgcaccuuccugcucaaguacaacgagaacggcaccaucacggacgcggucgacugcgcccuggacccccugagcgagaccaagugcacccucaaguccuucaccguggagaaggggaucuaccagacgagcaacuuccgggugcagcccaccgaguccaucguccgcuucccgaacaucaccaaccugugccccuucggcgagguguucaacgccacccgguucgccagcgucuacgccuggaaccgcaagcggaucuccaacugcguggcggacuacagcgugcuguacaacuccgccagcuucuccacguucaagugcuacggcgucagccccaccaagcucaacgaccugugcuucaccaacguguacgccgacuccuucgugauccgcggggacgagguccggcagaucgcccccggccagaccgggaagaucgccgacuacaacuacaagcugccggacgacuucacgggcugcgugaucgcguggaacagcaacaaccucgacuccaaggucgggggcaacuacaacuaccuguaccgccuguuccgcaagagcaaccucaagcccuucgagcgggacaucuccaccgagaucuaccaggccggcagcacccccugcaacgggguggagggcuucaacugcuacuucccccugcaguccuacggguuccagccgaccuacggcgugggguaccagcccuaccggguggucgugcugagcuucgagcuccugcacgcccccgccacggugugcggccccaagaaguccaccaaccuggucaagaacaagugcgugaacuucaacuucaacggccucaccgggaccggcgugcugaccgagagcaacaagaaguuccugccguuccagcaguucgggcgcgacaucgacgacacgaccgacgcgguccgcgacccccagacccuggagauccucgacaucacccccugcagcuucggcgggguguccgugaucacgccgggcaccaacaccagcaaccaggucgccgugcuguaccagggcgugaacugcaccgagguccccguggccauccacgccgaccagcugacgcccaccuggcggguguacuccaccggcagcaacgucuuccagacccgcgccgggugccucaucggcgcggagcacgugaacaacuccuacgagugcgacauccccaucggggccggcaucugcgccagcuaccagacgcagaccaacucccaccggcgcgcccggagcguggcgucccagagcaucaucgccuacaccaugucccugggcgccgagaacagcgucgccuacuccaacaacagcaucgccauccccaucaacuucacgaucuccgugaccaccgagauccugcccgugagcaugaccaagacgagcgucgacugcaccauguacaucugcggggacuccaccgagugcagcaaccuccugcugcaguacggcuccuucugcacccagcucaaccgcgcgcugacggggaucgccguggagcaggacaagaacacccaggagguguucgcccaggucaagcagaucuacaagacgcccccgaucaaggacuucggcggguucaacuucagccagauccugcccgaccccuccaagcccagcaagcgguccuucaucgaggaccuccuguucaacaaggugacccuggccgacgccggcuucaucaagcaguacggcgacugccucggggacaucgcggcccgcgaccugaucugcgcccagaaguucaacggccugaccgugcucccgccccugcugaccgacgagaugaucgcccaguacaccagcgcccuccuggcggggaccaucacguccggcuggaccuucggggccggcgccgcccugcagauccccuucgcgaugcagauggccuaccgguucaacggcaucggggucacccagaacgugcucuacgagaaccagaagcugaucgccaaccaguucaacagcgccaucggcaagauccaggacucccugagcuccaccgccagcgcgcucgggaagcugcaggacguggucaaccagaacgcccaggcccugaacacgcucgugaagcagcuguccagcaacuucggcgccaucuccagcgugcugaacgacauccucgcccgccuggacaaggucgaggccgaggugcagaucgaccggcugaucaccgggcgccuccagagccugcagaccuacgugacccagcagcugauccgggcggccgagauccgcgccagcgccaaccucgccgcgaccaagauguccgagugcguccugggccagagcaagcggguggacuucugcggcaagggguaccaccugauguccuucccccagagcgccccgcacggcguggucuuccuccacgugacguacguccccgcccaggagaagaacuucaccaccgcccccgcgaucugccacgacgggaaggcccacuucccccgcgagggcguguucguguccaacgggacccacugguucgucacgcagcggaacuucuacgagccgcagaucaucaccacccacaacaccuucgugagcggcaacugcgacguggucaucggcaucgugaacaacacgguguacgacccccugcagcccgagcuggacuccuucaaggaggagcucgacaaguacuucaagaaccacaccagccccgacgucgaccugggggacaucuccggcaucaacgccagcguggugaacauccagaaggagaucgaccgccugaacgaggucgccaagaaccucaacgagucccugaucgaccugcaggagcucgggaaguacgagcaguacaucaaguggccgugguacaucuggcugggcuucaucgccggccugaucgcgaucgugauggugaccaucaugcucugcugcaugaccagcugcugcuccugccugaaggggugcugcagcugcggcuccugcugcaaguucgacgaggacgacagcgagcccguccugaagggggugaagcuccacuacacgugaggacuaguguccaccugucccuccugggcugcuggauugucucguuuuccugccaaauaaacaggaucagcgcuuuacagaucucaaaggcucuuuucagagccaccaaaaaaaaaaaaaaaaaaaaaaaaaaaaaaaaaaaaaaaaaaaaaaaaaaaaaaaaaaaaaaaaaaaaaaaaaaaaaaaaaaaaaaaaaaaaaaaaaaaaa

SEQ ID NO: 23862 - RNA, 4129 nt, Artificial Sequence
  SARS-CoV-2/Wuhan/WIV05/2019__EPI_ISL_402128 spike protein mRNA gc (1-1273)(K417N_E484K_N501Y_D614G)
aggagacccgugacccggaaguuguacggcuacgcgacuuucccucccacaaacccucgcgcccuuccuuuccuacuugggcccggcagaaagcuuaccauguucguguuccugguccuccugccccuggugagcucccagugcgugaaccucaccacccgcacgcagcugccgcccgccuacaccaacagcuucacccggggcgucuacuaccccgacaagguguuccgcuccagcgugcugcacuccacccaggaccucuuccugcccuucuucagcaacgucacgugguuccacgccauccacguguccgggaccaacggcaccaagcgguucgacaacccggugcugcccuucaacgacggggucuacuucgcgagcaccgagaaguccaacaucauccgcggcuggaucuucgggacgacccucgacagcaagacccagucccugcugaucgugaacaacgccaccaacguggucaucaaggugugcgaguuccaguucugcaacgaccccuuccucggcguguacuaccacaagaacaacaagagcuggauggaguccgaguuccgggucuacagcuccgccaacaacugcacguucgaguacgugagccagcccuuccugauggaccuggagggcaagcaggggaacuucaagaaccuccgcgaguucguguucaagaacaucgacggcuacuucaagaucuacuccaagcacaccccgaucaaccugguccgggaccugccccagggguucagcgcccucgagccccugguggaccugcccaucggcaucaacaucacccgcuuccagacccuccuggcccugcaccgguccuaccucacgccgggggacagcagcuccggcuggaccgcgggcgccgccgccuacuacgugggguaccugcagccccgcaccuuccugcucaaguacaacgagaacggcaccaucacggacgcggucgacugcgcccuggacccccugagcgagaccaagugcacccucaaguccuucaccguggagaaggggaucuaccagacgagcaacuuccgggugcagcccaccgaguccaucguccgcuucccgaacaucaccaaccugugccccuucggcgagguguucaacgccacccgguucgccagcgucuacgccuggaaccgcaagcggaucuccaacugcguggcggacuacagcgugcuguacaacuccgccagcuucuccacguucaagugcuacggcgucagccccaccaagcucaacgaccugugcuucaccaacguguacgccgacuccuucgugauccgcggggacgagguccggcagaucgcccccggccagaccgggaacaucgccgacuacaacuacaagcugccggacgacuucacgggcugcgugaucgcguggaacagcaacaaccucgacuccaaggucgggggcaacuacaacuaccuguaccgccuguuccgcaagagcaaccucaagcccuucgagcgggacaucuccaccgagaucuaccaggccggcagcacccccugcaacggggugaagggcuucaacugcuacuucccccugcaguccuacggguuccagccgaccuacggcgugggguaccagcccuaccggguggucgugcugagcuucgagcuccugcacgcccccgccacggugugcggccccaagaaguccaccaaccuggucaagaacaagugcgugaacuucaacuucaacggccucaccgggaccggcgugcugaccgagagcaacaagaaguuccugccguuccagcaguucgggcgcgacaucgccgacacgaccgacgcgguccgcgacccccagacccuggagauccucgacaucacccccugcagcuucggcgggguguccgugaucacgccgggcaccaacaccagcaaccaggucgccgugcuguaccagggcgugaacugcaccgagguccccguggccauccacgccgaccagcugacgcccaccuggcggguguacuccaccggcagcaacgucuuccagacccgcgccgggugccucaucggcgcggagcacgugaacaacuccuacgagugcgacauccccaucggggccggcaucugcgccagcuaccagacgcagaccaacuccccgcggcgcgcccggagcguggcgucccagagcaucaucgccuacaccaugucccugggcgccgagaacagcgucgccuacuccaacaacagcaucgccauccccaccaacuucacgaucuccgugaccaccgagauccugcccgugagcaugaccaagacgagcgucgacugcaccauguacaucugcggggacuccaccgagugcagcaaccuccugcugcaguacggcuccuucugcacccagcucaaccgcgcgcugacggggaucgccguggagcaggacaagaacacccaggagguguucgcccaggucaagcagaucuacaagacgcccccgaucaaggacuucggcggguucaacuucagccagauccugcccgaccccuccaagcccagcaagcgguccuucaucgaggaccuccuguucaacaaggugacccuggccgacgccggcuucaucaagcaguacggcgacugccucggggacaucgcggcccgcgaccugaucugcgcccagaaguucaacggccugaccgugcucccgccccugcugaccgacgagaugaucgcccaguacaccagcgcccuccuggcggggaccaucacguccggcuggaccuucggggccggcgccgcccugcagauccccuucgcgaugcagauggccuaccgguucaacggcaucggggucacccagaacgugcucuacgagaaccagaagcugaucgccaaccaguucaacagcgccaucggcaagauccaggacucccugagcuccaccgccagcgcgcucgggaagcugcaggacguggucaaccagaacgcccaggcccugaacacgcucgugaagcagcuguccagcaacuucggcgccaucuccagcgugcugaacgacauccucucccgccuggacaaggucgaggccgaggugcagaucgaccggcugaucaccgggcgccuccagagccugcagaccuacgugacccagcagcugauccgggcggccgagauccgcgccagcgccaaccucgccgcgaccaagauguccgagugcguccugggccagagcaagcggguggacuucugcggcaagggguaccaccugauguccuucccccagagcgccccgcacggcguggucuuccuccacgugacguacguccccgcccaggagaagaacuucaccaccgcccccgcgaucugccacgacgggaaggcccacuucccccgcgagggcguguucguguccaacgggacccacugguucgucacgcagcggaacuucuacgagccgcagaucaucaccaccgacaacaccuucgugagcggcaacugcgacguggucaucggcaucgugaacaacacgguguacgacccccugcagcccgagcuggacuccuucaaggaggagcucgacaaguacuucaagaaccacaccagccccgacgucgaccugggggacaucuccggcaucaacgccagcguggugaacauccagaaggagaucgaccgccugaacgaggucgccaagaaccucaacgagucccugaucgaccugcaggagcucgggaaguacgagcaguacaucaaguggccgugguacaucuggcugggcuucaucgccggccugaucgcgaucgugauggugaccaucaugcucugcugcaugaccagcugcugcuccugccugaaggggugcugcagcugcggcuccugcugcaaguucgacgaggacgacagcgagcccguccugaagggggugaagcuccacuacacgugaggacuaguguccaccugucccuccugggcugcuggauugucucguuuuccugccaaauaaacaggaucagcgcuuuacagaucucaaaggcucuuuucagagccaccaaaaaaaaaaaaaaaaaaaaaaaaaaaaaaaaaaaaaaaaaaaaaaaaaaaaaaaaaaaaaaaaaaaaaaaaaaaaaaaaaaaaaaaaaaaaaaaaaaaaa

SEQ ID NO: 23863 - RNA, 4120 nt, Artificial Sequence
  SARS-CoV-2/Wuhan/WIV05/2019__EPI_ISL_402128 spike protein mRNA gc (1-1273)(L18F_D80A_D215G_L242del_A243del_L244del_R246I_K417N_E484 K_N501Y_D614G_A701V)
aggagacccgugacccggaaguuguacggcuacgcgacuuucccucccacaaacccucgcgcccuuccuuuccuacuugggcccggcagaaagcuuaccauguucguguuccugguccuccugccccuggugagcucccagugcgugaacuucaccacccgcacgcagcugccgcccgccuacaccaacagcuucacccggggcgucuacuaccccgacaagguguuccgcuccagcgugcugcacuccacccaggaccucuuccugcccuucuucagcaacgucacgugguuccacgccauccacguguccgggaccaacggcaccaagcgguucgccaacccggugcugcccuucaacgacggggucuacuucgcgagcaccgagaaguccaacaucauccgcggcuggaucuucgggacgacccucgacagcaagacccagucccugcugaucgugaacaacgccaccaacguggucaucaaggugugcgaguuccaguucugcaacgaccccuuccucggcguguacuaccacaagaacaacaagagcuggauggaguccgaguuccgggucuacagcuccgccaacaacugcacguucgaguacgugagccagcccuuccugauggaccuggagggcaagcaggggaacuucaagaaccuccgcgaguucguguucaagaacaucgacggcuacuucaagaucuacuccaagcacaccccgaucaaccugguccggggccugccccagggguucagcgcccucgagccccugguggaccugcccaucggcaucaacaucacccgcuuccagacccuccacaucuccuaccucacgccgggggacagcagcuccggcuggaccgcgggcgccgccgccuacuacgugggguaccugcagccccgcaccuuccugcucaaguacaacgagaacggcaccaucacggacgcggucgacugcgcccuggacccccugagcgagaccaagugcacccucaaguccuucaccguggagaaggggaucuaccagacgagcaacuuccgggugcagcccaccgaguccaucguccgcuucccgaacaucaccaaccugugccccuucggcgagguguucaacgccacccgguucgccagcgucuacgccuggaaccgcaagcggaucuccaacugcguggcggacuacagcgugcuguacaacuccgccagcuucuccacguucaagugcuacggcgucagccccaccaagcucaacgaccugugcuucaccaacguguacgccgacuccuucgugauccgcggggacgagguccggcagaucgcccccggccagaccgggaacaucgccgacuacaacuacaagcugccggacgacuucacgggcugcgugaucgcguggaacagcaacaaccucgacuccaaggucgggggcaacuacaacuaccuguaccgccuguuccgcaagagcaaccucaagcccuucgagcgggacaucuccaccgagaucuaccaggccggcagcacccccugcaacggggugaagggcuucaacugcuacuucccccugcaguccuacggguuccagccgaccuacggcgugggguaccagcccuaccggguggucgugcugagcuucgagcuccugcacgcccccgccacggugugcggccccaagaaguccaccaaccuggucaagaacaagugcgugaacuucaacuucaacggccucaccgggaccggcgugcugaccgagagcaacaagaaguuccugccguuccagcaguucgggcgcgacaucgccgacacgaccgacgcgguccgcgacccccagacccuggagauccucgacaucacccccugcagcuucggcgggguguccgugaucacgccgggcaccaacaccagcaaccaggucgccgugcuguaccagggcgugaacugcaccgagguccccguggccauccacgccgaccagcugacgcccaccuggcggguguacuccaccggcagcaacgucuuccagacccgcgccgggugccucaucggcgcggagcacgugaacaacuccuacgagugcgacauccccaucggggccggcaucugcgccagcuaccagacgcagaccaacuccccgcggcgcgcccggagcguggcgucccagagcaucaucgccuacaccaugucccugggcguggagaacagcgucgccuacuccaacaacagcaucgccauccccaccaacuucacgaucuccgugaccaccgagauccugcccgugagcaugaccaagacgagcgucgacugcaccauguacaucugcggggacuccaccgagugcagcaaccuccugcugcaguacggcuccuucugcacccagcucaaccgcgcgcugacggggaucgccguggagcaggacaagaacacccaggagguguucgcccaggucaagcagaucuacaagacgcccccgaucaaggacuucggcggguucaacuucagccagauccugcccgaccccuccaagcccagcaagcgguccuucaucgaggaccuccuguucaacaaggugacccuggccgacgccggcuucaucaagcaguacggcgacugccucggggacaucgcggcccgcgaccugaucugcgcccagaaguucaacggccugaccgugcucccgccccugcugaccgacgagaugaucgcccaguacaccagcgcccuccuggcggggaccaucacguccggcuggaccuucggggccggcgccgcccugcagauccccuucgcgaugcagauggccuaccgguucaacggcaucggggucacccagaacgugcucuacgagaaccagaagcugaucgccaaccaguucaacagcgccaucggcaagauccaggacucccugagcuccaccgccagcgcgcucgggaagcugcaggacguggucaaccagaacgcccaggcccugaacacgcucgugaagcagcuguccagcaacuucggcgccaucuccagcgugcugaacgacauccucucccgccuggacaaggucgaggccgaggugcagaucgaccggcugaucaccgggcgccuccagagccugcagaccuacgugacccagcagcugauccgggcggccgagauccgcgccagcgccaaccucgccgcgaccaagauguccgagugcguccugggccagagcaagcggguggacuucugcggcaagggguaccaccugauguccuucccccagagcgccccgcacggcguggucuuccuccacgugacguacguccccgcccaggagaagaacuucaccaccgcccccgcgaucugccacgacgggaaggcccacuucccccgcgagggcguguucguguccaacgggacccacugguucgucacgcagcggaacuucuacgagccgcagaucaucaccaccgacaacaccuucgugagcggcaacugcgacguggucaucggcaucgugaacaacacgguguacgacccccugcagcccgagcuggacuccuucaaggaggagcucgacaaguacuucaagaaccacaccagccccgacgucgaccugggggacaucuccggcaucaacgccagcguggugaacauccagaaggagaucgaccgccugaacgaggucgccaagaaccucaacgagucccugaucgaccugcaggagcucgggaaguacgagcaguacaucaaguggccgugguacaucuggcugggcuucaucgccggccugaucgcgaucgugauggugaccaucaugcucugcugcaugaccagcugcugcuccugccugaaggggugcugcagcugcggcuccugcugcaaguucgacgaggacgacagcgagcccguccugaagggggugaagcuccacuacacgugaggacuaguguccaccugucccuccugggcugcuggauugucucguuuuccugccaaauaaacaggaucagcgcuuuacagaucucaaaggcucuuuucagagccaccaaaaaaaaaaaaaaaaaaaaaaaaaaaaaaaaaaaaaaaaaaaaaaaaaaaaaaaaaaaaaaaaaaaaaaaaaaaaaaaaaaaaaaaaaaaaaaaaaaaaa

SEQ ID NO: 23864 - RNA, 4129 nt, Artificial Sequence
  SARS-CoV-2/Wuhan/WIV05/2019__EPI_ISL_402128 spike protein mRNA gc (1-1273)(E484K_D614G)
aggagacccgugacccggaaguuguacggcuacgcgacuuucccucccacaaacccucgcgcccuuccuuuccuacuugggcccggcagaaagcuuaccauguucguguuccugguccuccugccccuggugagcucccagugcgugaaccucaccacccgcacgcagcugccgcccgccuacaccaacagcuucacccggggcgucuacuaccccgacaagguguuccgcuccagcgugcugcacuccacccaggaccucuuccugcccuucuucagcaacgucacgugguuccacgccauccacguguccgggaccaacggcaccaagcgguucgacaacccggugcugcccuucaacgacggggucuacuucgcgagcaccgagaaguccaacaucauccgcggcuggaucuucgggacgacccucgacagcaagacccagucccugcugaucgugaacaacgccaccaacguggucaucaaggugugcgaguuccaguucugcaacgaccccuuccucggcguguacuaccacaagaacaacaagagcuggauggaguccgaguuccgggucuacagcuccgccaacaacugcacguucgaguacgugagccagcccuuccugauggaccuggagggcaagcaggggaacuucaagaaccuccgcgaguucguguucaagaacaucgacggcuacuucaagaucuacuccaagcacaccccgaucaaccugguccgggaccugccccagggguucagcgcccucgagccccugguggaccugcccaucggcaucaacaucacccgcuuccagacccuccuggcccugcaccgguccuaccucacgccgggggacagcagcuccggcuggaccgcgggcgccgccgccuacuacgugggguaccugcagccccgcaccuuccugcucaaguacaacgagaacggcaccaucacggacgcggucgacugcgcccuggacccccugagcgagaccaagugcacccucaaguccuucaccguggagaaggggaucuaccagacgagcaacuuccgggugcagcccaccgaguccaucguccgcuucccgaacaucaccaaccugugccccuucggcgagguguucaacgccacccgguucgccagcgucuacgccuggaaccgcaagcggaucuccaacugcguggcggacuacagcgugcuguacaacuccgccagcuucuccacguucaagugcuacggcgucagccccaccaagcucaacgaccugugcuucaccaacguguacgccgacuccuucgugauccgcggggacgagguccggcagaucgcccccggccagaccgggaagaucgccgacuacaacuacaagcugccggacgacuucacgggcugcgugaucgcguggaacagcaacaaccucgacuccaaggucgggggcaacuacaacuaccuguaccgccuguuccgcaagagcaaccucaagcccuucgagcgggacaucuccaccgagaucuaccaggccggcagcacccccugcaacggggugaagggcuucaacugcuacuucccccugcaguccuacggguuccagccgaccaacggcgugggguaccagcccuaccggguggucgugcugagcuucgagcuccugcacgcccccgccacggugugcggccccaagaaguccaccaaccuggucaagaacaagugcgugaacuucaacuucaacggccucaccgggaccggcgugcugaccgagagcaacaagaaguuccugccguuccagcaguucgggcgcgacaucgccgacacgaccgacgcgguccgcgacccccagacccuggagauccucgacaucacccccugcagcuucggcgggguguccgugaucacgccgggcaccaacaccagcaaccaggucgccgugcuguaccagggcgugaacugcaccgagguccccguggccauccacgccgaccagcugacgcccaccuggcggguguacuccaccggcagcaacgucuuccagacccgcgccgggugccucaucggcgcggagcacgugaacaacuccuacgagugcgacauccccaucggggccggcaucugcgccagcuaccagacgcagaccaacuccccgcggcgcgcccggagcguggcgucccagagcaucaucgccuacaccaugucccugggcgccgagaacagcgucgccuacuccaacaacagcaucgccauccccaccaacuucacgaucuccgugaccaccgagauccugcccgugagcaugaccaagacgagcgucgacugcaccauguacaucugcggggacuccaccgagugcagcaaccuccugcugcaguacggcuccuucugcacccagcucaaccgcgcgcugacggggaucgccguggagcaggacaagaacacccaggagguguucgcccaggucaagcagaucuacaagacgcccccgaucaaggacuucggcggguucaacuucagccagauccugcccgaccccuccaagcccagcaagcgguccuucaucgaggaccuccuguucaacaaggugacccuggccgacgccggcuucaucaagcaguacggcgacugccucggggacaucgcggcccgcgaccugaucugcgcccagaaguucaacggccugaccgugcucccgccccugcugaccgacgagaugaucgcccaguacaccagcgcccuccuggcggggaccaucacguccggcuggaccuucggggccggcgccgcccugcagauccccuucgcgaugcagauggccuaccgguucaacggcaucggggucacccagaacgugcucuacgagaaccagaagcugaucgccaaccaguucaacagcgccaucggcaagauccaggacucccugagcuccaccgccagcgcgcucgggaagcugcaggacguggucaaccagaacgcccaggcccugaacacgcucgugaagcagcuguccagcaacuucggcgccaucuccagcgugcugaacgacauccucucccgccuggacaaggucgaggccgaggugcagaucgaccggcugaucaccgggcgccuccagagccugcagaccuacgugacccagcagcugauccgggcggccgagauccgcgccagcgccaaccucgccgcgaccaagauguccgagugcguccugggccagagcaagcggguggacuucugcggcaagggguaccaccugauguccuucccccagagcgccccgcacggcguggucuuccuccacgugacguacguccccgcccaggagaagaacuucaccaccgcccccgcgaucugccacgacgggaaggcccacuucccccgcgagggcguguucguguccaacgggacccacugguucgucacgcagcggaacuucuacgagccgcagaucaucaccaccgacaacaccuucgugagcggcaacugcgacguggucaucggcaucgugaacaacacgguguacgacccccugcagcccgagcuggacuccuucaaggaggagcucgacaaguacuucaagaaccacaccagccccgacgucgaccugggggacaucuccggcaucaacgccagcguggugaacauccagaaggagaucgaccgccugaacgaggucgccaagaaccucaacgagucccugaucgaccugcaggagcucgggaaguacgagcaguacaucaaguggccgugguacaucuggcugggcuucaucgccggccugaucgcgaucgugauggugaccaucaugcucugcugcaugaccagcugcugcuccugccugaaggggugcugcagcugcggcuccugcugcaaguucgacgaggacgacagcgagcccguccugaagggggugaagcuccacuacacgugaggacuaguguccaccugucccuccugggcugcuggauugucucguuuuccugccaaauaaacaggaucagcgcuuuacagaucucaaaggcucuuuucagagccaccaaaaaaaaaaaaaaaaaaaaaaaaaaaaaaaaaaaaaaaaaaaaaaaaaaaaaaaaaaaaaaaaaaaaaaaaaaaaaaaaaaaaaaaaaaaaaaaaaaaaa

SEQ ID NO: 23865 - RNA, 4129 nt, Artificial Sequence
  SARS-CoV-2/Wuhan/WIV05/2019__EPI_ISL_402128 spike protein mRNA gc (1-1273)(L18F_T20N_P26S_D138Y_R190S_K417T_E484K_N501Y_D614G_H655Y _T1027I)
aggagacccgugacccggaaguuguacggcuacgcgacuuucccucccacaaacccucgcgcccuuccuuuccuacuugggcccggcagaaagcuuaccauguucguguuccugguccuccugccccuggugagcucccagugcgugaacuucaccaaccgcacgcagcugccgagcgccuacaccaacagcuucacccggggcgucuacuaccccgacaagguguuccgcuccagcgugcugcacuccacccaggaccucuuccugcccuucuucagcaacgucacgugguuccacgccauccacguguccgggaccaacggcaccaagcgguucgacaacccggugcugcccuucaacgacggggucuacuucgcgagcaccgagaaguccaacaucauccgcggcuggaucuucgggacgacccucgacagcaagacccagucccugcugaucgugaacaacgccaccaacguggucaucaaggugugcgaguuccaguucugcaacuaccccuuccucggcguguacuaccacaagaacaacaagagcuggauggaguccgaguuccgggucuacagcuccgccaacaacugcacguucgaguacgugagccagcccuuccugauggaccuggagggcaagcaggggaacuucaagaaccucagcgaguucguguucaagaacaucgacggcuacuucaagaucuacuccaagcacaccccgaucaaccugguccgggaccugccccagggguucagcgcccucgagccccugguggaccugcccaucggcaucaacaucacccgcuuccagacccuccuggcccugcaccgguccuaccucacgccgggggacagcagcuccggcuggaccgcgggcgccgccgccuacuacgugggguaccugcagccccgcaccuuccugcucaaguacaacgagaacggcaccaucacggacgcggucgacugcgcccuggacccccugagcgagaccaagugcacccucaaguccuucaccguggagaaggggaucuaccagacgagcaacuuccgggugcagcccaccgaguccaucguccgcuucccgaacaucaccaaccugugccccuucggcgagguguucaacgccacccgguucgccagcgucuacgccuggaaccgcaagcggaucuccaacugcguggcggacuacagcgugcuguacaacuccgccagcuucuccacguucaagugcuacggcgucagccccaccaagcucaacgaccugugcuucaccaacguguacgccgacuccuucgugauccgcggggacgagguccggcagaucgcccccggccagaccgggaccaucgccgacuacaacuacaagcugccggacgacuucacgggcugcgugaucgcguggaacagcaacaaccucgacuccaaggucgggggcaacuacaacuaccuguaccgccuguuccgcaagagcaaccucaagcccuucgagcgggacaucuccaccgagaucuaccaggccggcagcacccccugcaacggggugaagggcuucaacugcuacuucccccugcaguccuacggguuccagccgaccuacggcgugggguaccagcccuaccggguggucgugcugagcuucgagcuccugcacgcccccgccacggugugcggccccaagaaguccaccaaccuggucaagaacaagugcgugaacuucaacuucaacggccucaccgggaccggcgugcugaccgagagcaacaagaaguuccugccguuccagcaguucgggcgcgacaucgccgacacgaccgacgcgguccgcgacccccagacccuggagauccucgacaucacccccugcagcuucggcgggguguccgugaucacgccgggcaccaacaccagcaaccaggucgccgugcuguaccagggcgugaacugcaccgagguccccguggccauccacgccgaccagcugacgcccaccuggcggguguacuccaccggcagcaacgucuuccagacccgcgccgggugccucaucggcgcggaguacgugaacaacuccuacgagugcgacauccccaucggggccggcaucugcgccagcuaccagacgcagaccaacuccccgcggcgcgcccggagcguggcgucccagagcaucaucgccuacaccaugucccugggcgccgagaacagcgucgccuacuccaacaacagcaucgccauccccaccaacuucacgaucuccgugaccaccgagauccugcccgugagcaugaccaagacgagcgucgacugcaccauguacaucugcggggacuccaccgagugcagcaaccuccugcugcaguacggcuccuucugcacccagcucaaccgcgcgcugacggggaucgccguggagcaggacaagaacacccaggagguguucgcccaggucaagcagaucuacaagacgcccccgaucaaggacuucggcggguucaacuucagccagauccugcccgaccccuccaagcccagcaagcgguccuucaucgaggaccuccuguucaacaaggugacccuggccgacgccggcuucaucaagcaguacggcgacugccucggggacaucgcggcccgcgaccugaucugcgcccagaaguucaacggccugaccgugcucccgccccugcugaccgacgagaugaucgcccaguacaccagcgcccuccuggcggggaccaucacguccggcuggaccuucggggccggcgccgcccugcagauccccuucgcgaugcagauggccuaccgguucaacggcaucggggucacccagaacgugcucuacgagaaccagaagcugaucgccaaccaguucaacagcgccaucggcaagauccaggacucccugagcuccaccgccagcgcgcucgggaagcugcaggacguggucaaccagaacgcccaggcccugaacacgcucgugaagcagcuguccagcaacuucggcgccaucuccagcgugcugaacgacauccucucccgccuggacaaggucgaggccgaggugcagaucgaccggcugaucaccgggcgccuccagagccugcagaccuacgugacccagcagcugauccgggcggccgagauccgcgccagcgccaaccucgccgcgaucaagauguccgagugcguccugggccagagcaagcggguggacuucugcggcaagggguaccaccugauguccuucccccagagcgccccgcacggcguggucuuccuccacgugacguacguccccgcccaggagaagaacuucaccaccgcccccgcgaucugccacgacgggaaggcccacuucccccgcgagggcguguucguguccaacgggacccacugguucgucacgcagcggaacuucuacgagccgcagaucaucaccaccgacaacaccuucgugagcggcaacugcgacguggucaucggcaucgugaacaacacgguguacgacccccugcagcccgagcuggacuccuucaaggaggagcucgacaaguacuucaagaaccacaccagccccgacgucgaccugggggacaucuccggcaucaacgccagcguggugaacauccagaaggagaucgaccgccugaacgaggucgccaagaaccucaacgagucccugaucgaccugcaggagcucgggaaguacgagcaguacaucaaguggccgugguacaucuggcugggcuucaucgccggccugaucgcgaucgugauggugaccaucaugcucugcugcaugaccagcugcugcuccugccugaaggggugcugcagcugcggcuccugcugcaaguucgacgaggacgacagcgagcccguccugaagggggugaagcuccacuacacgugaggacuaguguccaccugucccuccugggcugcuggauugucucguuuuccugccaaauaaacaggaucagcgcuuuacagaucucaaaggcucuuuucagagccaccaaaaaaaaaaaaaaaaaaaaaaaaaaaaaaaaaaaaaaaaaaaaaaaaaaaaaaaaaaaaaaaaaaaaaaaaaaaaaaaaaaaaaaaaaaaaaaaaaaaaa

SEQ ID NO: 23866 - RNA, 4129 nt, Artificial Sequence
  SARS-CoV-2/Wuhan/WIV05/2019__EPI_ISL_402128 spike protein mRNA gc (1-1273)(S13I_W152C_L452R_D614G)
aggagacccgugacccggaaguuguacggcuacgcgacuuucccucccacaaacccucgcgcccuuccuuuccuacuugggcccggcagaaagcuuaccauguucguguuccugguccuccugccccuggugagcauccagugcgugaaccucaccacccgcacgcagcugccgcccgccuacaccaacagcuucacccggggcgucuacuaccccgacaagguguuccgcuccagcgugcugcacuccacccaggaccucuuccugcccuucuucagcaacgucacgugguuccacgccauccacguguccgggaccaacggcaccaagcgguucgacaacccggugcugcccuucaacgacggggucuacuucgcgagcaccgagaaguccaacaucauccgcggcuggaucuucgggacgacccucgacagcaagacccagucccugcugaucgugaacaacgccaccaacguggucaucaaggugugcgaguuccaguucugcaacgaccccuuccucggcguguacuaccacaagaacaacaagagcugcauggaguccgaguuccgggucuacagcuccgccaacaacugcacguucgaguacgugagccagcccuuccugauggaccuggagggcaagcaggggaacuucaagaaccuccgcgaguucguguucaagaacaucgacggcuacuucaagaucuacuccaagcacaccccgaucaaccugguccgggaccugccccagggguucagcgcccucgagccccugguggaccugcccaucggcaucaacaucacccgcuuccagacccuccuggcccugcaccgguccuaccucacgccgggggacagcagcuccggcuggaccgcgggcgccgccgccuacuacgugggguaccugcagccccgcaccuuccugcucaaguacaacgagaacggcaccaucacggacgcggucgacugcgcccuggacccccugagcgagaccaagugcacccucaaguccuucaccguggagaaggggaucuaccagacgagcaacuuccgggugcagcccaccgaguccaucguccgcuucccgaacaucaccaaccugugccccuucggcgagguguucaacgccacccgguucgccagcgucuacgccuggaaccgcaagcggaucuccaacugcguggcggacuacagcgugcuguacaacuccgccagcuucuccacguucaagugcuacggcgucagccccaccaagcucaacgaccugugcuucaccaacguguacgccgacuccuucgugauccgcggggacgagguccggcagaucgcccccggccagaccgggaagaucgccgacuacaacuacaagcugccggacgacuucacgggcugcgugaucgcguggaacagcaacaaccucgacuccaaggucgggggcaacuacaacuaccgcuaccgccuguuccgcaagagcaaccucaagcccuucgagcgggacaucuccaccgagaucuaccaggccggcagcacccccugcaacgggguggagggcuucaacugcuacuucccccugcaguccuacggguuccagccgaccaacggcgugggguaccagcccuaccggguggucgugcugagcuucgagcuccugcacgcccccgccacggugugcggccccaagaaguccaccaaccuggucaagaacaagugcgugaacuucaacuucaacggccucaccgggaccggcgugcugaccgagagcaacaagaaguuccugccguuccagcaguucgggcgcgacaucgccgacacgaccgacgcgguccgcgacccccagacccuggagauccucgacaucacccccugcagcuucggcgggguguccgugaucacgccgggcaccaacaccagcaaccaggucgccgugcuguaccagggcgugaacugcaccgagguccccguggccauccacgccgaccagcugacgcccaccuggcggguguacuccaccggcagcaacgucuuccagacccgcgccgggugccucaucggcgcggagcacgugaacaacuccuacgagugcgacauccccaucggggccggcaucugcgccagcuaccagacgcagaccaacuccccgcggcgcgcccggagcguggcgucccagagcaucaucgccuacaccaugucccugggcgccgagaacagcgucgccuacuccaacaacagcaucgccauccccaccaacuucacgaucuccgugaccaccgagauccugcccgugagcaugaccaagacgagcgucgacugcaccauguacaucugcggggacuccaccgagugcagcaaccuccugcugcaguacggcuccuucugcacccagcucaaccgcgcgcugacggggaucgccguggagcaggacaagaacacccaggagguguucgcccaggucaagcagaucuacaagacgcccccgaucaaggacuucggcggguucaacuucagccagauccugcccgaccccuccaagcccagcaagcgguccuucaucgaggaccuccuguucaacaaggugacccuggccgacgccggcuucaucaagcaguacggcgacugccucggggacaucgcggcccgcgaccugaucugcgcccagaaguucaacggccugaccgugcucccgccccugcugaccgacgagaugaucgcccaguacaccagcgcccuccuggcggggaccaucacguccggcuggaccuucggggccggcgccgcccugcagauccccuucgcgaugcagauggccuaccgguucaacggcaucggggucacccagaacgugcucuacgagaaccagaagcugaucgccaaccaguucaacagcgccaucggcaagauccaggacucccugagcuccaccgccagcgcgcucgggaagcugcaggacguggucaaccagaacgcccaggcccugaacacgcucgugaagcagcuguccagcaacuucggcgccaucuccagcgugcugaacgacauccucucccgccuggacaaggucgaggccgaggugcagaucgaccggcugaucaccgggcgccuccagagccugcagaccuacgugacccagcagcugauccgggcggccgagauccgcgccagcgccaaccucgccgcgaccaagauguccgagugcguccugggccagagcaagcggguggacuucugcggcaagggguaccaccugauguccuucccccagagcgccccgcacggcguggucuuccuccacgugacguacguccccgcccaggagaagaacuucaccaccgcccccgcgaucugccacgacgggaaggcccacuucccccgcgagggcguguucguguccaacgggacccacugguucgucacgcagcggaacuucuacgagccgcagaucaucaccaccgacaacaccuucgugagcggcaacugcgacguggucaucggcaucgugaacaacacgguguacgacccccugcagcccgagcuggacuccuucaaggaggagcucgacaaguacuucaagaaccacaccagccccgacgucgaccugggggacaucuccggcaucaacgccagcguggugaacauccagaaggagaucgaccgccugaacgaggucgccaagaaccucaacgagucccugaucgaccugcaggagcucgggaaguacgagcaguacaucaaguggccgugguacaucuggcugggcuucaucgccggccugaucgcgaucgugauggugaccaucaugcucugcugcaugaccagcugcugcuccugccugaaggggugcugcagcugcggcuccugcugcaaguucgacgaggacgacagcgagcccguccugaagggggugaagcuccacuacacgugaggacuaguguccaccugucccuccugggcugcuggauugucucguuuuccugccaaauaaacaggaucagcgcuuuacagaucucaaaggcucuuuucagagccaccaaaaaaaaaaaaaaaaaaaaaaaaaaaaaaaaaaaaaaaaaaaaaaaaaaaaaaaaaaaaaaaaaaaaaaaaaaaaaaaaaaaaaaaaaaaaaaaaaaaaa

SEQ ID NO: 23867 - RNA, 4129 nt, Artificial Sequence; identical to SEQ ID NO: 23849
  SARS-CoV-2/Wuhan/WIV05/2019__EPI_ISL_402128 spike protein mRNA gc (1-1273)

SEQ ID NO: 23868 - RNA, 4129 nt, Artificial Sequence
  SARS-CoV-2/Wuhan/WIV05/2019__EPI_ISL_402128 spike protein mRNA gc (1-1273)(D614G)
aggagacccgugacccggaaguuguacggcuacgcgacuuucccucccacaaacccucgcgcccuuccuuuccuacuugggcccggcagaaagcuuaccauguucguguuccugguccuccugccccuggugagcucccagugcgugaaccucaccacccgcacgcagcugccgcccgccuacaccaacagcuucacccggggcgucuacuaccccgacaagguguuccgcuccagcgugcugcacuccacccaggaccucuuccugcccuucuucagcaacgucacgugguuccacgccauccacguguccgggaccaacggcaccaagcgguucgacaacccggugcugcccuucaacgacggggucuacuucgcgagcaccgagaaguccaacaucauccgcggcuggaucuucgggacgacccucgacagcaagacccagucccugcugaucgugaacaacgccaccaacguggucaucaaggugugcgaguuccaguucugcaacgaccccuuccucggcguguacuaccacaagaacaacaagagcuggauggaguccgaguuccgggucuacagcuccgccaacaacugcacguucgaguacgugagccagcccuuccugauggaccuggagggcaagcaggggaacuucaagaaccuccgcgaguucguguucaagaacaucgacggcuacuucaagaucuacuccaagcacaccccgaucaaccugguccgggaccugccccagggguucagcgcccucgagccccugguggaccugcccaucggcaucaacaucacccgcuuccagacccuccuggcccugcaccgguccuaccucacgccgggggacagcagcuccggcuggaccgcgggcgccgccgccuacuacgugggguaccugcagccccgcaccuuccugcucaaguacaacgagaacggcaccaucacggacgcggucgacugcgcccuggacccccugagcgagaccaagugcacccucaaguccuucaccguggagaaggggaucuaccagacgagcaacuuccgggugcagcccaccgaguccaucguccgcuucccgaacaucaccaaccugugccccuucggcgagguguucaacgccacccgguucgccagcgucuacgccuggaaccgcaagcggaucuccaacugcguggcggacuacagcgugcuguacaacuccgccagcuucuccacguucaagugcuacggcgucagccccaccaagcucaacgaccugugcuucaccaacguguacgccgacuccuucgugauccgcggggacgagguccggcagaucgcccccggccagaccgggaagaucgccgacuacaacuacaagcugccggacgacuucacgggcugcgugaucgcguggaacagcaacaaccucgacuccaaggucgggggcaacuacaacuaccuguaccgccuguuccgcaagagcaaccucaagcccuucgagcgggacaucuccaccgagaucuaccaggccggcagcacccccugcaacgggguggagggcuucaacugcuacuucccccugcaguccuacggguuccagccgaccaacggcgugggguaccagcccuaccggguggucgugcugagcuucgagcuccugcacgcccccgccacggugugcggccccaagaaguccaccaaccuggucaagaacaagugcgugaacuucaacuucaacggccucaccgggaccggcgugcugaccgagagcaacaagaaguuccugccguuccagcaguucgggcgcgacaucgccgacacgaccgacgcgguccgcgacccccagacccuggagauccucgacaucacccccugcagcuucggcgggguguccgugaucacgccgggcaccaacaccagcaaccaggucgccgugcuguaccagggcgugaacugcaccgagguccccguggccauccacgccgaccagcugacgcccaccuggcggguguacuccaccgggagcaacgucuuccagacccgcgccggcugccucaucggggcggagcacgugaacaacuccuacgagugcgacauccccaucggcgccggcaucugcgccagcuaccagacgcagaccaacuccccgcggcgcgcccggagcguggcgucccagagcaucaucgccuacaccaugucccugggggccgagaacagcgucgccuacuccaacaacagcaucgccauccccaccaacuucacgaucuccgugaccaccgagauccugcccgugagcaugaccaagacgagcgucgacugcaccauguacaucugcggcgacuccaccgagugcagcaaccuccugcugcaguacggguccuucugcacccagcucaaccgcgcgcugacgggcaucgccguggagcaggacaagaacacccaggagguguucgcccaggucaagcagaucuacaagacgcccccgaucaaggacuucgggggcuucaacuucagccagauccugcccgaccccuccaagcccagcaagcgguccuucaucgaggaccuccuguucaacaaggugacccuggccgacgccggcuucaucaagcaguacggggacugccucggcgacaucgcggcccgcgaccugaucugcgcccagaaguucaacgggcugaccgugcucccgccccugcugaccgacgagaugaucgcccaguacaccagcgcccuccuggcgggcaccaucacguccggguggaccuucggcgccggcgccgcccugcagauccccuucgcgaugcagauggccuaccgguucaacgggaucggcgucacccagaacgugcucuacgagaaccagaagcugaucgccaaccaguucaacagcgccaucgggaagauccaggacucccugagcuccaccgccagcgcgcucggcaagcugcaggacguggucaaccagaacgcccaggcccugaacacgcucgugaagcagcuguccagcaacuucggggccaucuccagcgugcugaacgacauccucucccgccuggacaaggucgaggccgaggugcagaucgaccggcugaucaccggccgccuccagagccugcagaccuacgugacccagcagcugauccgggcggccgagauccgcgccagcgccaaccucgccgcgaccaagauguccgagugcguccugggccagagcaagcggguggacuucugcgggaagggcuaccaccugauguccuucccccagagcgccccgcacgggguggucuuccuccacgugacguacguccccgcccaggagaagaacuucaccaccgcccccgcgaucugccacgacggcaaggcccacuucccccgcgaggggguguucguguccaacggcacccacugguucgucacgcagcggaacuucuacgagccgcagaucaucaccaccgacaacaccuucgugagcggcaacugcgacguggucaucgggaucgugaacaacacgguguacgacccccugcagcccgagcuggacuccuucaaggaggagcucgacaaguacuucaagaaccacaccagccccgacgucgaccugggcgacaucuccgggaucaacgccagcguggugaacauccagaaggagaucgaccgccugaacgaggucgccaagaaccucaacgagucccugaucgaccugcaggagcucggcaaguacgagcaguacaucaaguggccgugguacaucuggcugggcuucaucgccgggcugaucgcgaucgugauggugaccaucaugcucugcugcaugaccagcugcugcuccugccugaagggcugcugcagcugcggguccugcugcaaguucgacgaggacgacagcgagcccguccugaagggcgugaagcuccacuacacgugaggacuaguguccaccugucccuccugggcugcuggauugucucguuuuccugccaaauaaacaggaucagcgcuuuacagaucucaaaggcucuuuucagagccaccaaaaaaaaaaaaaaaaaaaaaaaaaaaaaaaaaaaaaaaaaaaaaaaaaaaaaaaaaaaaaaaaaaaaaaaaaaaaaaaaaaaaaaaaaaaaaaaaaaaaa

SEQ ID NO: 23869 - RNA, 4129 nt, Artificial Sequence
  SARS-CoV-2/Wuhan/WIV05/2019__EPI_ISL_402128 spike protein mRNA gc (1-1273)(A222V_D614G)
aggagacccgugacccggaaguuguacggcuacgcgacuuucccucccacaaacccucgcgcccuuccuuuccuacuugggcccggcagaaagcuuaccauguucguguuccugguccuccugccccuggugagcucccagugcgugaaccucaccacccgcacgcagcugccgcccgccuacaccaacagcuucacccggggcgucuacuaccccgacaagguguuccgcuccagcgugcugcacuccacccaggaccucuuccugcccuucuucagcaacgucacgugguuccacgccauccacguguccgggaccaacggcaccaagcgguucgacaacccggugcugcccuucaacgacggggucuacuucgcgagcaccgagaaguccaacaucauccgcggcuggaucuucgggacgacccucgacagcaagacccagucccugcugaucgugaacaacgccaccaacguggucaucaaggugugcgaguuccaguucugcaacgaccccuuccucggcguguacuaccacaagaacaacaagagcuggauggaguccgaguuccgggucuacagcuccgccaacaacugcacguucgaguacgugagccagcccuuccugauggaccuggagggcaagcaggggaacuucaagaaccuccgcgaguucguguucaagaacaucgacggcuacuucaagaucuacuccaagcacaccccgaucaaccugguccgggaccugccccagggguucagcgugcucgagccccugguggaccugcccaucggcaucaacaucacccgcuuccagacccuccuggcccugcaccgguccuaccucacgccgggggacagcagcuccggcuggaccgccggcgcggccgccuacuacgucggguaccugcagccccgcaccuuccugcucaaguacaacgagaacggcaccaucacggacgccguggacugcgcgcuggacccccugagcgagaccaagugcacccucaaguccuucaccguggagaaggggaucuaccagacgagcaacuuccggguccagcccaccgaguccaucgugcgcuucccgaacaucaccaaccugugccccuucggcgaggucuucaacgccacccgguucgccagcguguacgccuggaaccgcaagcggaucuccaacugcguggccgacuacagcguccuguacaacuccgcgagcuucuccacguucaagugcuacggcgugagccccaccaagcucaacgaccugugcuucaccaacguguacgccgacuccuucgucauccgcggggacgaggugcggcagaucgcccccggccagaccgggaagaucgccgacuacaacuacaagcugccggacgacuucacgggcugcgugaucgccuggaacagcaacaaccucgacuccaaggucgggggcaacuacaacuaccuguaccgccuguuccgcaagagcaaccucaagcccuucgagcgggacaucuccaccgagaucuaccaggcgggcagcacccccugcaacgggguggagggcuucaacugcuacuucccccugcaguccuacggguuccagccgaccaacggcgugggguaccagcccuaccgggucguggugcugagcuucgagcuccugcacgcccccgccacggucugcggccccaagaaguccaccaaccuggugaagaacaagugcgugaacuucaacuucaacggccucaccgggaccggcguccugaccgagagcaacaagaaguuccugccguuccagcaguucgggcgcgacaucgccgacacgaccgacgccgugcgcgacccccagacccuggagauccucgacaucacccccugcagcuucggcgggguguccgucaucacgccgggcaccaacaccagcaaccagguggcggugcuguaccagggcgucaacugcaccgaggugcccguggccauccacgccgaccagcugacgcccaccuggcgggucuacuccaccgggagcaacguguuccagacccgcgccggcugccucaucggggccgagcacgugaacaacuccuacgagugcgacauccccaucggcgcgggcaucugcgccagcuaccagacgcagaccaacuccccgcggcgcgcccggagcgucgccucccagagcaucaucgcguacaccaugucccugggggccgagaacagcguggccuacuccaacaacagcaucgccauccccaccaacuucacgaucuccgugaccaccgagauccugcccgucagcaugaccaagacgagcguggacugcaccauguacaucugcggcgacuccaccgagugcagcaaccuccugcugcaguacggguccuucugcacccagcucaaccgcgcccugacgggcaucgcgguggagcaggacaagaacacccaggaggucuucgcccaggugaagcagaucuacaagacgcccccgaucaaggacuucgggggcuucaacuucagccagauccugcccgaccccuccaagcccagcaagcgguccuucaucgaggaccuccuguucaacaaggugacccuggccgacgccggcuucaucaagcaguacggggacugccucggcgacaucgccgcgcgcgaccugaucugcgcccagaaguucaacgggcugaccguccucccgccccugcugaccgacgagaugaucgcccaguacaccagcgcccuccuggccggcaccaucacguccggguggaccuucggcgcgggcgccgcccugcagauccccuucgccaugcagauggcguaccgguucaacgggaucggcgugacccagaacgugcucuacgagaaccagaagcugaucgccaaccaguucaacagcgccaucgggaagauccaggacucccugagcuccaccgccagcgcccucggcaagcugcaggacgucgugaaccagaacgcgcaggcccugaacacgcucgugaagcagcuguccagcaacuucggggccaucuccagcguccugaacgacauccucucccgccuggacaagguggaggccgaggugcagaucgaccggcugaucaccggccgccuccagagccugcagaccuacgucacccagcagcugauccgggccgcggagauccgcgccagcgccaaccucgccgccaccaagauguccgagugcgugcugggccagagcaagcggguggacuucugcgggaagggcuaccaccugauguccuucccccagagcgcgccgcacggggucguguuccuccacgucacguacgugcccgcccaggagaagaacuucaccaccgcccccgccaucugccacgacggcaaggcgcacuucccccgcgaggggguguucgucuccaacggcacccacugguucgugacgcagcggaacuucuacgagccgcagaucaucaccaccgacaacaccuucgugagcggcaacugcgacgucgugaucgggaucgugaacaacacggucuacgacccccugcagcccgagcuggacuccuucaaggaggagcucgacaaguacuucaagaaccacaccagccccgacguggaccugggcgacaucuccgggaucaacgccagcguggucaacauccagaaggagaucgaccgccugaacgagguggccaagaaccucaacgagucccugaucgaccugcaggagcucggcaaguacgagcaguacaucaaguggccgugguacaucuggcugggcuucaucgccgggcugaucgccaucgugauggucaccaucaugcucugcugcaugaccagcugcugcuccugccugaagggcugcugcagcugcggguccugcugcaaguucgacgaggacgacagcgagcccgugcugaagggcgugaagcuccacuacacgugaggacuaguguccaccugucccuccugggcugcuggauugucucguuuuccugccaaauaaacaggaucagcgcuuuacagaucucaaaggcucuuuucagagccaccaaaaaaaaaaaaaaaaaaaaaaaaaaaaaaaaaaaaaaaaaaaaaaaaaaaaaaaaaaaaaaaaaaaaaaaaaaaaaaaaaaaaaaaaaaaaaaaaaaaaa

SEQ ID NO: 23870 - RNA, 4129 nt, Artificial Sequence
  SARS-CoV-2/Wuhan/WIV05/2019__EPI_ISL_402128 spike protein mRNA gc (1-1273)(N439K_D614G)
aggagacccgugacccggaaguuguacggcuacgcgacuuucccucccacaaacccucgcgcccuuccuuuccuacuugggcccggcagaaagcuuaccauguucguguuccugguccuccugccccuggugagcucccagugcgugaaccucaccacccgcacgcagcugccgcccgccuacaccaacagcuucacccggggcgucuacuaccccgacaagguguuccgcuccagcgugcugcacuccacccaggaccucuuccugcccuucuucagcaacgucacgugguuccacgccauccacguguccgggaccaacggcaccaagcgguucgacaacccggugcugcccuucaacgacggggucuacuucgcgagcaccgagaaguccaacaucauccgcggcuggaucuucgggacgacccucgacagcaagacccagucccugcugaucgugaacaacgccaccaacguggucaucaaggugugcgaguuccaguucugcaacgaccccuuccucggcguguacuaccacaagaacaacaagagcuggauggaguccgaguuccgggucuacagcuccgccaacaacugcacguucgaguacgugagccagcccuuccugauggaccuggagggcaagcaggggaacuucaagaaccuccgcgaguucguguucaagaacaucgacggcuacuucaagaucuacuccaagcacaccccgaucaaccugguccgggaccugccccagggguucagcgcccucgagccccugguggaccugcccaucggcaucaacaucacccgcuuccagacccuccuggcccugcaccgguccuaccucacgccgggggacagcagcuccggcuggaccgcgggcgccgccgccuacuacgugggguaccugcagccccgcaccuuccugcucaaguacaacgagaacggcaccaucacggacgcggucgacugcgcccuggacccccugagcgagaccaagugcacccucaaguccuucaccguggagaaggggaucuaccagacgagcaacuuccgggugcagcccaccgaguccaucguccgcuucccgaacaucaccaaccugugccccuucggcgagguguucaacgccacccgguucgccagcgucuacgccuggaaccgcaagcggaucuccaacugcguggcggacuacagcgugcuguacaacuccgccagcuucuccacguucaagugcuacggcgucagccccaccaagcucaacgaccugugcuucaccaacguguacgccgacuccuucgugauccgcggggacgagguccggcagaucgcccccggccagaccgggaagaucgccgacuacaacuacaagcugccggacgacuucacgggcugcgugaucgcguggaacagcaagaaccucgacuccaaggucgggggcaacuacaacuaccuguaccgccuguuccgcaagagcaaccucaagcccuucgagcgggacaucuccaccgagaucuaccaggccggcagcacccccugcaacgggguggagggcuucaacugcuacuucccccugcaguccuacggguuccagccgaccaacggcgugggguaccagcccuaccggguggucgugcugagcuucgagcuccugcacgcccccgccacggugugcggccccaagaaguccaccaaccuggucaagaacaagugcgugaacuucaacuucaacggccucaccgggaccggcgugcugaccgagagcaacaagaaguuccugccguuccagcaguucgggcgcgacaucgccgacacgaccgacgcgguccgcgacccccagacccuggagauccucgacaucacccccugcagcuucggcgggguguccgugaucacgccgggcaccaacaccagcaaccaggucgccgugcuguaccagggcgugaacugcaccgagguccccguggccauccacgccgaccagcugacgcccaccuggcggguguacuccaccgggagcaacgucuuccagacccgcgccggcugccucaucggggcggagcacgugaacaacuccuacgagugcgacauccccaucggcgccggcaucugcgccagcuaccagacgcagaccaacuccccgcggcgcgcccggagcguggcgucccagagcaucaucgccuacaccaugucccugggggccgagaacagcgucgccuacuccaacaacagcaucgccauccccaccaacuucacgaucuccgugaccaccgagauccugcccgugagcaugaccaagacgagcgucgacugcaccauguacaucugcggcgacuccaccgagugcagcaaccuccugcugcaguacggguccuucugcacccagcucaaccgcgcgcugacgggcaucgccguggagcaggacaagaacacccaggagguguucgcccaggucaagcagaucuacaagacgcccccgaucaaggacuucgggggcuucaacuucagccagauccugcccgaccccuccaagcccagcaagcgguccuucaucgaggaccuccuguucaacaaggugacccuggccgacgccggcuucaucaagcaguacggggacugccucggcgacaucgcggcccgcgaccugaucugcgcccagaaguucaacgggcugaccgugcucccgccccugcugaccgacgagaugaucgcccaguacaccagcgcccuccuggcgggcaccaucacguccggguggaccuucggcgccggcgccgcccugcagauccccuucgcgaugcagauggccuaccgguucaacgggaucggcgucacccagaacgugcucuacgagaaccagaagcugaucgccaaccaguucaacagcgccaucgggaagauccaggacucccugagcuccaccgccagcgcgcucggcaagcugcaggacguggucaaccagaacgcccaggcccugaacacgcucgugaagcagcuguccagcaacuucggggccaucuccagcgugcugaacgacauccucucccgccuggacaaggucgaggccgaggugcagaucgaccggcugaucaccggccgccuccagagccugcagaccuacgugacccagcagcugauccgggcggccgagauccgcgccagcgccaaccucgccgcgaccaagauguccgagugcguccugggccagagcaagcggguggacuucugcgggaagggcuaccaccugauguccuucccccagagcgccccgcacgggguggucuuccuccacgugacguacguccccgcccaggagaagaacuucaccaccgcccccgcgaucugccacgacggcaaggcccacuucccccgcgaggggguguucguguccaacggcacccacugguucgucacgcagcggaacuucuacgagccgcagaucaucaccaccgacaacaccuucgugagcggcaacugcgacguggucaucgggaucgugaacaacacgguguacgacccccugcagcccgagcuggacuccuucaaggaggagcucgacaaguacuucaagaaccacaccagccccgacgucgaccugggcgacaucuccgggaucaacgccagcguggugaacauccagaaggagaucgaccgccugaacgaggucgccaagaaccucaacgagucccugaucgaccugcaggagcucggcaaguacgagcaguacaucaaguggccgugguacaucuggcugggcuucaucgccgggcugaucgcgaucgugauggugaccaucaugcucugcugcaugaccagcugcugcuccugccugaagggcugcugcagcugcggguccugcugcaaguucgacgaggacgacagcgagcccguccugaagggcgugaagcuccacuacacgugaggacuaguguccaccugucccuccugggcugcuggauugucucguuuuccugccaaauaaacaggaucagcgcuuuacagaucucaaaggcucuuuucagagccaccaaaaaaaaaaaaaaaaaaaaaaaaaaaaaaaaaaaaaaaaaaaaaaaaaaaaaaaaaaaaaaaaaaaaaaaaaaaaaaaaaaaaaaaaaaaaaaaaaaaaa

SEQ ID NO: 23871 - RNA, 4129 nt, Artificial Sequence
  SARS-CoV-2/Wuhan/WIV05/2019__EPI_ISL_402128 spike protein mRNA gc (1-1273)(S477N_D614G)
aggagacccgugacccggaaguuguacggcuacgcgacuuucccucccacaaacccucgcgcccuuccuuuccuacuugggcccggcagaaagcuuaccauguucguguuccugguccuccugccccuggugagcucccagugcgugaaccucaccacccgcacgcagcugccgcccgccuacaccaacagcuucacccggggcgucuacuaccccgacaagguguuccgcuccagcgugcugcacuccacccaggaccucuuccugcccuucuucagcaacgucacgugguuccacgccauccacguguccgggaccaacggcaccaagcgguucgacaacccggugcugcccuucaacgacggggucuacuucgcgagcaccgagaaguccaacaucauccgcggcuggaucuucgggacgacccucgacagcaagacccagucccugcugaucgugaacaacgccaccaacguggucaucaaggugugcgaguuccaguucugcaacgaccccuuccucggcguguacuaccacaagaacaacaagagcuggauggaguccgaguuccgggucuacagcuccgccaacaacugcacguucgaguacgugagccagcccuuccugauggaccuggagggcaagcaggggaacuucaagaaccuccgcgaguucguguucaagaacaucgacggcuacuucaagaucuacuccaagcacaccccgaucaaccugguccgggaccugccccagggguucagcgcccucgagccccugguggaccugcccaucggcaucaacaucacccgcuuccagacccuccuggcccugcaccgguccuaccucacgccgggggacagcagcuccggcuggaccgcgggcgccgccgccuacuacgugggguaccugcagccccgcaccuuccugcucaaguacaacgagaacggcaccaucacggacgcggucgacugcgcccuggacccccugagcgagaccaagugcacccucaaguccuucaccguggagaaggggaucuaccagacgagcaacuuccgggugcagcccaccgaguccaucguccgcuucccgaacaucaccaaccugugccccuucggcgagguguucaacgccacccgguucgccagcgucuacgccuggaaccgcaagcggaucuccaacugcguggcggacuacagcgugcuguacaacuccgccagcuucuccacguucaagugcuacggcgucagccccaccaagcucaacgaccugugcuucaccaacguguacgccgacuccuucgugauccgcggggacgagguccggcagaucgcccccggccagaccgggaagaucgccgacuacaacuacaagcugccggacgacuucacgggcugcgugaucgcguggaacagcaacaaccucgacuccaaggucgggggcaacuacaacuaccuguaccgccuguuccgcaagagcaaccucaagcccuucgagcgggacaucuccaccgagaucuaccaggccggcaacacccccugcaacgggguggagggcuucaacugcuacuucccccugcagagcuacggguuccagccgaccaacggcgugggguaccagcccuaccggguggucgugcuguccuucgagcuccugcacgcccccgccacggugugcggccccaagaaguccaccaaccuggucaagaacaagugcgugaacuucaacuucaacggccucaccgggaccggcgugcugaccgagagcaacaagaaguuccugccguuccagcaguucgggcgcgacaucgccgacacgaccgacgcgguccgcgacccccagacccuggagauccucgacaucacccccugcagcuucggcggggugagcgugaucacgccgggcaccaacaccuccaaccaggucgccgugcuguaccagggcgugaacugcaccgagguccccguggccauccacgccgaccagcugacgcccaccuggcggguguacagcaccggguccaacgucuuccagacccgcgccggcugccucaucggggcggagcacgugaacaacagcuacgagugcgacauccccaucggcgccggcaucugcgccuccuaccagacgcagaccaacagcccgcggcgcgcccgguccguggcgagccaguccaucaucgccuacaccaugagccugggggccgagaacuccgucgccuacagcaacaacuccaucgccauccccaccaacuucacgaucagcgugaccaccgagauccugcccguguccaugaccaagacgagcgucgacugcaccauguacaucugcggcgacagcaccgagugcuccaaccuccugcugcaguacgggagcuucugcacccagcucaaccgcgcgcugacgggcaucgccguggagcaggacaagaacacccaggagguguucgcccaggucaagcagaucuacaagacgcccccgaucaaggacuucgggggcuucaacuucucccagauccugcccgaccccagcaagcccuccaagcggagcuucaucgaggaccuccuguucaacaaggugacccuggccgacgccggcuucaucaagcaguacggggacugccucggcgacaucgcggcccgcgaccugaucugcgcccagaaguucaacgggcugaccgugcucccgccccugcugaccgacgagaugaucgcccaguacaccuccgcccuccuggcgggcaccaucacgagcggguggaccuucggcgccggcgccgcccugcagauccccuucgcgaugcagauggccuaccgguucaacgggaucggcgucacccagaacgugcucuacgagaaccagaagcugaucgccaaccaguucaacuccgccaucgggaagauccaggacagccuguccagcaccgccuccgcgcucggcaagcugcaggacguggucaaccagaacgcccaggcccugaacacgcucgugaagcagcugagcuccaacuucggggccaucagcuccgugcugaacgacauccucagccgccuggacaaggucgaggccgaggugcagaucgaccggcugaucaccggccgccuccagucccugcagaccuacgugacccagcagcugauccgggcggccgagauccgcgccagcgccaaccucgccgcgaccaagaugagcgagugcguccugggccaguccaagcggguggacuucugcgggaagggcuaccaccugaugagcuucccccaguccgccccgcacgggguggucuuccuccacgugacguacguccccgcccaggagaagaacuucaccaccgcccccgcgaucugccacgacggcaaggcccacuucccccgcgaggggguguucgugagcaacggcacccacugguucgucacgcagcggaacuucuacgagccgcagaucaucaccaccgacaacaccuucguguccggcaacugcgacguggucaucgggaucgugaacaacacgguguacgacccccugcagcccgagcuggacagcuucaaggaggagcucgacaaguacuucaagaaccacaccucccccgacgucgaccugggcgacaucagcgggaucaacgccuccguggugaacauccagaaggagaucgaccgccugaacgaggucgccaagaaccucaacgagagccugaucgaccugcaggagcucggcaaguacgagcaguacaucaaguggccgugguacaucuggcugggcuucaucgccgggcugaucgcgaucgugauggugaccaucaugcucugcugcaugaccuccugcugcagcugccugaagggcugcugcuccugcgggagcugcugcaaguucgacgaggacgacuccgagcccguccugaagggcgugaagcuccacuacacgugaggacuaguguccaccugucccuccugggcugcuggauugucucguuuuccugccaaauaaacaggaucagcgcuuuacagaucucaaaggcucuuuucagagccaccaaaaaaaaaaaaaaaaaaaaaaaaaaaaaaaaaaaaaaaaaaaaaaaaaaaaaaaaaaaaaaaaaaaaaaaaaaaaaaaaaaaaaaaaaaaaaaaaaaaaa

SEQ ID NO: 23872 - RNA, 4129 nt, Artificial Sequence
  SARS-CoV-2/Wuhan/WIV05/2019__EPI_ISL_402128 spike protein mRNA gc (1-1273)(N501Y_D614G)
aggagacccgugacccggaaguuguacggcuacgcgacuuucccucccacaaacccucgcgcccuuccuuuccuacuugggcccggcagaaagcuuaccauguucguguuccugguccuccugccccuggugagcucccagugcgugaaccucaccacccgcacgcagcugccgcccgccuacaccaacagcuucacccggggcgucuacuaccccgacaagguguuccgcuccagcgugcugcacuccacccaggaccucuuccugcccuucuucagcaacgucacgugguuccacgccauccacguguccgggaccaacggcaccaagcgguucgacaacccggugcugcccuucaacgacggggucuacuucgcgagcaccgagaaguccaacaucauccgcggcuggaucuucgggacgacccucgacagcaagacccagucccugcugaucgugaacaacgccaccaacguggucaucaaggugugcgaguuccaguucugcaacgaccccuuccucggcguguacuaccacaagaacaacaagagcuggauggaguccgaguuccgggucuacagcuccgccaacaacugcacguucgaguacgugagccagcccuuccugauggaccuggagggcaagcaggggaacuucaagaaccuccgcgaguucguguucaagaacaucgacggcuacuucaagaucuacuccaagcacaccccgaucaaccugguccgggaccugccccagggguucagcgcccucgagccccugguggaccugcccaucggcaucaacaucacccgcuuccagacccuccuggcccugcaccgguccuaccucacgccgggggacagcagcuccggcuggaccgcgggcgccgccgccuacuacgugggguaccugcagccccgcaccuuccugcucaaguacaacgagaacggcaccaucacggacgcggucgacugcgcccuggacccccugagcgagaccaagugcacccucaaguccuucaccguggagaaggggaucuaccagacgagcaacuuccgggugcagcccaccgaguccaucguccgcuucccgaacaucaccaaccugugccccuucggcgagguguucaacgccacccgguucgccagcgucuacgccuggaaccgcaagcggaucuccaacugcguggcggacuacagcgugcuguacaacuccgccagcuucuccacguucaagugcuacggcgucagccccaccaagcucaacgaccugugcuucaccaacguguacgccgacuccuucgugauccgcggggacgagguccggcagaucgcccccggccagaccgggaagaucgccgacuacaacuacaagcugccggacgacuucacgggcugcgugaucgcguggaacagcaacaaccucgacuccaaggucgggggcaacuacaacuaccuguaccgccuguuccgcaagagcaaccucaagcccuucgagcgggacaucuccaccgagaucuaccaggccggcagcacccccugcaacgggguggagggcuucaacugcuacuucccccugcaguccuacggguuccagccgaccuacggcgugggguaccagcccuaccggguggucgugcugagcuucgagcuccugcacgcccccgccacggugugcggccccaagaaguccaccaaccuggucaagaacaagugcgugaacuucaacuucaacggccucaccgggaccggcgugcugaccgagagcaacaagaaguuccugccguuccagcaguucgggcgcgacaucgccgacacgaccgacgcgguccgcgacccccagacccuggagauccucgacaucacccccugcagcuucggcgggguguccgugaucacgccgggcaccaacaccagcaaccaggucgccgugcuguaccagggcgugaacugcaccgagguccccguggccauccacgccgaccagcugacgcccaccuggcggguguacuccaccgggagcaacgucuuccagacccgcgccggcugccucaucggggcggagcacgugaacaacuccuacgagugcgacauccccaucggcgccggcaucugcgccagcuaccagacgcagaccaacuccccgcggcgcgcccggagcguggcgucccagagcaucaucgccuacaccaugucccugggggccgagaacagcgucgccuacuccaacaacagcaucgccauccccaccaacuucacgaucuccgugaccaccgagauccugcccgugagcaugaccaagacgagcgucgacugcaccauguacaucugcggcgacuccaccgagugcagcaaccuccugcugcaguacggguccuucugcacccagcucaaccgcgcgcugacgggcaucgccguggagcaggacaagaacacccaggagguguucgcccaggucaagcagaucuacaagacgcccccgaucaaggacuucgggggcuucaacuucagccagauccugcccgaccccuccaagcccagcaagcgguccuucaucgaggaccuccuguucaacaaggugacccuggccgacgccggcuucaucaagcaguacggggacugccucggcgacaucgcggcccgcgaccugaucugcgcccagaaguucaacgggcugaccgugcucccgccccugcugaccgacgagaugaucgcccaguacaccagcgcccuccuggcgggcaccaucacguccggguggaccuucggcgccggcgccgcccugcagauccccuucgcgaugcagauggccuaccgguucaacgggaucggcgucacccagaacgugcucuacgagaaccagaagcugaucgccaaccaguucaacagcgccaucgggaagauccaggacucccugagcuccaccgccagcgcgcucggcaagcugcaggacguggucaaccagaacgcccaggcccugaacacgcucgugaagcagcuguccagcaacuucggggccaucuccagcgugcugaacgacauccucucccgccuggacaaggucgaggccgaggugcagaucgaccggcugaucaccggccgccuccagagccugcagaccuacgugacccagcagcugauccgggcggccgagauccgcgccagcgccaaccucgccgcgaccaagauguccgagugcguccugggccagagcaagcggguggacuucugcgggaagggcuaccaccugauguccuucccccagagcgccccgcacgggguggucuuccuccacgugacguacguccccgcccaggagaagaacuucaccaccgcccccgcgaucugccacgacggcaaggcccacuucccccgcgaggggguguucguguccaacggcacccacugguucgucacgcagcggaacuucuacgagccgcagaucaucaccaccgacaacaccuucgugagcggcaacugcgacguggucaucgggaucgugaacaacacgguguacgacccccugcagcccgagcuggacuccuucaaggaggagcucgacaaguacuucaagaaccacaccagccccgacgucgaccugggcgacaucuccgggaucaacgccagcguggugaacauccagaaggagaucgaccgccugaacgaggucgccaagaaccucaacgagucccugaucgaccugcaggagcucggcaaguacgagcaguacaucaaguggccgugguacaucuggcugggcuucaucgccgggcugaucgcgaucgugauggugaccaucaugcucugcugcaugaccagcugcugcuccugccugaagggcugcugcagcugcggguccugcugcaaguucgacgaggacgacagcgagcccguccugaagggcgugaagcuccacuacacgugaggacuaguguccaccugucccuccugggcugcuggauugucucguuuuccugccaaauaaacaggaucagcgcuuuacagaucucaaaggcucuuuucagagccaccaaaaaaaaaaaaaaaaaaaaaaaaaaaaaaaaaaaaaaaaaaaaaaaaaaaaaaaaaaaaaaaaaaaaaaaaaaaaaaaaaaaaaaaaaaaaaaaaaaaaa

SEQ ID NO: 23873 - RNA, 4123 nt, Artificial Sequence
  SARS-CoV-2/Wuhan/WIV05/2019__EPI_ISL_402128 spike protein mRNA gc (1-1273)(H69del_V70del_D614G)
aggagacccgugacccggaaguuguacggcuacgcgacuuucccucccacaaacccucgcgcccuuccuuuccuacuugggcccggcagaaagcuuaccauguucguguuccugguccuccugccccuggugagcucccagugcgugaaccucaccacccgcacgcagcugccgcccgccuacaccaacagcuucacccggggcgucuacuaccccgacaagguguuccgcuccagcgugcugcacuccacccaggaccucuuccugcccuucuucagcaacgucacgugguuccacgccaucuccgggaccaacggcaccaagcgguucgacaacccggugcugcccuucaacgacgggguguacuucgcgagcaccgagaaguccaacaucauccgcggcuggaucuucgggacgacccucgacagcaagacccagucccugcugaucgucaacaacgccaccaacguggugaucaaggucugcgaguuccaguucugcaacgaccccuuccucggcguguacuaccacaagaacaacaagagcuggauggaguccgaguuccggguguacagcuccgccaacaacugcacguucgaguacgucagccagcccuuccugauggaccuggagggcaagcaggggaacuucaagaaccuccgcgaguucguguucaagaacaucgacggcuacuucaagaucuacuccaagcacaccccgaucaaccuggugcgggaccugccccagggguucagcgcccucgagccccuggucgaccugcccaucggcaucaacaucacccgcuuccagacccuccuggcccugcaccgguccuaccucacgccgggggacagcagcuccggcuggaccgcgggcgccgccgccuacuacgugggguaccugcagccccgcaccuuccugcucaaguacaacgagaacggcaccaucacggacgcgguggacugcgcccuggacccccugagcgagaccaagugcacccucaaguccuucaccgucgagaaggggaucuaccagacgagcaacuuccgggugcagcccaccgaguccaucgugcgcuucccgaacaucaccaaccugugccccuucggcgaggucuucaacgccacccgguucgccagcguguacgccuggaaccgcaagcggaucuccaacugcgucgcggacuacagcgugcuguacaacuccgccagcuucuccacguucaagugcuacggcgugagccccaccaagcucaacgaccugugcuucaccaacgucuacgccgacuccuucgugauccgcggggacgaggugcggcagaucgcccccggccagaccgggaagaucgccgacuacaacuacaagcugccggacgacuucacgggcugcgucaucgcguggaacagcaacaaccucgacuccaaggucgggggcaacuacaacuaccuguaccgccuguuccgcaagagcaaccucaagcccuucgagcgggacaucuccaccgagaucuaccaggccggcagcacccccugcaacgggguggagggcuucaacugcuacuucccccugcaguccuacggguuccagccgaccaacggcgugggguaccagcccuaccggguggugguccugagcuucgagcuccugcacgcccccgccacggugugcggccccaagaaguccaccaaccuggugaagaacaagugcgucaacuucaacuucaacggccucaccgggaccggcgugcugaccgagagcaacaagaaguuccugccguuccagcaguucgggcgcgacaucgccgacacgaccgacgcggugcgcgacccccagacccuggagauccucgacaucacccccugcagcuucggcggggucuccgugaucacgccgggcaccaacaccagcaaccagguggccguccuguaccagggcgugaacugcaccgaggugcccgucgccauccacgccgaccagcugacgcccaccuggcggguguacuccaccgggagcaacguguuccagacccgcgccggcugccucaucggggcggagcacgucaacaacuccuacgagugcgacauccccaucggcgccggcaucugcgccagcuaccagacgcagaccaacuccccgcggcgcgcccggagcguggcgucccagagcaucaucgccuacaccaugucccugggggccgagaacagcguggccuacuccaacaacagcaucgccauccccaccaacuucacgaucuccgucaccaccgagauccugcccgugagcaugaccaagacgagcguggacugcaccauguacaucugcggcgacuccaccgagugcagcaaccuccugcugcaguacggguccuucugcacccagcucaaccgcgcgcugacgggcaucgccgucgagcaggacaagaacacccaggagguguucgcccaggugaagcagaucuacaagacgcccccgaucaaggacuucgggggcuucaacuucagccagauccugcccgaccccuccaagcccagcaagcgguccuucaucgaggaccuccuguucaacaaggucacccuggccgacgccggcuucaucaagcaguacggggacugccucggcgacaucgcggcccgcgaccugaucugcgcccagaaguucaacgggcugaccgugcucccgccccugcugaccgacgagaugaucgcccaguacaccagcgcccuccuggcgggcaccaucacguccggguggaccuucggcgccggcgccgcccugcagauccccuucgcgaugcagauggccuaccgguucaacgggaucggcgugacccagaacguccucuacgagaaccagaagcugaucgccaaccaguucaacagcgccaucgggaagauccaggacucccugagcuccaccgccagcgcgcucggcaagcugcaggacguggugaaccagaacgcccaggcccugaacacgcucgucaagcagcuguccagcaacuucggggccaucuccagcgugcugaacgacauccucucccgccuggacaagguggaggccgagguccagaucgaccggcugaucaccggccgccuccagagccugcagaccuacgugacccagcagcugauccgggcggccgagauccgcgccagcgccaaccucgccgcgaccaagauguccgagugcgugcugggccagagcaagcgggucgacuucugcgggaagggcuaccaccugauguccuucccccagagcgccccgcacggggugguguuccuccacgucacguacgugcccgcccaggagaagaacuucaccaccgcccccgcgaucugccacgacggcaaggcccacuucccccgcgagggggucuucguguccaacggcacccacugguucgugacgcagcggaacuucuacgagccgcagaucaucaccaccgacaacaccuucgucagcggcaacugcgacguggugaucgggaucgucaacaacacgguguacgacccccugcagcccgagcuggacuccuucaaggaggagcucgacaaguacuucaagaaccacaccagccccgacguggaccugggcgacaucuccgggaucaacgccagcgucgugaacauccagaaggagaucgaccgccugaacgagguggccaagaaccucaacgagucccugaucgaccugcaggagcucggcaaguacgagcaguacaucaaguggccgugguacaucuggcugggcuucaucgccgggcugaucgcgaucgucauggugaccaucaugcucugcugcaugaccagcugcugcuccugccugaagggcugcugcagcugcggguccugcugcaaguucgacgaggacgacagcgagcccgugcugaagggcgucaagcuccacuacacgugaggacuaguguccaccugucccuccugggcugcuggauugucucguuuuccugccaaauaaacaggaucagcgcuuuacagaucucaaaggcucuuuucagagccaccaaaaaaaaaaaaaaaaaaaaaaaaaaaaaaaaaaaaaaaaaaaaaaaaaaaaaaaaaaaaaaaaaaaaaaaaaaaaaaaaaaaaaaaaaaaaaaaaaaaaa

SEQ ID NO: 23874 - RNA, 4129 nt, Artificial Sequence
  SARS-CoV-2/Wuhan/WIV05/2019__EPI_ISL_402128 spike protein mRNA gc (1-1273)(Y453F_D614G)
aggagacccgugacccggaaguuguacggcuacgcgacuuucccucccacaaacccucgcgcccuuccuuuccuacuugggcccggcagaaagcuuaccauguucguguuccugguccuccugccccuggugagcucccagugcgugaaccucaccacccgcacgcagcugccgcccgccuacaccaacagcuucacccggggcgucuacuaccccgacaagguguuccgcuccagcgugcugcacuccacccaggaccucuuccugcccuucuucagcaacgucacgugguuccacgccauccacguguccgggaccaacggcaccaagcgguucgacaacccggugcugcccuucaacgacggggucuacuucgcgagcaccgagaaguccaacaucauccgcggcuggaucuucgggacgacccucgacagcaagacccagucccugcugaucgugaacaacgccaccaacguggucaucaaggugugcgaguuccaguucugcaacgaccccuuccucggcguguacuaccacaagaacaacaagagcuggauggaguccgaguuccgggucuacagcuccgccaacaacugcacguucgaguacgugagccagcccuuccugauggaccuggagggcaagcaggggaacuucaagaaccuccgcgaguucguguucaagaacaucgacggcuacuucaagaucuacuccaagcacaccccgaucaaccugguccgggaccugccccagggguucagcgcccucgagccccugguggaccugcccaucggcaucaacaucacccgcuuccagacccuccuggcccugcaccgguccuaccucacgccgggggacagcagcuccggcuggaccgcgggcgccgccgccuacuacgugggguaccugcagccccgcaccuuccugcucaaguacaacgagaacggcaccaucacggacgcggucgacugcgcccuggacccccugagcgagaccaagugcacccucaaguccuucaccguggagaaggggaucuaccagacgagcaacuuccgggugcagcccaccgaguccaucguccgcuucccgaacaucaccaaccugugccccuucggcgagguguucaacgccacccgguucgccagcgucuacgccuggaaccgcaagcggaucuccaacugcguggcggacuacagcgugcuguacaacuccgccagcuucuccacguucaagugcuacggcgucagccccaccaagcucaacgaccugugcuucaccaacguguacgccgacuccuucgugauccgcggggacgagguccggcagaucgcccccggccagaccgggaagaucgccgacuacaacuacaagcugccggacgacuucacgggcugcgugaucgcguggaacagcaacaaccucgacuccaaggucgggggcaacuacaacuaccuguuccgccuguuccgcaagagcaaccucaagcccuucgagcgggacaucuccaccgagaucuaccaggccggcagcacccccugcaacgggguggagggcuucaacugcuacuucccccugcaguccuacggguuccagccgaccaacggcgugggguaccagcccuaccggguggucgugcugagcuucgagcuccugcacgcccccgccacggugugcggccccaagaaguccaccaaccuggucaagaacaagugcgugaacuucaacuucaacggccucaccgggaccggcgugcugaccgagagcaacaagaaguuccugccguuccagcaguucgggcgcgacaucgccgacacgaccgacgcgguccgcgacccccagacccuggagauccucgacaucacccccugcagcuucggcgggguguccgugaucacgccgggcaccaacaccagcaaccaggucgccgugcuguaccagggcgugaacugcaccgagguccccguggccauccacgccgaccagcugacgcccaccuggcggguguacuccaccgggagcaacgucuuccagacccgcgccggcugccucaucggggcggagcacgugaacaacuccuacgagugcgacauccccaucggcgccggcaucugcgccagcuaccagacgcagaccaacuccccgcggcgcgcccggagcguggcgucccagagcaucaucgccuacaccaugucccugggggccgagaacagcgucgccuacuccaacaacagcaucgccauccccaccaacuucacgaucuccgugaccaccgagauccugcccgugagcaugaccaagacgagcgucgacugcaccauguacaucugcggcgacuccaccgagugcagcaaccuccugcugcaguacggguccuucugcacccagcucaaccgcgcgcugacgggcaucgccguggagcaggacaagaacacccaggagguguucgcccaggucaagcagaucuacaagacgcccccgaucaaggacuucgggggcuucaacuucagccagauccugcccgaccccuccaagcccagcaagcgguccuucaucgaggaccuccuguucaacaaggugacccuggccgacgccggcuucaucaagcaguacggggacugccucggcgacaucgcggcccgcgaccugaucugcgcccagaaguucaacgggcugaccgugcucccgccccugcugaccgacgagaugaucgcccaguacaccagcgcccuccuggcgggcaccaucacguccggguggaccuucggcgccggcgccgcccugcagauccccuucgcgaugcagauggccuaccgguucaacgggaucggcgucacccagaacgugcucuacgagaaccagaagcugaucgccaaccaguucaacagcgccaucgggaagauccaggacucccugagcuccaccgccagcgcgcucggcaagcugcaggacguggucaaccagaacgcccaggcccugaacacgcucgugaagcagcuguccagcaacuucggggccaucuccagcgugcugaacgacauccucucccgccuggacaaggucgaggccgaggugcagaucgaccggcugaucaccggccgccuccagagccugcagaccuacgugacccagcagcugauccgggcggccgagauccgcgccagcgccaaccucgccgcgaccaagauguccgagugcguccugggccagagcaagcggguggacuucugcgggaagggcuaccaccugauguccuucccccagagcgccccgcacgggguggucuuccuccacgugacguacguccccgcccaggagaagaacuucaccaccgcccccgcgaucugccacgacggcaaggcccacuucccccgcgaggggguguucguguccaacggcacccacugguucgucacgcagcggaacuucuacgagccgcagaucaucaccaccgacaacaccuucgugagcggcaacugcgacguggucaucgggaucgugaacaacacgguguacgacccccugcagcccgagcuggacuccuucaaggaggagcucgacaaguacuucaagaaccacaccagccccgacgucgaccugggcgacaucuccgggaucaacgccagcguggugaacauccagaaggagaucgaccgccugaacgaggucgccaagaaccucaacgagucccugaucgaccugcaggagcucggcaaguacgagcaguacaucaaguggccgugguacaucuggcugggcuucaucgccgggcugaucgcgaucgugauggugaccaucaugcucugcugcaugaccagcugcugcuccugccugaagggcugcugcagcugcggguccugcugcaaguucgacgaggacgacagcgagcccguccugaagggcgugaagcuccacuacacgugaggacuaguguccaccugucccuccugggcugcuggauugucucguuuuccugccaaauaaacaggaucagcgcuuuacagaucucaaaggcucuuuucagagccaccaaaaaaaaaaaaaaaaaaaaaaaaaaaaaaaaaaaaaaaaaaaaaaaaaaaaaaaaaaaaaaaaaaaaaaaaaaaaaaaaaaaaaaaaaaaaaaaaaaaaa

SEQ ID NO: 23875 - RNA, 4129 nt, Artificial Sequence
  SARS-CoV-2/Wuhan/WIV05/2019__EPI_ISL_402128 spike protein mRNA gc (1-1273)(D614G_I692V)
aggagacccgugacccggaaguuguacggcuacgcgacuuucccucccacaaacccucgcgcccuuccuuuccuacuugggcccggcagaaagcuuaccauguucguguuccugguccuccugccccuggugagcucccagugcgugaaccucaccacccgcacgcagcugccgcccgccuacaccaacagcuucacccggggcgucuacuaccccgacaagguguuccgcuccagcgugcugcacuccacccaggaccucuuccugcccuucuucagcaacgucacgugguuccacgccauccacguguccgggaccaacggcaccaagcgguucgacaacccggugcugcccuucaacgacggggucuacuucgcgagcaccgagaaguccaacaucauccgcggcuggaucuucgggacgacccucgacagcaagacccagucccugcugaucgugaacaacgccaccaacguggucaucaaggugugcgaguuccaguucugcaacgaccccuuccucggcguguacuaccacaagaacaacaagagcuggauggaguccgaguuccgggucuacagcuccgccaacaacugcacguucgaguacgugagccagcccuuccugauggaccuggagggcaagcaggggaacuucaagaaccuccgcgaguucguguucaagaacaucgacggcuacuucaagaucuacuccaagcacaccccgaucaaccugguccgggaccugccccagggguucagcgcccucgagccccugguggaccugcccaucggcaucaacaucacccgcuuccagacccuccuggcccugcaccgguccuaccucacgccgggggacagcagcuccggcuggaccgcgggcgccgccgccuacuacgugggguaccugcagccccgcaccuuccugcucaaguacaacgagaacggcaccaucacggacgcggucgacugcgcccuggacccccugagcgagaccaagugcacccucaaguccuucaccguggagaaggggaucuaccagacgagcaacuuccgggugcagcccaccgaguccaucguccgcuucccgaacaucaccaaccugugccccuucggcgagguguucaacgccacccgguucgccagcgucuacgccuggaaccgcaagcggaucuccaacugcguggcggacuacagcgugcuguacaacuccgccagcuucuccacguucaagugcuacggcgucagccccaccaagcucaacgaccugugcuucaccaacguguacgccgacuccuucgugauccgcggggacgagguccggcagaucgcccccggccagaccgggaagaucgccgacuacaacuacaagcugccggacgacuucacgggcugcgugaucgcguggaacagcaacaaccucgacuccaaggucgggggcaacuacaacuaccuguaccgccuguuccgcaagagcaaccucaagcccuucgagcgggacaucuccaccgagaucuaccaggccggcagcacccccugcaacgggguggagggcuucaacugcuacuucccccugcaguccuacggguuccagccgaccaacggcgugggguaccagcccuaccggguggucgugcugagcuucgagcuccugcacgcccccgccacggugugcggccccaagaaguccaccaaccuggucaagaacaagugcgugaacuucaacuucaacggccucaccgggaccggcgugcugaccgagagcaacaagaaguuccugccguuccagcaguucgggcgcgacaucgccgacacgaccgacgcgguccgcgacccccagacccuggagauccucgacaucacccccugcagcuucggcgggguguccgugaucacgccgggcaccaacaccagcaaccaggucgccgugcuguaccagggcgugaacugcaccgagguccccguggccauccacgccgaccagcugacgcccaccuggcggguguacuccaccgggagcaacgucuuccagacccgcgccggcugccucaucggggcggagcacgugaacaacuccuacgagugcgacauccccaucggcgccggcaucugcgccagcuaccagacgcagaccaacuccccgcggcgcgcccggagcguggcgucccagagcgucaucgccuacaccaugucccugggggccgagaacagcguggccuacuccaacaacagcaucgccauccccaccaacuucacgaucuccgugaccaccgagauccugcccgucagcaugaccaagacgagcguggacugcaccauguacaucugcggcgacuccaccgagugcagcaaccuccugcugcaguacggguccuucugcacccagcucaaccgcgcgcugacgggcaucgccguggagcaggacaagaacacccaggaggucuucgcccaggugaagcagaucuacaagacgcccccgaucaaggacuucgggggcuucaacuucagccagauccugcccgaccccuccaagcccagcaagcgguccuucaucgaggaccuccuguucaacaaggugacccuggccgacgccggcuucaucaagcaguacggggacugccucggcgacaucgcggcccgcgaccugaucugcgcccagaaguucaacgggcugaccguccucccgccccugcugaccgacgagaugaucgcccaguacaccagcgcccuccuggcgggcaccaucacguccggguggaccuucggcgccggcgccgcccugcagauccccuucgcgaugcagauggccuaccgguucaacgggaucggcgugacccagaacgugcucuacgagaaccagaagcugaucgccaaccaguucaacagcgccaucgggaagauccaggacucccugagcuccaccgccagcgcgcucggcaagcugcaggacgucgugaaccagaacgcccaggcccugaacacgcucgugaagcagcuguccagcaacuucggggccaucuccagcguccugaacgacauccucucccgccuggacaagguggaggccgaggugcagaucgaccggcugaucaccggccgccuccagagccugcagaccuacgucacccagcagcugauccgggcggccgagauccgcgccagcgccaaccucgccgcgaccaagauguccgagugcgugcugggccagagcaagcggguggacuucugcgggaagggcuaccaccugauguccuucccccagagcgccccgcacggggucguguuccuccacgucacguacgugcccgcccaggagaagaacuucaccaccgcccccgcgaucugccacgacggcaaggcccacuucccccgcgaggggguguucgucuccaacggcacccacugguucgugacgcagcggaacuucuacgagccgcagaucaucaccaccgacaacaccuucgugagcggcaacugcgacgucgugaucgggaucgugaacaacacggucuacgacccccugcagcccgagcuggacuccuucaaggaggagcucgacaaguacuucaagaaccacaccagccccgacguggaccugggcgacaucuccgggaucaacgccagcguggucaacauccagaaggagaucgaccgccugaacgagguggccaagaaccucaacgagucccugaucgaccugcaggagcucggcaaguacgagcaguacaucaaguggccgugguacaucuggcugggcuucaucgccgggcugaucgcgaucgugauggucaccaucaugcucugcugcaugaccagcugcugcuccugccugaagggcugcugcagcugcggguccugcugcaaguucgacgaggacgacagcgagcccgugcugaagggcgugaagcuccacuacacgugaggacuaguguccaccugucccuccugggcugcuggauugucucguuuuccugccaaauaaacaggaucagcgcuuuacagaucucaaaggcucuuuucagagccaccaaaaaaaaaaaaaaaaaaaaaaaaaaaaaaaaaaaaaaaaaaaaaaaaaaaaaaaaaaaaaaaaaaaaaaaaaaaaaaaaaaaaaaaaaaaaaaaaaaaaa

SEQ ID NO: 23876 - RNA, 4129 nt, Artificial Sequence
  SARS-CoV-2/Wuhan/WIV05/2019__EPI_ISL_402128 spike protein mRNA gc (1-1273)(D614G_M1229I)
aggagacccgugacccggaaguuguacggcuacgcgacuuucccucccacaaacccucgcgcccuuccuuuccuacuugggcccggcagaaagcuuaccauguucguguuccugguccuccugccccuggugagcucccagugcgugaaccucaccacccgcacgcagcugccgcccgccuacaccaacagcuucacccggggcgucuacuaccccgacaagguguuccgcuccagcgugcugcacuccacccaggaccucuuccugcccuucuucagcaacgucacgugguuccacgccauccacguguccgggaccaacggcaccaagcgguucgacaacccggugcugcccuucaacgacggggucuacuucgcgagcaccgagaaguccaacaucauccgcggcuggaucuucgggacgacccucgacagcaagacccagucccugcugaucgugaacaacgccaccaacguggucaucaaggugugcgaguuccaguucugcaacgaccccuuccucggcguguacuaccacaagaacaacaagagcuggauggaguccgaguuccgggucuacagcuccgccaacaacugcacguucgaguacgugagccagcccuuccugauggaccuggagggcaagcaggggaacuucaagaaccuccgcgaguucguguucaagaacaucgacggcuacuucaagaucuacuccaagcacaccccgaucaaccugguccgggaccugccccagggguucagcgcccucgagccccugguggaccugcccaucggcaucaacaucacccgcuuccagacccuccuggcccugcaccgguccuaccucacgccgggggacagcagcuccggcuggaccgcgggcgccgccgccuacuacgugggguaccugcagccccgcaccuuccugcucaaguacaacgagaacggcaccaucacggacgcggucgacugcgcccuggacccccugagcgagaccaagugcacccucaaguccuucaccguggagaaggggaucuaccagacgagcaacuuccgggugcagcccaccgaguccaucguccgcuucccgaacaucaccaaccugugccccuucggcgagguguucaacgccacccgguucgccagcgucuacgccuggaaccgcaagcggaucuccaacugcguggcggacuacagcgugcuguacaacuccgccagcuucuccacguucaagugcuacggcgucagccccaccaagcucaacgaccugugcuucaccaacguguacgccgacuccuucgugauccgcggggacgagguccggcagaucgcccccggccagaccgggaagaucgccgacuacaacuacaagcugccggacgacuucacgggcugcgugaucgcguggaacagcaacaaccucgacuccaaggucgggggcaacuacaacuaccuguaccgccuguuccgcaagagcaaccucaagcccuucgagcgggacaucuccaccgagaucuaccaggccggcagcacccccugcaacgggguggagggcuucaacugcuacuucccccugcaguccuacggguuccagccgaccaacggcgugggguaccagcccuaccggguggucgugcugagcuucgagcuccugcacgcccccgccacggugugcggccccaagaaguccaccaaccuggucaagaacaagugcgugaacuucaacuucaacggccucaccgggaccggcgugcugaccgagagcaacaagaaguuccugccguuccagcaguucgggcgcgacaucgccgacacgaccgacgcgguccgcgacccccagacccuggagauccucgacaucacccccugcagcuucggcgggguguccgugaucacgccgggcaccaacaccagcaaccaggucgccgugcuguaccagggcgugaacugcaccgagguccccguggccauccacgccgaccagcugacgcccaccuggcggguguacuccaccgggagcaacgucuuccagacccgcgccggcugccucaucggggcggagcacgugaacaacuccuacgagugcgacauccccaucggcgccggcaucugcgccagcuaccagacgcagaccaacuccccgcggcgcgcccggagcguggcgucccagagcaucaucgccuacaccaugucccugggggccgagaacagcgucgccuacuccaacaacagcaucgccauccccaccaacuucacgaucuccgugaccaccgagauccugcccgugagcaugaccaagacgagcgucgacugcaccauguacaucugcggcgacuccaccgagugcagcaaccuccugcugcaguacggguccuucugcacccagcucaaccgcgcgcugacgggcaucgccguggagcaggacaagaacacccaggagguguucgcccaggucaagcagaucuacaagacgcccccgaucaaggacuucgggggcuucaacuucagccagauccugcccgaccccuccaagcccagcaagcgguccuucaucgaggaccuccuguucaacaaggugacccuggccgacgccggcuucaucaagcaguacggggacugccucggcgacaucgcggcccgcgaccugaucugcgcccagaaguucaacgggcugaccgugcucccgccccugcugaccgacgagaugaucgcccaguacaccagcgcccuccuggcgggcaccaucacguccggguggaccuucggcgccggcgccgcccugcagauccccuucgcgaugcagauggccuaccgguucaacgggaucggcgucacccagaacgugcucuacgagaaccagaagcugaucgccaaccaguucaacagcgccaucgggaagauccaggacucccugagcuccaccgccagcgcgcucggcaagcugcaggacguggucaaccagaacgcccaggcccugaacacgcucgugaagcagcuguccagcaacuucggggccaucuccagcgugcugaacgacauccucucccgccuggacaaggucgaggccgaggugcagaucgaccggcugaucaccggccgccuccagagccugcagaccuacgugacccagcagcugauccgggcggccgagauccgcgccagcgccaaccucgccgcgaccaagauguccgagugcguccugggccagagcaagcggguggacuucugcgggaagggcuaccaccugauguccuucccccagagcgccccgcacgggguggucuuccuccacgugacguacguccccgcccaggagaagaacuucaccaccgcccccgcgaucugccacgacggcaaggcccacuucccccgcgaggggguguucguguccaacggcacccacugguucgucacgcagcggaacuucuacgagccgcagaucaucaccaccgacaacaccuucgugagcggcaacugcgacguggucaucgggaucgugaacaacacgguguacgacccccugcagcccgagcuggacuccuucaaggaggagcucgacaaguacuucaagaaccacaccagccccgacgucgaccugggcgacaucuccgggaucaacgccagcguggugaacauccagaaggagaucgaccgccugaacgaggucgccaagaaccucaacgagucccugaucgaccugcaggagcucggcaaguacgagcaguacaucaaguggccgugguacaucuggcugggcuucaucgccgggcugaucgcgaucgugaucgugaccaucaugcucugcugcaugaccagcugcugcuccugccugaagggcugcugcagcugcggguccugcugcaaguucgacgaggacgacagcgagcccguccugaagggcgugaagcuccacuacacgugaggacuaguguccaccugucccuccugggcugcuggauugucucguuuuccugccaaauaaacaggaucagcgcuuuacagaucucaaaggcucuuuucagagccaccaaaaaaaaaaaaaaaaaaaaaaaaaaaaaaaaaaaaaaaaaaaaaaaaaaaaaaaaaaaaaaaaaaaaaaaaaaaaaaaaaaaaaaaaaaaaaaaaaaaaa

SEQ ID NO: 23877 - RNA, 4123 nt, Artificial Sequence
  SARS-CoV-2/Wuhan/WIV05/2019__EPI_ISL_402128 spike protein mRNA gc (1-1273)(H69del_V70del_A222V_Y453F_S477N_D614G_I692V)
aggagacccgugacccggaaguuguacggcuacgcgacuuucccucccacaaacccucgcgcccuuccuuuccuacuugggcccggcagaaagcuuaccauguucguguuccugguccuccugccccuggugagcucccagugcgugaaccucaccacccgcacgcagcugccgcccgccuacaccaacagcuucacccggggcgucuacuaccccgacaagguguuccgcuccagcgugcugcacuccacccaggaccucuuccugcccuucuucagcaacgucacgugguuccacgccaucuccgggaccaacggcaccaagcgguucgacaacccggugcugcccuucaacgacgggguguacuucgcgagcaccgagaaguccaacaucauccgcggcuggaucuucgggacgacccucgacagcaagacccagucccugcugaucgucaacaacgccaccaacguggugaucaaggucugcgaguuccaguucugcaacgaccccuuccucggcguguacuaccacaagaacaacaagagcuggauggaguccgaguuccggguguacagcuccgccaacaacugcacguucgaguacgucagccagcccuuccugauggaccuggagggcaagcaggggaacuucaagaaccuccgcgaguucguguucaagaacaucgacggcuacuucaagaucuacuccaagcacaccccgaucaaccuggugcgggaccugccccagggguucagcguccucgagccccugguggaccugcccaucggcaucaacaucacccgcuuccagacccuccuggcccugcaccgguccuaccucacgccgggggacagcagcuccggcuggaccgccggcgcggccgccuacuacgugggguaccugcagccccgcaccuuccugcucaaguacaacgagaacggcaccaucacggacgccgucgacugcgcgcuggacccccugagcgagaccaagugcacccucaaguccuucaccguggagaaggggaucuaccagacgagcaacuuccgggugcagcccaccgaguccaucguccgcuucccgaacaucaccaaccugugccccuucggcgagguguucaacgccacccgguucgccagcgucuacgccuggaaccgcaagcggaucuccaacugcguggccgacuacagcgugcuguacaacuccgcgagcuucuccacguucaagugcuacggcgucagccccaccaagcucaacgaccugugcuucaccaacguguacgccgacuccuucgugauccgcggggacgagguccggcagaucgcccccggccagaccgggaagaucgccgacuacaacuacaagcugccggacgacuucacgggcugcgugaucgccuggaacagcaacaaccucgacuccaaggucgggggcaacuacaacuaccuguuccgccuguuccgcaagagcaaccucaagcccuucgagcgggacaucuccaccgagaucuaccaggcgggcaacacccccugcaacgggguggagggcuucaacugcuacuucccccugcagagcuacggguuccagccgaccaacggcgugggguaccagcccuaccggguggucgugcuguccuucgagcuccugcacgcccccgccacggugugcggccccaagaaguccaccaaccuggucaagaacaagugcgugaacuucaacuucaacggccucaccgggaccggcgugcugaccgagagcaacaagaaguuccugccguuccagcaguucgggcgcgacaucgccgacacgaccgacgccguccgcgacccccagacccuggagauccucgacaucacccccugcagcuucggcggggugagcgugaucacgccgggcaccaacaccuccaaccaggucgcggugcuguaccagggcgugaacugcaccgagguccccguggccauccacgccgaccagcugacgcccaccuggcggguguacagcaccggguccaacgucuuccagacccgcgccggcugccucaucggggccgagcacgugaacaacagcuacgagugcgacauccccaucggcgcgggcaucugcgccuccuaccagacgcagaccaacagcccgcggcgcgcccgguccguggccagccaguccgucaucgcguacaccaugagccugggggccgagaacuccguggccuacagcaacaacuccaucgccauccccaccaacuucacgaucagcgugaccaccgagauccugcccgucuccaugaccaagacgagcguggacugcaccauguacaucugcggcgacagcaccgagugcuccaaccuccugcugcaguacgggagcuucugcacccagcucaaccgcgcccugacgggcaucgcgguggagcaggacaagaacacccaggaggucuucgcccaggugaagcagaucuacaagacgcccccgaucaaggacuucgggggcuucaacuucucccagauccugcccgaccccagcaagcccuccaagcggagcuucaucgaggaccuccuguucaacaaggugacccuggccgacgccggcuucaucaagcaguacggggacugccucggcgacaucgccgcgcgcgaccugaucugcgcccagaaguucaacgggcugaccguccucccgccccugcugaccgacgagaugaucgcccaguacaccuccgcccuccuggccggcaccaucacgagcggguggaccuucggcgcgggcgccgcccugcagauccccuucgccaugcagauggcguaccgguucaacgggaucggcgugacccagaacgugcucuacgagaaccagaagcugaucgccaaccaguucaacuccgccaucgggaagauccaggacagccuguccagcaccgccuccgcccucggcaagcugcaggacgucgugaaccagaacgcgcaggcccugaacacgcucgugaagcagcugagcuccaacuucggggccaucagcuccguccugaacgacauccucagccgccuggacaagguggaggccgaggugcagaucgaccggcugaucaccggccgccuccagucccugcagaccuacgucacccagcagcugauccgggccgcggagauccgcgccagcgccaaccucgccgccaccaagaugagcgagugcgugcugggccaguccaagcggguggacuucugcgggaagggcuaccaccugaugagcuucccccaguccgcgccgcacggggucguguuccuccacgucacguacgugcccgcccaggagaagaacuucaccaccgcccccgccaucugccacgacggcaaggcgcacuucccccgcgaggggguguucgucagcaacggcacccacugguucgugacgcagcggaacuucuacgagccgcagaucaucaccaccgacaacaccuucguguccggcaacugcgacgucgugaucgggaucgugaacaacacggucuacgacccccugcagcccgagcuggacagcuucaaggaggagcucgacaaguacuucaagaaccacaccucccccgacguggaccugggcgacaucagcgggaucaacgccuccguggucaacauccagaaggagaucgaccgccugaacgagguggccaagaaccucaacgagagccugaucgaccugcaggagcucggcaaguacgagcaguacaucaaguggccgugguacaucuggcugggcuucaucgccgggcugaucgccaucgugauggucaccaucaugcucugcugcaugaccuccugcugcagcugccugaagggcugcugcuccugcgggagcugcugcaaguucgacgaggacgacuccgagcccgugcugaagggcgugaagcuccacuacacgugaggacuaguguccaccugucccuccugggcugcuggauugucucguuuuccugccaaauaaacaggaucagcgcuuuacagaucucaaaggcucuuuucagagccaccaaaaaaaaaaaaaaaaaaaaaaaaaaaaaaaaaaaaaaaaaaaaaaaaaaaaaaaaaaaaaaaaaaaaaaaaaaaaaaaaaaaaaaaaaaaaaaaaaaaaa

SEQ ID NO: 23878 - RNA, 4123 nt, Artificial Sequence
  SARS-CoV-2/Wuhan/WIV05/2019__EPI_ISL_402128 spike protein mRNA gc (1-1273)(H69del_V70del_Y453F_D614G_I692V_M1229I)
aggagacccgugacccggaaguuguacggcuacgcgacuuucccucccacaaacccucgcgcccuuccuuuccuacuugggcccggcagaaagcuuaccauguucguguuccugguccuccugccccuggugagcucccagugcgugaaccucaccacccgcacgcagcugccgcccgccuacaccaacagcuucacccggggcgucuacuaccccgacaagguguuccgcuccagcgugcugcacuccacccaggaccucuuccugcccuucuucagcaacgucacgugguuccacgccaucuccgggaccaacggcaccaagcgguucgacaacccggugcugcccuucaacgacgggguguacuucgcgagcaccgagaaguccaacaucauccgcggcuggaucuucgggacgacccucgacagcaagacccagucccugcugaucgucaacaacgccaccaacguggugaucaaggucugcgaguuccaguucugcaacgaccccuuccucggcguguacuaccacaagaacaacaagagcuggauggaguccgaguuccggguguacagcuccgccaacaacugcacguucgaguacgucagccagcccuuccugauggaccuggagggcaagcaggggaacuucaagaaccuccgcgaguucguguucaagaacaucgacggcuacuucaagaucuacuccaagcacaccccgaucaaccuggugcgggaccugccccagggguucagcgcccucgagccccuggucgaccugcccaucggcaucaacaucacccgcuuccagacccuccuggcccugcaccgguccuaccucacgccgggggacagcagcuccggcuggaccgcgggcgccgccgccuacuacgugggguaccugcagccccgcaccuuccugcucaaguacaacgagaacggcaccaucacggacgcgguggacugcgcccuggacccccugagcgagaccaagugcacccucaaguccuucaccgucgagaaggggaucuaccagacgagcaacuuccgggugcagcccaccgaguccaucgugcgcuucccgaacaucaccaaccugugccccuucggcgaggucuucaacgccacccgguucgccagcguguacgccuggaaccgcaagcggaucuccaacugcgucgcggacuacagcgugcuguacaacuccgccagcuucuccacguucaagugcuacggcgugagccccaccaagcucaacgaccugugcuucaccaacgucuacgccgacuccuucgugauccgcggggacgaggugcggcagaucgcccccggccagaccgggaagaucgccgacuacaacuacaagcugccggacgacuucacgggcugcgucaucgcguggaacagcaacaaccucgacuccaaggucgggggcaacuacaacuaccuguuccgccuguuccgcaagagcaaccucaagcccuucgagcgggacaucuccaccgagaucuaccaggccggcagcacccccugcaacgggguggagggcuucaacugcuacuucccccugcaguccuacggguuccagccgaccaacggcgugggguaccagcccuaccggguggugguccugagcuucgagcuccugcacgcccccgccacggugugcggccccaagaaguccaccaaccuggugaagaacaagugcgucaacuucaacuucaacggccucaccgggaccggcgugcugaccgagagcaacaagaaguuccugccguuccagcaguucgggcgcgacaucgccgacacgaccgacgcggugcgcgacccccagacccuggagauccucgacaucacccccugcagcuucggcggggucuccgugaucacgccgggcaccaacaccagcaaccagguggccguccuguaccagggcgugaacugcaccgaggugcccgucgccauccacgccgaccagcugacgcccaccuggcggguguacuccaccgggagcaacguguuccagacccgcgccggcugccucaucggggcggagcacgucaacaacuccuacgagugcgacauccccaucggcgccggcaucugcgccagcuaccagacgcagaccaacuccccgcggcgcgcccggagcguggcgucccagagcgugaucgccuacaccaugucccugggggccgagaacagcgucgccuacuccaacaacagcaucgccauccccaccaacuucacgaucuccgugaccaccgagauccugcccgugagcaugaccaagacgagcgucgacugcaccauguacaucugcggcgacuccaccgagugcagcaaccuccugcugcaguacggguccuucugcacccagcucaaccgcgcgcugacgggcaucgccguggagcaggacaagaacacccaggagguguucgcccaggucaagcagaucuacaagacgcccccgaucaaggacuucgggggcuucaacuucagccagauccugcccgaccccuccaagcccagcaagcgguccuucaucgaggaccuccuguucaacaaggugacccuggccgacgccggcuucaucaagcaguacggggacugccucggcgacaucgcggcccgcgaccugaucugcgcccagaaguucaacgggcugaccgugcucccgccccugcugaccgacgagaugaucgcccaguacaccagcgcccuccuggcgggcaccaucacguccggguggaccuucggcgccggcgccgcccugcagauccccuucgcgaugcagauggccuaccgguucaacgggaucggcgucacccagaacgugcucuacgagaaccagaagcugaucgccaaccaguucaacagcgccaucgggaagauccaggacucccugagcuccaccgccagcgcgcucggcaagcugcaggacguggucaaccagaacgcccaggcccugaacacgcucgugaagcagcuguccagcaacuucggggccaucuccagcgugcugaacgacauccucucccgccuggacaaggucgaggccgaggugcagaucgaccggcugaucaccggccgccuccagagccugcagaccuacgugacccagcagcugauccgggcggccgagauccgcgccagcgccaaccucgccgcgaccaagauguccgagugcguccugggccagagcaagcggguggacuucugcgggaagggcuaccaccugauguccuucccccagagcgccccgcacgggguggucuuccuccacgugacguacguccccgcccaggagaagaacuucaccaccgcccccgcgaucugccacgacggcaaggcccacuucccccgcgaggggguguucguguccaacggcacccacugguucgucacgcagcggaacuucuacgagccgcagaucaucaccaccgacaacaccuucgugagcggcaacugcgacguggucaucgggaucgugaacaacacgguguacgacccccugcagcccgagcuggacuccuucaaggaggagcucgacaaguacuucaagaaccacaccagccccgacgucgaccugggcgacaucuccgggaucaacgccagcguggugaacauccagaaggagaucgaccgccugaacgaggucgccaagaaccucaacgagucccugaucgaccugcaggagcucggcaaguacgagcaguacaucaaguggccgugguacaucuggcugggcuucaucgccgggcugaucgcgaucgugaucgugaccaucaugcucugcugcaugaccagcugcugcuccugccugaagggcugcugcagcugcggguccugcugcaaguucgacgaggacgacagcgagcccguccugaagggcgugaagcuccacuacacgugaggacuaguguccaccugucccuccugggcugcuggauugucucguuuuccugccaaauaaacaggaucagcgcuuuacagaucucaaaggcucuuuucagagccaccaaaaaaaaaaaaaaaaaaaaaaaaaaaaaaaaaaaaaaaaaaaaaaaaaaaaaaaaaaaaaaaaaaaaaaaaaaaaaaaaaaaaaaaaaaaaaaaaaaaaa

SEQ ID NO: 23879 - RNA, 4120 nt, Artificial Sequence
  SARS-CoV-2/Wuhan/WIV05/2019__EPI_ISL_402128 spike protein mRNA gc (1-1273)(H69del_V70del_Y144del_N501Y_A570D_D614G_P681H_T716I_S982 A_D1118H)
aggagacccgugacccggaaguuguacggcuacgcgacuuucccucccacaaacccucgcgcccuuccuuuccuacuugggcccggcagaaagcuuaccauguucguguuccugguccuccugccccuggugagcucccagugcgugaaccucaccacccgcacgcagcugccgcccgccuacaccaacagcuucacccggggcgucuacuaccccgacaagguguuccgcuccagcgugcugcacuccacccaggaccucuuccugcccuucuucagcaacgucacgugguuccacgccaucuccgggaccaacggcaccaagcgguucgacaacccggugcugcccuucaacgacgggguguacuucgcgagcaccgagaaguccaacaucauccgcggcuggaucuucgggacgacccucgacagcaagacccagucccugcugaucgucaacaacgccaccaacguggugaucaaggucugcgaguuccaguucugcaacgaccccuuccucggcguguaccacaagaacaacaagagcuggauggaguccgaguuccggguguacagcuccgccaacaacugcacguucgaguacgucagccagcccuuccugauggaccuggagggcaagcaggggaacuucaagaaccuccgcgaguucguguucaagaacaucgacggcuacuucaagaucuacuccaagcacaccccgaucaaccuggugcgggaccugccccagggguucagcgcccucgagccccuggucgaccugcccaucggcaucaacaucacccgcuuccagacccuccuggcccugcaccgguccuaccucacgccgggggacagcagcuccggcuggaccgcgggcgccgccgccuacuacgugggguaccugcagccccgcaccuuccugcucaaguacaacgagaacggcaccaucacggacgcgguggacugcgcccuggacccccugagcgagaccaagugcacccucaaguccuucaccgucgagaaggggaucuaccagacgagcaacuuccgggugcagcccaccgaguccaucgugcgcuucccgaacaucaccaaccugugccccuucggcgaggucuucaacgccacccgguucgccagcguguacgccuggaaccgcaagcggaucuccaacugcgucgcggacuacagcgugcuguacaacuccgccagcuucuccacguucaagugcuacggcgugagccccaccaagcucaacgaccugugcuucaccaacgucuacgccgacuccuucgugauccgcggggacgaggugcggcagaucgcccccggccagaccgggaagaucgccgacuacaacuacaagcugccggacgacuucacgggcugcgucaucgcguggaacagcaacaaccucgacuccaaggucgggggcaacuacaacuaccuguaccgccuguuccgcaagagcaaccucaagcccuucgagcgggacaucuccaccgagaucuaccaggccggcagcacccccugcaacgggguggagggcuucaacugcuacuucccccugcaguccuacggguuccagccgaccuacggcgugggguaccagcccuaccggguggugguccugagcuucgagcuccugcacgcccccgccacggugugcggccccaagaaguccaccaaccuggugaagaacaagugcgucaacuucaacuucaacggccucaccgggaccggcgugcugaccgagagcaacaagaaguuccugccguuccagcaguucgggcgcgacaucgacgacacgaccgacgccgugcgcgacccccagacccuggagauccucgacaucacccccugcagcuucggcggggucuccgugaucacgccgggcaccaacaccagcaaccagguggcgguccuguaccagggcgugaacugcaccgaggugcccgucgccauccacgccgaccagcugacgcccaccuggcggguguacuccaccgggagcaacguguuccagacccgcgccggcugccucaucggggccgagcacgucaacaacuccuacgagugcgacauccccaucggcgcgggcaucugcgccagcuaccagacgcagaccaacucccaccggcgcgcccggagcguggccucccagagcaucaucgcguacaccaugucccugggggccgagaacagcguggccuacuccaacaacagcaucgccaucccgaucaacuucaccaucuccgucacgaccgagauccugcccgugagcaugaccaagaccagcguggacugcacgauguacaucugcggcgacuccaccgagugcagcaaccuccugcugcaguacggguccuucugcacccagcucaaccgcgcccugaccggcaucgcggucgagcaggacaagaacacgcaggagguguucgcccaggugaagcagaucuacaagaccccgcccaucaaggacuucgggggcuucaacuucagccagauccugcccgaccccuccaagcccagcaagcgguccuucaucgaggaccuccuguucaacaaggucacccuggccgacgccggcuucaucaagcaguacggggacugccucggcgacaucgccgcgcgcgaccugaucugcgcccagaaguucaacgggcugaccgugcugcccccgcuccugacggacgagaugaucgcccaguacaccagcgcccuccuggccggcaccaucaccuccggguggacguucggcgcgggcgccgcccugcagauccccuucgccaugcagauggcguaccgguucaacgggaucggcgugacccagaacguccucuacgagaaccagaagcugaucgccaaccaguucaacagcgccaucgggaagauccaggacucccugagcuccaccgccagcgcccucggcaagcugcaggacguggugaaccagaacgcgcaggcccugaacacccucgucaagcagcuguccagcaacuucggggccaucuccagcgugcugaacgacauccucgcccgccuggacaagguggaggccgagguccagaucgaccggcugaucacgggccgccuccagucccugcagaccuacgugacccagcagcugauccgggcggccgagauccgcgccagcgccaaccucgccgcgaccaagaugagcgagugcgugcugggccaguccaagcgggucgacuucugcgggaagggcuaccaccugaugagcuucccccaguccgcgccccacggggugguguuccuccacgucaccuacgugccggcccaggagaagaacuucacgaccgcccccgccaucugccacgacggcaaggcccacuucccccgcgagggggucuucgugagcaacggcacccacugguucgugacccagcggaacuucuacgagccccagaucaucacgacccacaacaccuucgucuccggcaacugcgacguggugaucgggaucgucaacaacaccguguacgacccgcugcagcccgagcuggacagcuucaaggaggagcucgacaaguacuucaagaaccacacgucccccgacguggaccugggcgacaucagcgggaucaacgccuccgucgugaacauccagaaggagaucgaccgccugaacgagguggccaagaaccucaacgagagccugaucgaccugcaggagcucggcaaguacgagcaguacaucaaguggcccugguacaucuggcugggcuucaucgccgggcugaucgcgaucgucauggugaccaucaugcucugcugcaugaccuccugcugcagcugccugaagggcugcugcuccugcgggagcugcugcaaguucgacgaggacgacuccgagccggugcugaagggcgucaagcuccacuacaccugaggacuaguguccaccugucccuccugggcugcuggauugucucguuuuccugccaaauaaacaggaucagcgcuuuacagaucucaaaggcucuuuucagagccaccaaaaaaaaaaaaaaaaaaaaaaaaaaaaaaaaaaaaaaaaaaaaaaaaaaaaaaaaaaaaaaaaaaaaaaaaaaaaaaaaaaaaaaaaaaaaaaaaaaaaa

SEQ ID NO: 23880 - RNA, 4129 nt, Artificial Sequence
  SARS-CoV-2/Wuhan/WIV05/2019__EPI_ISL_402128 spike protein mRNA gc (1-1273)(K417N_E484K_N501Y_D614G)
aggagacccgugacccggaaguuguacggcuacgcgacuuucccucccacaaacccucgcgcccuuccuuuccuacuugggcccggcagaaagcuuaccauguucguguuccugguccuccugccccuggugagcucccagugcgugaaccucaccacccgcacgcagcugccgcccgccuacaccaacagcuucacccggggcgucuacuaccccgacaagguguuccgcuccagcgugcugcacuccacccaggaccucuuccugcccuucuucagcaacgucacgugguuccacgccauccacguguccgggaccaacggcaccaagcgguucgacaacccggugcugcccuucaacgacggggucuacuucgcgagcaccgagaaguccaacaucauccgcggcuggaucuucgggacgacccucgacagcaagacccagucccugcugaucgugaacaacgccaccaacguggucaucaaggugugcgaguuccaguucugcaacgaccccuuccucggcguguacuaccacaagaacaacaagagcuggauggaguccgaguuccgggucuacagcuccgccaacaacugcacguucgaguacgugagccagcccuuccugauggaccuggagggcaagcaggggaacuucaagaaccuccgcgaguucguguucaagaacaucgacggcuacuucaagaucuacuccaagcacaccccgaucaaccugguccgggaccugccccagggguucagcgcccucgagccccugguggaccugcccaucggcaucaacaucacccgcuuccagacccuccuggcccugcaccgguccuaccucacgccgggggacagcagcuccggcuggaccgcgggcgccgccgccuacuacgugggguaccugcagccccgcaccuuccugcucaaguacaacgagaacggcaccaucacggacgcggucgacugcgcccuggacccccugagcgagaccaagugcacccucaaguccuucaccguggagaaggggaucuaccagacgagcaacuuccgggugcagcccaccgaguccaucguccgcuucccgaacaucaccaaccugugccccuucggcgagguguucaacgccacccgguucgccagcgucuacgccuggaaccgcaagcggaucuccaacugcguggcggacuacagcgugcuguacaacuccgccagcuucuccacguucaagugcuacggcgucagccccaccaagcucaacgaccugugcuucaccaacguguacgccgacuccuucgugauccgcggggacgagguccggcagaucgcccccggccagaccgggaacaucgccgacuacaacuacaagcugccggacgacuucacgggcugcgugaucgcguggaacagcaacaaccucgacuccaaggucgggggcaacuacaacuaccuguaccgccuguuccgcaagagcaaccucaagcccuucgagcgggacaucuccaccgagaucuaccaggccggcagcacccccugcaacggggugaagggcuucaacugcuacuucccccugcaguccuacggguuccagccgaccuacggcgugggguaccagcccuaccggguggucgugcugagcuucgagcuccugcacgcccccgccacggugugcggccccaagaaguccaccaaccuggucaagaacaagugcgugaacuucaacuucaacggccucaccgggaccggcgugcugaccgagagcaacaagaaguuccugccguuccagcaguucgggcgcgacaucgccgacacgaccgacgcgguccgcgacccccagacccuggagauccucgacaucacccccugcagcuucggcgggguguccgugaucacgccgggcaccaacaccagcaaccaggucgccgugcuguaccagggcgugaacugcaccgagguccccguggccauccacgccgaccagcugacgcccaccuggcggguguacuccaccgggagcaacgucuuccagacccgcgccggcugccucaucggggcggagcacgugaacaacuccuacgagugcgacauccccaucggcgccggcaucugcgccagcuaccagacgcagaccaacuccccgcggcgcgcccggagcguggcgucccagagcaucaucgccuacaccaugucccugggggccgagaacagcgucgccuacuccaacaacagcaucgccauccccaccaacuucacgaucuccgugaccaccgagauccugcccgugagcaugaccaagacgagcgucgacugcaccauguacaucugcggcgacuccaccgagugcagcaaccuccugcugcaguacggguccuucugcacccagcucaaccgcgcgcugacgggcaucgccguggagcaggacaagaacacccaggagguguucgcccaggucaagcagaucuacaagacgcccccgaucaaggacuucgggggcuucaacuucagccagauccugcccgaccccuccaagcccagcaagcgguccuucaucgaggaccuccuguucaacaaggugacccuggccgacgccggcuucaucaagcaguacggggacugccucggcgacaucgcggcccgcgaccugaucugcgcccagaaguucaacgggcugaccgugcucccgccccugcugaccgacgagaugaucgcccaguacaccagcgcccuccuggcgggcaccaucacguccggguggaccuucggcgccggcgccgcccugcagauccccuucgcgaugcagauggccuaccgguucaacgggaucggcgucacccagaacgugcucuacgagaaccagaagcugaucgccaaccaguucaacagcgccaucgggaagauccaggacucccugagcuccaccgccagcgcgcucggcaagcugcaggacguggucaaccagaacgcccaggcccugaacacgcucgugaagcagcuguccagcaacuucggggccaucuccagcgugcugaacgacauccucucccgccuggacaaggucgaggccgaggugcagaucgaccggcugaucaccggccgccuccagagccugcagaccuacgugacccagcagcugauccgggcggccgagauccgcgccagcgccaaccucgccgcgaccaagauguccgagugcguccugggccagagcaagcggguggacuucugcgggaagggcuaccaccugauguccuucccccagagcgccccgcacgggguggucuuccuccacgugacguacguccccgcccaggagaagaacuucaccaccgcccccgcgaucugccacgacggcaaggcccacuucccccgcgaggggguguucguguccaacggcacccacugguucgucacgcagcggaacuucuacgagccgcagaucaucaccaccgacaacaccuucgugagcggcaacugcgacguggucaucgggaucgugaacaacacgguguacgacccccugcagcccgagcuggacuccuucaaggaggagcucgacaaguacuucaagaaccacaccagccccgacgucgaccugggcgacaucuccgggaucaacgccagcguggugaacauccagaaggagaucgaccgccugaacgaggucgccaagaaccucaacgagucccugaucgaccugcaggagcucggcaaguacgagcaguacaucaaguggccgugguacaucuggcugggcuucaucgccgggcugaucgcgaucgugauggugaccaucaugcucugcugcaugaccagcugcugcuccugccugaagggcugcugcagcugcggguccugcugcaaguucgacgaggacgacagcgagcccguccugaagggcgugaagcuccacuacacgugaggacuaguguccaccugucccuccugggcugcuggauugucucguuuuccugccaaauaaacaggaucagcgcuuuacagaucucaaaggcucuuuucagagccaccaaaaaaaaaaaaaaaaaaaaaaaaaaaaaaaaaaaaaaaaaaaaaaaaaaaaaaaaaaaaaaaaaaaaaaaaaaaaaaaaaaaaaaaaaaaaaaaaaaaaa

SEQ ID NO: 23881 - RNA, 4120 nt, Artificial Sequence
  SARS-CoV-2/Wuhan/WIV05/2019__EPI_ISL_402128 spike protein mRNA gc (1-1273)(L18F_D80A_D215G_L242del_A243del_L244del_R246I_K417N_E484 K_N501Y_D614G_A701V)
aggagacccgugacccggaaguuguacggcuacgcgacuuucccucccacaaacccucgcgcccuuccuuuccuacuugggcccggcagaaagcuuaccauguucguguuccugguccuccugccccuggugagcucccagugcgugaacuucaccacccgcacgcagcucccgcccgccuacaccaacagcuucacccggggcgucuacuaccccgacaagguguuccgcuccagcgugcugcacuccacccaggaccuguuccuccccuucuucagcaacgucacgugguuccacgccauccacguguccgggaccaacggcaccaagcgguucgcgaacccggugcugcccuucaacgacggggucuacuucgccagcaccgagaaguccaacaucauccgcggcuggaucuucgggacgacccuggacagcaagacccagucccuccugaucgugaacaacgccaccaacguggucaucaaggugugcgaguuccaguucugcaacgaccccuuccugggcguguacuaccacaagaacaacaagagcuggauggaguccgaguuccgggucuacagcuccgccaacaacugcacguucgaguacgugagccagcccuuccucauggaccuggagggcaagcaggggaacuucaagaaccugcgcgaguucguguucaagaacaucgacggcuacuucaagaucuacuccaagcacaccccgaucaaccucguccgggggcugccccagggcuucagcgcccuggagccccucguggaccugcccaucgggaucaacaucacccgcuuccagacccugcacaucuccuaccucacgccgggcgacagcagcuccggcuggaccgcgggggccgccgccuacuacgugggcuaccugcagccccggaccuuccugcucaaguacaacgagaacgggaccaucacggacgcggucgacugcgcccuggacccccugagcgagaccaagugcacccucaaguccuucaccguggagaagggcaucuaccagacgagcaacuuccgcgugcagcccaccgaguccaucguccgguucccgaacaucaccaaccugugccccuucggcgagguguucaacgccacccgcuucgccagcgucuacgccuggaaccggaagcgcaucuccaacugcguggcggacuacagcgugcuguacaacuccgccagcuucuccacguucaagugcuacggggucagccccaccaagcucaacgaccugugcuucaccaacguguacgccgacuccuucgugauccggggcgacgagguccgccagaucgcccccgggcagaccggcaacaucgccgacuacaacuacaagcugccggacgacuucacggggugcgugaucgcguggaacagcaacaaccucgacuccaaggugggcggcaacuacaacuaccuguaccggcuguuccgcaagagcaaccucaagcccuucgagcgggacaucuccaccgagaucuaccaggccgggagcacccccugcaacggcgucaagggguucaacugcuacuucccccugcaguccuacggcuuccagccgaccuacggggugggcuaccagcccuaccgcguggucgugcugagcuucgagcuccugcacgcccccgccacggugugcggccccaagaaguccaccaaccuggucaagaacaagugcgugaacuucaacuucaacgggcucaccggcaccggggugcugaccgagagcaacaagaaguuccugccguuccagcaguucggccgggacaucgccgacacgaccgacgcgguccgcgacccccagacccucgagauccuggacaucacccccugcagcuucgggggcguguccgugaucacgccgggcaccaacaccagcaaccaggucgccgugcuguaccagggggugaacugcaccgagguccccguggccauccacgccgaccagcugacgcccaccuggcgcguguacuccaccggcagcaacgucuuccagacccgggccgggugccucaucggcgcggagcacgugaacaacuccuacgagugcgacauccccaucggcgccgggaucugcgccagcuaccagacgcagaccaacuccccgcgccgggcccgcagcguggcgucccagagcaucaucgccuacaccaugucccugggcgucgagaacagcguggccuacuccaacaacagcaucgccauccccaccaacuucacgaucuccgugaccaccgagauccugcccgucagcaugaccaagacgagcguggacugcaccauguacaucugcggggacuccaccgagugcagcaaccuccugcugcaguacggcuccuucugcacccagcucaaccgggcccugacggggaucgcgguggagcaggacaagaacacccaggaggucuucgcccaggugaagcagaucuacaagacgcccccgaucaaggacuucggcggcuucaacuucagccagauccugcccgaccccuccaagcccagcaagcgcuccuucaucgaggaccuccuguucaacaaggugacccuggccgacgccggguucaucaagcaguacggcgacugccucggggacaucgccgcgcgggaccugaucugcgcccagaaguucaacggccugaccguccucccgccccugcugaccgacgagaugaucgcccaguacaccagcgcccuccuggccgggaccaucacguccggcuggaccuucggcgcgggggccgcccugcagauccccuucgccaugcagauggcguaccgcuucaacggcaucggggugacccagaacgugcucuacgagaaccagaagcugaucgccaaccaguucaacagcgccaucggcaagauccaggacucccugagcuccaccgccagcgcccucgggaagcugcaggacgucgugaaccagaacgcgcaggcccugaacacgcucgugaagcagcuguccagcaacuucggcgccaucuccagcguccugaacgacauccucucccggcuggacaagguggaggccgaggugcagaucgaccgccugaucaccggccggcuccagagccugcagaccuacgucacccagcagcugauccgcgccgcggagauccgggccagcgccaaccucgccgccaccaagauguccgagugcgugcuggggcagagcaagcgcguggacuucugcggcaagggguaccaccugauguccuucccccagagcgcgccgcacggcgucguguuccuccacgucacguacgugcccgcccaggagaagaacuucaccaccgcccccgccaucugccacgacgggaaggcgcacuucccccgggagggcguguucgucuccaacggcacccacugguucgugacgcagcgcaacuucuacgagccgcagaucaucaccaccgacaacaccuucgugagcgggaacugcgacgucgugaucggcaucgugaacaacacggucuacgacccccugcagcccgagcuggacuccuucaaggaggagcucgacaaguacuucaagaaccacaccagccccgacguggaccugggggacaucuccggcaucaacgccagcguggucaacauccagaaggagaucgaccggcugaacgagguggccaagaaccucaacgagucccugaucgaccugcaggagcucggcaaguacgagcaguacaucaaguggccgugguacaucuggcugggguucaucgccggccugaucgccaucgugauggucaccaucaugcucugcugcaugaccagcugcugcuccugccugaaggggugcugcagcugcggcuccugcugcaaguucgacgaggacgacagcgagcccgugcugaagggggugaagcuccacuacacgugaggacuaguguccaccugucccuccugggcugcuggauugucucguuuuccugccaaauaaacaggaucagcgcuuuacagaucucaaaggcucuuuucagagccaccaaaaaaaaaaaaaaaaaaaaaaaaaaaaaaaaaaaaaaaaaaaaaaaaaaaaaaaaaaaaaaaaaaaaaaaaaaaaaaaaaaaaaaaaaaaaaaaaaaaaa

SEQ ID NO: 23882 - RNA, 4129 nt, Artificial Sequence
  SARS-CoV-2/Wuhan/WIV05/2019__EPI_ISL_402128 spike protein mRNA gc (1-1273)(E484K_D614G)
aggagacccgugacccggaaguuguacggcuacgcgacuuucccucccacaaacccucgcgcccuuccuuuccuacuugggcccggcagaaagcuuaccauguucguguuccugguccuccugccccuggugagcucccagugcgugaaccucaccacccgcacgcagcugccgcccgccuacaccaacagcuucacccggggcgucuacuaccccgacaagguguuccgcuccagcgugcugcacuccacccaggaccucuuccugcccuucuucagcaacgucacgugguuccacgccauccacguguccgggaccaacggcaccaagcgguucgacaacccggugcugcccuucaacgacggggucuacuucgcgagcaccgagaaguccaacaucauccgcggcuggaucuucgggacgacccucgacagcaagacccagucccugcugaucgugaacaacgccaccaacguggucaucaaggugugcgaguuccaguucugcaacgaccccuuccucggcguguacuaccacaagaacaacaagagcuggauggaguccgaguuccgggucuacagcuccgccaacaacugcacguucgaguacgugagccagcccuuccugauggaccuggagggcaagcaggggaacuucaagaaccuccgcgaguucguguucaagaacaucgacggcuacuucaagaucuacuccaagcacaccccgaucaaccugguccgggaccugccccagggguucagcgcccucgagccccugguggaccugcccaucggcaucaacaucacccgcuuccagacccuccuggcccugcaccgguccuaccucacgccgggggacagcagcuccggcuggaccgcgggcgccgccgccuacuacgugggguaccugcagccccgcaccuuccugcucaaguacaacgagaacggcaccaucacggacgcggucgacugcgcccuggacccccugagcgagaccaagugcacccucaaguccuucaccguggagaaggggaucuaccagacgagcaacuuccgggugcagcccaccgaguccaucguccgcuucccgaacaucaccaaccugugccccuucggcgagguguucaacgccacccgguucgccagcgucuacgccuggaaccgcaagcggaucuccaacugcguggcggacuacagcgugcuguacaacuccgccagcuucuccacguucaagugcuacggcgucagccccaccaagcucaacgaccugugcuucaccaacguguacgccgacuccuucgugauccgcggggacgagguccggcagaucgcccccggccagaccgggaagaucgccgacuacaacuacaagcugccggacgacuucacgggcugcgugaucgcguggaacagcaacaaccucgacuccaaggucgggggcaacuacaacuaccuguaccgccuguuccgcaagagcaaccucaagcccuucgagcgggacaucuccaccgagaucuaccaggccggcagcacccccugcaacggggugaagggcuucaacugcuacuucccccugcaguccuacggguuccagccgaccaacggcgugggguaccagcccuaccggguggucgugcugagcuucgagcuccugcacgcccccgccacggugugcggccccaagaaguccaccaaccuggucaagaacaagugcgugaacuucaacuucaacggccucaccgggaccggcgugcugaccgagagcaacaagaaguuccugccguuccagcaguucgggcgcgacaucgccgacacgaccgacgcgguccgcgacccccagacccuggagauccucgacaucacccccugcagcuucggcgggguguccgugaucacgccgggcaccaacaccagcaaccaggucgccgugcuguaccagggcgugaacugcaccgagguccccguggccauccacgccgaccagcugacgcccaccuggcggguguacuccaccgggagcaacgucuuccagacccgcgccggcugccucaucggggcggagcacgugaacaacuccuacgagugcgacauccccaucggcgccggcaucugcgccagcuaccagacgcagaccaacuccccgcggcgcgcccggagcguggcgucccagagcaucaucgccuacaccaugucccugggggccgagaacagcgucgccuacuccaacaacagcaucgccauccccaccaacuucacgaucuccgugaccaccgagauccugcccgugagcaugaccaagacgagcgucgacugcaccauguacaucugcggcgacuccaccgagugcagcaaccuccugcugcaguacggguccuucugcacccagcucaaccgcgcgcugacgggcaucgccguggagcaggacaagaacacccaggagguguucgcccaggucaagcagaucuacaagacgcccccgaucaaggacuucgggggcuucaacuucagccagauccugcccgaccccuccaagcccagcaagcgguccuucaucgaggaccuccuguucaacaaggugacccuggccgacgccggcuucaucaagcaguacggggacugccucggcgacaucgcggcccgcgaccugaucugcgcccagaaguucaacgggcugaccgugcucccgccccugcugaccgacgagaugaucgcccaguacaccagcgcccuccuggcgggcaccaucacguccggguggaccuucggcgccggcgccgcccugcagauccccuucgcgaugcagauggccuaccgguucaacgggaucggcgucacccagaacgugcucuacgagaaccagaagcugaucgccaaccaguucaacagcgccaucgggaagauccaggacucccugagcuccaccgccagcgcgcucggcaagcugcaggacguggucaaccagaacgcccaggcccugaacacgcucgugaagcagcuguccagcaacuucggggccaucuccagcgugcugaacgacauccucucccgccuggacaaggucgaggccgaggugcagaucgaccggcugaucaccggccgccuccagagccugcagaccuacgugacccagcagcugauccgggcggccgagauccgcgccagcgccaaccucgccgcgaccaagauguccgagugcguccugggccagagcaagcggguggacuucugcgggaagggcuaccaccugauguccuucccccagagcgccccgcacgggguggucuuccuccacgugacguacguccccgcccaggagaagaacuucaccaccgcccccgcgaucugccacgacggcaaggcccacuucccccgcgaggggguguucguguccaacggcacccacugguucgucacgcagcggaacuucuacgagccgcagaucaucaccaccgacaacaccuucgugagcggcaacugcgacguggucaucgggaucgugaacaacacgguguacgacccccugcagcccgagcuggacuccuucaaggaggagcucgacaaguacuucaagaaccacaccagccccgacgucgaccugggcgacaucuccgggaucaacgccagcguggugaacauccagaaggagaucgaccgccugaacgaggucgccaagaaccucaacgagucccugaucgaccugcaggagcucggcaaguacgagcaguacaucaaguggccgugguacaucuggcugggcuucaucgccgggcugaucgcgaucgugauggugaccaucaugcucugcugcaugaccagcugcugcuccugccugaagggcugcugcagcugcggguccugcugcaaguucgacgaggacgacagcgagcccguccugaagggcgugaagcuccacuacacgugaggacuaguguccaccugucccuccugggcugcuggauugucucguuuuccugccaaauaaacaggaucagcgcuuuacagaucucaaaggcucuuuucagagccaccaaaaaaaaaaaaaaaaaaaaaaaaaaaaaaaaaaaaaaaaaaaaaaaaaaaaaaaaaaaaaaaaaaaaaaaaaaaaaaaaaaaaaaaaaaaaaaaaaaaaa

SEQ ID NO: 23883 - RNA, 4129 nt, Artificial Sequence
  SARS-CoV-2/Wuhan/WIV05/2019__EPI_ISL_402128 spike protein mRNA gc (1-1273)(L18F_T20N_P26S_D138Y_R190S_K417T_E484K_N501Y_D614G_H655Y _T1027I)
aggagacccgugacccggaaguuguacggcuacgcgacuuucccucccacaaacccucgcgcccuuccuuuccuacuugggcccggcagaaagcuuaccauguucguguuccugguccuccugccccuggugagcucccagugcgugaacuucaccaaccgcacccagcucccgagcgccuacacgaacuccuucacccggggcgucuacuaccccgacaagguguuccgcagcuccgugcugcacagcacccaggaccuguuccuccccuucuucuccaacgucaccugguuccacgccauccacgugagcgggacgaacggcaccaagcgguucgacaaccccgugcugccguucaacgacggggucuacuucgcguccaccgagaaguccaacaucauccgcggcuggaucuucgggaccacgcuggacuccaagacccagagccuccugaucgugaacaacgccaccaacguggucaucaaggugugcgaguuccaguucugcaacuaccccuuccugggcguguacuaccacaagaacaacaaguccuggauggagagcgaguuccgggucuacuccagcgccaacaacugcaccuucgaguacgugucccagcccuuccucauggaccuggagggcaagcaggggaacuucaagaaccugagcgaguucguguucaagaacaucgacggcuacuucaagaucuacuccaagcacacgcccaucaaccucguccgcgaccugccgcagggguucagcgcccuggagccccucguggaccugcccaucggcaucaacaucacccgguuccagacccugcucgcccugcaccgcagcuaccugacccccggggacuccagcuccggcuggacggcgggcgccgccgccuacuacgugggguaccuccagccgcggaccuuccugcugaaguacaacgagaacggcaccaucaccgacgcggucgacugcgcccucgacccccugagcgagacgaagugcacccugaaguccuucaccguggagaaggggaucuaccagaccagcaacuuccgcgugcagcccacggaguccaucguccgguuccccaacaucaccaaccucugcccguucggcgagguguucaacgccacccgcuucgccagcgucuacgccuggaaccggaagcgcaucuccaacugcguggcggacuacagcgugcuguacaacuccgccagcuucuccaccuucaagugcuacggcgucagccccacgaagcugaacgaccucugcuucaccaacguguacgccgacuccuucgugauccgcggggacgagguccggcagaucgcccccggccagaccgggaccaucgccgacuacaacuacaagcugcccgacgacuucacgggcugcgugaucgcguggaacagcaacaaccuggacuccaaggucgggggcaacuacaacuaccucuaccggcuguuccgcaagagcaaccugaagccguucgagcgggacaucuccaccgagaucuaccaggccggcagcacccccugcaacggggugaagggcuucaacugcuacuucccccuccagagcuacggguuccagcccaccuacggcgugggguaccagccguaccgcguggucgugcuguccuucgagcugcuccacgcccccgccacggugugcggccccaagaaguccaccaaccuggucaagaacaagugcgugaacuucaacuucaacggccugaccgggaccggcgugcucaccgagagcaacaagaaguuccugcccuuccagcaguucgggcgggacaucgccgacacgaccgacgcgguccgcgacccgcagacccuggagauccuggacaucacccccugcagcuucggcgggguguccgugaucacgcccggcaccaacaccagcaaccaggucgccgugcucuaccagggcgugaacugcaccgaggucccgguggccauccacgccgaccagcugacgcccaccuggcgcguguacuccaccgggagcaacgucuuccagacccgggccggcugccugaucggggcggaguacgugaacaacuccuacgagugcgacauccccaucggcgccggcaucugcgccagcuaccagacgcagaccaacagcccccgccgggcccgcagcguggcgucccagagcaucaucgccuacaccaugucccucggggccgagaacagcgucgccuacuccaacaacagcaucgccaucccgaccaacuucacgaucagcgugaccaccgagauccugcccguguccaugaccaagacgagcgucgacugcaccauguacaucugcggcgacuccaccgagugcagcaaccugcuccugcaguacggguccuucugcacccagcugaaccgggcgcucacgggcaucgccguggagcaggacaagaacacccaggagguguucgcccaggucaagcagaucuacaagaccccgcccaucaaggacuucgggggcuucaacuucagccagauccugcccgaccccuccaagcccagcaagcgcuccuucaucgaggaccuccuguucaacaaggugacccuggccgacgccggcuucaucaagcaguacggggacugccugggcgacaucgcggcccgggaccucaucugcgcccagaaguucaacgggcugacggugcugcccccgcuccugaccgacgagaugaucgcccaguacaccagcgcccugcucgcgggcaccaucacguccggguggaccuucggcgccggcgccgcccugcagauccccuucgcgaugcagauggccuaccgcuucaacgggaucggcgucacccagaacgugcuguacgagaaccagaagcucaucgccaaccaguucaacagcgccaucgggaagauccaggacucccugagcuccaccgccagcgcgcugggcaagcuccaggacguggucaaccagaacgcccaggcccugaacacgcuggugaagcagcucuccagcaacuucggggccaucuccagcgugcugaacgacauccugagccggcucgacaaggucgaggccgaggugcagaucgaccgccugaucaccggccggcugcagucccuccagaccuacgugacccagcagcugauccgcgcggccgagauccgggccagcgccaaccuggccgcgaucaagauguccgagugcguccucggccagagcaagcgcguggacuucugcgggaagggcuaccaccugauguccuucccccagagcgcgccccacgggguggucuuccugcacgugaccuacgucccggcccaggagaagaacuucacgaccgcccccgccaucugccacgacggcaaggcccacuucccccgggaggggguguucguguccaacggcacccacugguucgucacccagcgcaacuucuacgagccccagaucaucacgaccgacaacaccuucgugagcggcaacugcgacguggucaucgggaucgugaacaacaccguguacgacccgcuccagcccgagcuggacuccuucaaggaggagcuggacaaguacuucaagaaccacacgagccccgacgucgaccucggcgacaucuccgggaucaacgccagcguggugaacauccagaaggagaucgaccggcugaacgaggucgccaagaaccugaacgagucccucaucgaccugcaggagcugggcaaguacgagcaguacaucaaguggcccugguacaucuggcucggcuucaucgccgggcugaucgcgaucgugauggugaccaucaugcugugcugcaugaccagcugcugcuccugccucaagggcugcugcagcugcggguccugcugcaaguucgacgaggacgacagcgagccgguccugaagggcgugaagcugcacuacaccugaggacuaguguccaccugucccuccugggcugcuggauugucucguuuuccugccaaauaaacaggaucagcgcuuuacagaucucaaaggcucuuuucagagccaccaaaaaaaaaaaaaaaaaaaaaaaaaaaaaaaaaaaaaaaaaaaaaaaaaaaaaaaaaaaaaaaaaaaaaaaaaaaaaaaaaaaaaaaaaaaaaaaaaaaaa

SEQ ID NO: 23884 - RNA, 4129 nt, Artificial Sequence
  SARS-CoV-2/Wuhan/WIV05/2019__EPI_ISL_402128 spike protein mRNA gc (1-1273)(S13I_W152C_L452R_D614G)
aggagacccgugacccggaaguuguacggcuacgcgacuuucccucccacaaacccucgcgcccuuccuuuccuacuugggcccggcagaaagcuuaccauguucguguuccugguccuccugccccuggugagcauccagugcgugaaccucaccacccgcacgcagcugccgcccgccuacaccaacuccuucacccggggcgucuacuaccccgacaagguguuccgcagcuccgugcugcacagcacccaggaccucuuccugcccuucuucuccaacgucacgugguuccacgccauccacgugagcgggaccaacggcaccaagcgguucgacaacccggugcugcccuucaacgacggggucuacuucgcguccaccgagaaguccaacaucauccgcggcuggaucuucgggacgacccucgacagcaagacccagagccugcugaucgugaacaacgccaccaacguggucaucaaggugugcgaguuccaguucugcaacgaccccuuccucggcguguacuaccacaagaacaacaaguccugcauggagagcgaguuccgggucuacuccagcgccaacaacugcacguucgaguacgugucccagcccuuccugauggaccuggagggcaagcaggggaacuucaagaaccuccgcgaguucguguucaagaacaucgacggcuacuucaagaucuacagcaagcacaccccgaucaaccugguccgggaccugccccagggguucuccgcccucgagccccugguggaccugcccaucggcaucaacaucacccgcuuccagacccuccuggcccugcaccggagcuaccucacgccgggggacuccagcagcggcuggaccgcgggcgccgccgccuacuacgugggguaccugcagccccgcaccuuccugcucaaguacaacgagaacggcaccaucacggacgcggucgacugcgcccuggacccccuguccgagaccaagugcacccucaagagcuucaccguggagaaggggaucuaccagacguccaacuuccgggugcagcccaccgagagcaucguccgcuucccgaacaucaccaaccugugccccuucggcgagguguucaacgccacccgguucgccuccgucuacgccuggaaccgcaagcggaucagcaacugcguggcggacuacuccgugcuguacaacagcgccuccuucagcacguucaagugcuacggcgucucccccaccaagcucaacgaccugugcuucaccaacguguacgccgacagcuucgugauccgcggggacgagguccggcagaucgcccccggccagaccgggaagaucgccgacuacaacuacaagcugccggacgacuucacgggcugcgugaucgcguggaacuccaacaaccucgacagcaaggucgggggcaacuacaacuaccgcuaccggcuguuccgcaaguccaaccugaagcccuucgagcgggacaucagcaccgagaucuaccaggccggcuccacccccugcaacgggguggagggcuucaacugcuacuucccccuccagagcuacggguuccagccgaccaacggcgugggguaccagcccuaccgcguggucgugcuguccuucgagcugcuccacgcccccgccacggugugcggccccaagaaguccaccaaccuggucaagaacaagugcgugaacuucaacuucaacggccugaccgggaccggcgugcucaccgagagcaacaagaaguuccugccguuccagcaguucgggcgcgacaucgccgacacgaccgacgcgguccgggacccccagacccuggagauccuggacaucacccccugcagcuucggcggggugagcgugaucacgccgggcaccaacaccuccaaccaggucgccgugcucuaccagggcgugaacugcaccgagguccccguggccauccacgccgaccagcugacgcccaccuggcgcguguacagcaccggguccaacgucuuccagacccgggccggcugccugaucggggcggagcacgugaacaacagcuacgagugcgacauccccaucggcgccggcaucugcgccuccuaccagacgcagaccaacagcccgcgccgggcccgcuccguggcgagccaguccaucaucgccuacaccaugagccucggggccgagaacuccgucgccuacagcaacaacuccaucgccauccccaccaacuucacgaucagcgugaccaccgagauccugcccguguccaugaccaagacgagcgucgacugcaccauguacaucugcggcgacagcaccgagugcuccaaccugcuccugcaguacgggagcuucugcacccagcugaaccgggcgcucacgggcaucgccguggagcaggacaagaacacccaggagguguucgcccaggucaagcagaucuacaagacgcccccgaucaaggacuucgggggcuucaacuucucccagauccugcccgaccccagcaagcccuccaagcgcagcuucaucgaggaccuccuguucaacaaggugacccuggccgacgccggcuucaucaagcaguacggggacugccugggcgacaucgcggcccgggaccucaucugcgcccagaaguucaacgggcugaccgugcugccgccccuccugaccgacgagaugaucgcccaguacaccuccgcccugcucgcgggcaccaucacgagcggguggaccuucggcgccggcgccgcccugcagauccccuucgcgaugcagauggccuaccgcuucaacgggaucggcgucacccagaacgugcuguacgagaaccagaagcucaucgccaaccaguucaacuccgccaucgggaagauccaggacagccuguccagcaccgccuccgcgcugggcaagcuccaggacguggucaaccagaacgcccaggcccugaacacgcuggugaagcagcucagcuccaacuucggggccaucagcuccgugcugaacgacauccugagccggcucgacaaggucgaggccgaggugcagaucgaccgccugaucaccggccggcugcagucccuccagaccuacgugacccagcagcugauccgcgcggccgagauccgggccagcgccaaccuggccgcgaccaagaugagcgagugcguccucggccaguccaagcgcguggacuucugcgggaagggcuaccaccugaugagcuucccccaguccgccccgcacgggguggucuuccugcacgugacguacguccccgcccaggagaagaacuucaccaccgcccccgcgaucugccacgacggcaaggcccacuucccccgggaggggguguucgugagcaacggcacccacugguucgucacgcagcgcaacuucuacgagccgcagaucaucaccaccgacaacaccuucguguccggcaacugcgacguggucaucgggaucgugaacaacacgguguacgacccccuccagcccgagcuggacagcuucaaggaggagcuggacaaguacuucaagaaccacaccucccccgacgucgaccucggcgacaucagcgggaucaacgccuccguggugaacauccagaaggagaucgaccggcugaacgaggucgccaagaaccugaacgagagccucaucgaccugcaggagcugggcaaguacgagcaguacaucaaguggccgugguacaucuggcucggcuucaucgccgggcugaucgcgaucgugauggugaccaucaugcugugcugcaugaccuccugcugcagcugccucaagggcugcugcuccugcgggagcugcugcaaguucgacgaggacgacuccgagcccguccugaagggcgugaagcugcacuacacgugaggacuaguguccaccugucccuccugggcugcuggauugucucguuuuccugccaaauaaacaggaucagcgcuuuacagaucucaaaggcucuuuucagagccaccaaaaaaaaaaaaaaaaaaaaaaaaaaaaaaaaaaaaaaaaaaaaaaaaaaaaaaaaaaaaaaaaaaaaaaaaaaaaaaaaaaaaaaaaaaaaaaaaaaaaa

SEQ ID NO: 23885 - RNA, 4129 nt, Artificial Sequence
  SARS-CoV-2/Wuhan/WIV05/2019__EPI_ISL_402128 spike protein mRNA gc (1-1273)
aggagacccgugacccggaaguuguacggcuacgcgacuuucccucccacaaacccucgcgcccuuccuuuccuacuugggcccggcagaaagcuuaccauguucguguuccuggugcugcugccccuggugagcagccagugcgugaaccugaccacccggacccagcugccaccagccuacaccaacagcuucacccggggcgucuacuaccccgacaagguguuccggagcagcguccugcacagcacccaggaccuguuccugcccuucuucagcaacgugaccugguuccacgccauccacgugagcggcaccaacggcaccaagcgguucgacaaccccgugcugcccuucaacgacggcguguacuucgccagcaccgagaagagcaacaucauccggggcuggaucuucggcaccacccuggacagcaagacccagagccugcugaucgugaauaacgccaccaacguggugaucaaggugugcgaguuccaguucugcaacgaccccuuccugggcguguacuaccacaagaacaacaagagcuggauggagagcgaguuccggguguacagcagcgccaacaacugcaccuucgaguacgugagccagcccuuccugauggaccuggagggcaagcagggcaacuucaagaaccugcgggaguucguguucaagaacaucgacggcuacuucaagaucuacagcaagcacaccccaaucaaccuggugcgggaucugccccagggcuucucagcccuggagccccugguggaccugcccaucggcaucaacaucacccgguuccagacccugcuggcccugcaccggagcuaccugaccccaggcgacagcagcagcggguggacagcaggcgcggcugcuuacuacgugggcuaccugcagccccggaccuuccugcugaaguacaacgagaacggcaccaucaccgacgccguggacugcgcccuggacccucugagcgagaccaagugcacccugaagagcuucaccguggagaagggcaucuaccagaccagcaacuuccgggugcagcccaccgagagcaucgugcgguuccccaacaucaccaaccugugccccuucggcgagguguucaacgccacccgguucgccagcguguacgccuggaaccggaagcggaucagcaacugcguggccgacuacagcgugcuguacaacagcgccagcuucagcaccuucaagugcuacggcgugagccccaccaagcugaacgaccugugcuucaccaacguguacgccgacagcuucgugauccguggcgacgaggugcggcagaucgcacccggccagacaggcaagaucgccgacuacaacuacaagcugcccgacgacuucaccggcugcgugaucgccuggaacagcaacaaccucgacagcaaggugggcggcaacuacaacuaccuguaccggcuguuccggaagagcaaccugaagcccuucgagcgggacaucagcaccgagaucuaccaagccggcuccaccccuugcaacggcguggagggcuucaacugcuacuucccucugcagagcuacggcuuccagcccaccaacggcgugggcuaccagcccuaccgggugguggugcugagcuucgagcugcugcacgccccagccaccguguguggccccaagaagagcaccaaccuggugaagaacaagugcgugaacuucaacuucaacggccuuaccggcaccggcgugcugaccgagagcaacaagaaauuccugcccuuucagcaguucggccgggacaucgccgacaccaccgacgcugugcgggauccccagacccuggagauccuggacaucaccccuugcagcuucggcggcgugagcgugaucaccccaggcaccaacaccagcaaccagguggccgugcuguaccaggacgugaacugcaccgaggugcccguggccauccacgccgaccagcugacacccaccuggcgggucuacagcaccggcagcaacguguuccagacccgggccgguugccugaucggcgccgagcacgugaacaacagcuacgagugcgacauccccaucggcgccggcaucugugccagcuaccagacccagaccaauucaccccggagggcaaggagcguggccagccagagcaucaucgccuacaccaugagccugggcgccgagaacagcguggccuacagcaacaacagcaucgccauccccaccaacuucaccaucagcgugaccaccgagauucugcccgugagcaugaccaagaccagcguggacugcaccauguacaucugcggcgacagcaccgagugcagcaaccugcugcugcaguacggcagcuucugcacccagcugaaccgggcccugaccggcaucgccguggagcaggacaagaacacccaggagguguucgcccaggugaagcagaucuacaagaccccucccaucaaggacuucggcggcuucaacuucagccagauccugcccgaccccagcaagcccagcaagcggagcuucaucgaggaccugcuguucaacaaggugacccuagccgacgccggcuucaucaagcaguacggcgacugccucggcgacauagccgcccgggaccugaucugcgcccagaaguucaacggccugaccgugcugccuccccugcugaccgacgagaugaucgcccaguacaccagcgcccuguuagccggaaccaucaccagcggcuggacuuucggcgcuggagccgcucugcagauccccuucgccaugcagauggccuaccgguucaacggcaucggcgugacccagaacgugcuguacgagaaccagaagcugaucgccaaccaguucaacagcgccaucggcaagauccaggacagccugagcagcaccgcuagcgcccugggcaagcugcaggacguggugaaccagaacgcccaggcccugaacacccuggugaagcagcugagcagcaacuucggcgccaucagcagcgugcugaacgacauccugagccggcuggacaaggucgaggccgaggugcagaucgaccggcugaucacuggccggcugcagagccugcagaccuacgugacccagcagcugauccgggccgccgagauucgggccagcgccaaccuggccgccaccaagaugagcgagugcgugcugggccagagcaagcggguggacuucugcggcaagggcuaccaccugaugagcuuuccccagagcgcaccccacggagugguguuccugcacgugaccuacgugcccgcccaggagaagaacuucaccaccgccccagccaucugccacgacggcaaggcccacuuuccccgggagggcguguucgugagcaacggcacccacugguucgugacccagcggaacuucuacgagccccagaucaucaccaccgacaacaccuucgugagcggcaacugcgacguggugaucggcaucgugaacaacaccguguacgauccccugcagcccgagcuggacagcuucaaggaggagcuggacaaguacuucaagaaucacaccagccccgacguggaccugggcgacaucagcggcaucaacgccagcguggugaacauccagaaggagaucgaucggcugaacgagguggccaagaaccugaacgagagccugaucgaccugcaggagcugggcaaguacgagcaguacaucaaguggcccugguacaucuggcugggcuucaucgccggccugaucgccaucgugauggugaccaucaugcugugcugcaugaccagcugcugcagcugccugaagggcuguugcagcugcggcagcugcugcaaguucgacgaggacgacagcgagcccgugcugaagggcgugaagcugcacuacaccugaggacuaguguccaccugucccuccugggcugcuggauugucucguuuuccugccaaauaaacaggaucagcgcuuuacagaucucaaaggcucuuuucagagccaccaaaaaaaaaaaaaaaaaaaaaaaaaaaaaaaaaaaaaaaaaaaaaaaaaaaaaaaaaaaaaaaaaaaaaaaaaaaaaaaaaaaaaaaaaaaaaaaaaaaaa

SEQ ID NO: 23886 - RNA, 4129 nt, Artificial Sequence
  SARS-CoV-2/Wuhan/WIV05/2019__EPI_ISL_402128 spike protein mRNA gc (1-1273)(D614G)
aggagacccgugacccggaaguuguacggcuacgcgacuuucccucccacaaacccucgcgcccuuccuuuccuacuugggcccggcagaaagcuuaccauguucguguuccuggugcugcugccccuggugagcagccagugcgugaaccugaccacccggacccagcugccaccagccuacaccaacagcuucacccggggcgucuacuaccccgacaagguguuccggagcagcguccugcacagcacccaggaccuguuccugcccuucuucagcaacgugaccugguuccacgccauccacgugagcggcaccaacggcaccaagcgguucgacaaccccgugcugcccuucaacgacggcguguacuucgccagcaccgagaagagcaacaucauccggggcuggaucuucggcaccacccuggacagcaagacccagagccugcugaucgugaauaacgccaccaacguggugaucaaggugugcgaguuccaguucugcaacgaccccuuccugggcguguacuaccacaagaacaacaagagcuggauggagagcgaguuccggguguacagcagcgccaacaacugcaccuucgaguacgugagccagcccuuccugauggaccuggagggcaagcagggcaacuucaagaaccugcgggaguucguguucaagaacaucgacggcuacuucaagaucuacagcaagcacaccccaaucaaccuggugcgggaucugccccagggcuucucagcccuggagccccugguggaccugcccaucggcaucaacaucacccgguuccagacccugcuggcccugcaccggagcuaccugaccccaggcgacagcagcagcggguggacagcaggcgcggcugcuuacuacgugggcuaccugcagccccggaccuuccugcugaaguacaacgagaacggcaccaucaccgacgccguggacugcgcccuggacccucugagcgagaccaagugcacccugaagagcuucaccguggagaagggcaucuaccagaccagcaacuuccgggugcagcccaccgagagcaucgugcgguuccccaacaucaccaaccugugccccuucggcgagguguucaacgccacccgguucgccagcguguacgccuggaaccggaagcggaucagcaacugcguggccgacuacagcgugcuguacaacagcgccagcuucagcaccuucaagugcuacggcgugagccccaccaagcugaacgaccugugcuucaccaacguguacgccgacagcuucgugauccguggcgacgaggugcggcagaucgcacccggccagacaggcaagaucgccgacuacaacuacaagcugcccgacgacuucaccggcugcgugaucgccuggaacagcaacaaccucgacagcaaggugggcggcaacuacaacuaccuguaccggcuguuccggaagagcaaccugaagcccuucgagcgggacaucagcaccgagaucuaccaagccggcuccaccccuugcaacggcguggagggcuucaacugcuacuucccucugcagagcuacggcuuccagcccaccaacggcgugggcuaccagcccuaccgggugguggugcugagcuucgagcugcugcacgccccagccaccguguguggccccaagaagagcaccaaccuggugaagaacaagugcgugaacuucaacuucaacggccuuaccggcaccggcgugcugaccgagagcaacaagaaauuccugcccuuucagcaguucggccgggacaucgccgacaccaccgacgcugugcgggauccccagacccuggagauccuggacaucaccccuugcagcuucggcggcgugagcgugaucaccccaggcaccaacaccagcaaccagguggccgugcuguaccagggcgugaacugcaccgaggugcccguggccauccacgccgaccagcugacacccaccuggcgggucuacagcaccggcagcaacguguuccagacccgggccgguugccugaucggcgccgagcacgugaacaacagcuacgagugcgacauccccaucggcgccggcaucugugccagcuaccagacccagaccaauucaccccggagggcaaggagcguggccagccagagcaucaucgccuacaccaugagccugggcgccgagaacagcguggccuacagcaacaacagcaucgccauccccaccaacuucaccaucagcgugaccaccgagauucugcccgugagcaugaccaagaccagcguggacugcaccauguacaucugcggcgacagcaccgagugcagcaaccugcugcugcaguacggcagcuucugcacccagcugaaccgggcccugaccggcaucgccguggagcaggacaagaacacccaggagguguucgcccaggugaagcagaucuacaagaccccucccaucaaggacuucggcggcuucaacuucagccagauccugcccgaccccagcaagcccagcaagcggagcuucaucgaggaccugcuguucaacaaggugacccuagccgacgccggcuucaucaagcaguacggcgacugccucggcgacauagccgcccgggaccugaucugcgcccagaaguucaacggccugaccgugcugccuccccugcugaccgacgagaugaucgcccaguacaccagcgcccuguuagccggaaccaucaccagcggcuggacuuucggcgcuggagccgcucugcagauccccuucgccaugcagauggccuaccgguucaacggcaucggcgugacccagaacgugcuguacgagaaccagaagcugaucgccaaccaguucaacagcgccaucggcaagauccaggacagccugagcagcaccgcuagcgcccugggcaagcugcaggacguggugaaccagaacgcccaggcccugaacacccuggugaagcagcugagcagcaacuucggcgccaucagcagcgugcugaacgacauccugagccggcuggacaaggucgaggccgaggugcagaucgaccggcugaucacuggccggcugcagagccugcagaccuacgugacccagcagcugauccgggccgccgagauucgggccagcgccaaccuggccgccaccaagaugagcgagugcgugcugggccagagcaagcggguggacuucugcggcaagggcuaccaccugaugagcuuuccccagagcgcaccccacggagugguguuccugcacgugaccuacgugcccgcccaggagaagaacuucaccaccgccccagccaucugccacgacggcaaggcccacuuuccccgggagggcguguucgugagcaacggcacccacugguucgugacccagcggaacuucuacgagccccagaucaucaccaccgacaacaccuucgugagcggcaacugcgacguggugaucggcaucgugaacaacaccguguacgauccccugcagcccgagcuggacagcuucaaggaggagcuggacaaguacuucaagaaucacaccagccccgacguggaccugggcgacaucagcggcaucaacgccagcguggugaacauccagaaggagaucgaucggcugaacgagguggccaagaaccugaacgagagccugaucgaccugcaggagcugggcaaguacgagcaguacaucaaguggcccugguacaucuggcugggcuucaucgccggccugaucgccaucgugauggugaccaucaugcugugcugcaugaccagcugcugcagcugccugaagggcuguugcagcugcggcagcugcugcaaguucgacgaggacgacagcgagcccgugcugaagggcgugaagcugcacuacaccugaggacuaguguccaccugucccuccugggcugcuggauugucucguuuuccugccaaauaaacaggaucagcgcuuuacagaucucaaaggcucuuuucagagccaccaaaaaaaaaaaaaaaaaaaaaaaaaaaaaaaaaaaaaaaaaaaaaaaaaaaaaaaaaaaaaaaaaaaaaaaaaaaaaaaaaaaaaaaaaaaaaaaaaaaaa

SEQ ID NO: 23887 - RNA, 4129 nt, Artificial Sequence
  SARS-CoV-2/Wuhan/WIV05/2019__EPI_ISL_402128 spike protein mRNA gc (1-1273)(A222V_D614G)
aggagacccgugacccggaaguuguacggcuacgcgacuuucccucccacaaacccucgcgcccuuccuuuccuacuugggcccggcagaaagcuuaccauguucguguuccuggugcugcugccccuggugagcagccagugcgugaaccugaccacccggacccagcugccaccagccuacaccaacagcuucacccggggcgucuacuaccccgacaagguguuccggagcagcguccugcacagcacccaggaccuguuccugcccuucuucagcaacgugaccugguuccacgccauccacgugagcggcaccaacggcaccaagcgguucgacaaccccgugcugcccuucaacgacggcguguacuucgccagcaccgagaagagcaacaucauccggggcuggaucuucggcaccacccuggacagcaagacccagagccugcugaucgugaauaacgccaccaacguggugaucaaggugugcgaguuccaguucugcaacgaccccuuccugggcguguacuaccacaagaacaacaagagcuggauggagagcgaguuccggguguacagcagcgccaacaacugcaccuucgaguacgugagccagcccuuccugauggaccuggagggcaagcagggcaacuucaagaaccugcgggaguucguguucaagaacaucgacggcuacuucaagaucuacagcaagcacaccccaaucaaccuggugcgggaucugccccagggcuucucagugcuggagccccugguggaccugcccaucggcaucaacaucacccgguuccagacccugcuggcccugcaccggagcuaccugaccccaggcgacagcagcagcggguggacagcaggcgcggcugcuuacuacgugggcuaccugcagccccggaccuuccugcugaaguacaacgagaacggcaccaucaccgacgccguggacugcgcccuggacccucugagcgagaccaagugcacccugaagagcuucaccguggagaagggcaucuaccagaccagcaacuuccgggugcagcccaccgagagcaucgugcgguuccccaacaucaccaaccugugccccuucggcgagguguucaacgccacccgguucgccagcguguacgccuggaaccggaagcggaucagcaacugcguggccgacuacagcgugcuguacaacagcgccagcuucagcaccuucaagugcuacggcgugagccccaccaagcugaacgaccugugcuucaccaacguguacgccgacagcuucgugauccguggcgacgaggugcggcagaucgcacccggccagacaggcaagaucgccgacuacaacuacaagcugcccgacgacuucaccggcugcgugaucgccuggaacagcaacaaccucgacagcaaggugggcggcaacuacaacuaccuguaccggcuguuccggaagagcaaccugaagcccuucgagcgggacaucagcaccgagaucuaccaagccggcuccaccccuugcaacggcguggagggcuucaacugcuacuucccucugcagagcuacggcuuccagcccaccaacggcgugggcuaccagcccuaccgggugguggugcugagcuucgagcugcugcacgccccagccaccguguguggccccaagaagagcaccaaccuggugaagaacaagugcgugaacuucaacuucaacggccuuaccggcaccggcgugcugaccgagagcaacaagaaauuccugcccuuucagcaguucggccgggacaucgccgacaccaccgacgcugugcgggauccccagacccuggagauccuggacaucaccccuugcagcuucggcggcgugagcgugaucaccccaggcaccaacaccagcaaccagguggccgugcuguaccagggcgugaacugcaccgaggugcccguggccauccacgccgaccagcugacacccaccuggcgggucuacagcaccggcagcaacguguuccagacccgggccgguugccugaucggcgccgagcacgugaacaacagcuacgagugcgacauccccaucggcgccggcaucugugccagcuaccagacccagaccaauucaccccggagggcaaggagcguggccagccagagcaucaucgccuacaccaugagccugggcgccgagaacagcguggccuacagcaacaacagcaucgccauccccaccaacuucaccaucagcgugaccaccgagauucugcccgugagcaugaccaagaccagcguggacugcaccauguacaucugcggcgacagcaccgagugcagcaaccugcugcugcaguacggcagcuucugcacccagcugaaccgggcccugaccggcaucgccguggagcaggacaagaacacccaggagguguucgcccaggugaagcagaucuacaagaccccucccaucaaggacuucggcggcuucaacuucagccagauccugcccgaccccagcaagcccagcaagcggagcuucaucgaggaccugcuguucaacaaggugacccuagccgacgccggcuucaucaagcaguacggcgacugccucggcgacauagccgcccgggaccugaucugcgcccagaaguucaacggccugaccgugcugccuccccugcugaccgacgagaugaucgcccaguacaccagcgcccuguuagccggaaccaucaccagcggcuggacuuucggcgcuggagccgcucugcagauccccuucgccaugcagauggccuaccgguucaacggcaucggcgugacccagaacgugcuguacgagaaccagaagcugaucgccaaccaguucaacagcgccaucggcaagauccaggacagccugagcagcaccgcuagcgcccugggcaagcugcaggacguggugaaccagaacgcccaggcccugaacacccuggugaagcagcugagcagcaacuucggcgccaucagcagcgugcugaacgacauccugagccggcuggacaaggucgaggccgaggugcagaucgaccggcugaucacuggccggcugcagagccugcagaccuacgugacccagcagcugauccgggccgccgagauucgggccagcgccaaccuggccgccaccaagaugagcgagugcgugcugggccagagcaagcggguggacuucugcggcaagggcuaccaccugaugagcuuuccccagagcgcaccccacggagugguguuccugcacgugaccuacgugcccgcccaggagaagaacuucaccaccgccccagccaucugccacgacggcaaggcccacuuuccccgggagggcguguucgugagcaacggcacccacugguucgugacccagcggaacuucuacgagccccagaucaucaccaccgacaacaccuucgugagcggcaacugcgacguggugaucggcaucgugaacaacaccguguacgauccccugcagcccgagcuggacagcuucaaggaggagcuggacaaguacuucaagaaucacaccagccccgacguggaccugggcgacaucagcggcaucaacgccagcguggugaacauccagaaggagaucgaucggcugaacgagguggccaagaaccugaacgagagccugaucgaccugcaggagcugggcaaguacgagcaguacaucaaguggcccugguacaucuggcugggcuucaucgccggccugaucgccaucgugauggugaccaucaugcugugcugcaugaccagcugcugcagcugccugaagggcuguugcagcugcggcagcugcugcaaguucgacgaggacgacagcgagcccgugcugaagggcgugaagcugcacuacaccugaggacuaguguccaccugucccuccugggcugcuggauugucucguuuuccugccaaauaaacaggaucagcgcuuuacagaucucaaaggcucuuuucagagccaccaaaaaaaaaaaaaaaaaaaaaaaaaaaaaaaaaaaaaaaaaaaaaaaaaaaaaaaaaaaaaaaaaaaaaaaaaaaaaaaaaaaaaaaaaaaaaaaaaaaaa

SEQ ID NO: 23888 - RNA, 4129 nt, Artificial Sequence
  SARS-CoV-2/Wuhan/WIV05/2019__EPI_ISL_402128 spike protein mRNA gc (1-1273)(N439K_D614G)
aggagacccgugacccggaaguuguacggcuacgcgacuuucccucccacaaacccucgcgcccuuccuuuccuacuugggcccggcagaaagcuuaccauguucguguuccuggugcugcugccccuggugagcagccagugcgugaaccugaccacccggacccagcugccaccagccuacaccaacagcuucacccggggcgucuacuaccccgacaagguguuccggagcagcguccugcacagcacccaggaccuguuccugcccuucuucagcaacgugaccugguuccacgccauccacgugagcggcaccaacggcaccaagcgguucgacaaccccgugcugcccuucaacgacggcguguacuucgccagcaccgagaagagcaacaucauccggggcuggaucuucggcaccacccuggacagcaagacccagagccugcugaucgugaauaacgccaccaacguggugaucaaggugugcgaguuccaguucugcaacgaccccuuccugggcguguacuaccacaagaacaacaagagcuggauggagagcgaguuccggguguacagcagcgccaacaacugcaccuucgaguacgugagccagcccuuccugauggaccuggagggcaagcagggcaacuucaagaaccugcgggaguucguguucaagaacaucgacggcuacuucaagaucuacagcaagcacaccccaaucaaccuggugcgggaucugccccagggcuucucagcccuggagccccugguggaccugcccaucggcaucaacaucacccgguuccagacccugcuggcccugcaccggagcuaccugaccccaggcgacagcagcagcggguggacagcaggcgcggcugcuuacuacgugggcuaccugcagccccggaccuuccugcugaaguacaacgagaacggcaccaucaccgacgccguggacugcgcccuggacccucugagcgagaccaagugcacccugaagagcuucaccguggagaagggcaucuaccagaccagcaacuuccgggugcagcccaccgagagcaucgugcgguuccccaacaucaccaaccugugccccuucggcgagguguucaacgccacccgguucgccagcguguacgccuggaaccggaagcggaucagcaacugcguggccgacuacagcgugcuguacaacagcgccagcuucagcaccuucaagugcuacggcgugagccccaccaagcugaacgaccugugcuucaccaacguguacgccgacagcuucgugauccguggcgacgaggugcggcagaucgcacccggccagacaggcaagaucgccgacuacaacuacaagcugcccgacgacuucaccggcugcgugaucgccuggaacagcaagaaccucgacagcaaggugggcggcaacuacaacuaccuguaccggcuguuccggaagagcaaccugaagcccuucgagcgggacaucagcaccgagaucuaccaagccggcuccaccccuugcaacggcguggagggcuucaacugcuacuucccucugcagagcuacggcuuccagcccaccaacggcgugggcuaccagcccuaccgggugguggugcugagcuucgagcugcugcacgccccagccaccguguguggccccaagaagagcaccaaccuggugaagaacaagugcgugaacuucaacuucaacggccuuaccggcaccggcgugcugaccgagagcaacaagaaauuccugcccuuucagcaguucggccgggacaucgccgacaccaccgacgcugugcgggauccccagacccuggagauccuggacaucaccccuugcagcuucggcggcgugagcgugaucaccccaggcaccaacaccagcaaccagguggccgugcuguaccagggcgugaacugcaccgaggugcccguggccauccacgccgaccagcugacacccaccuggcgggucuacagcaccggcagcaacguguuccagacccgggccgguugccugaucggcgccgagcacgugaacaacagcuacgagugcgacauccccaucggcgccggcaucugugccagcuaccagacccagaccaauucaccccggagggcaaggagcguggccagccagagcaucaucgccuacaccaugagccugggcgccgagaacagcguggccuacagcaacaacagcaucgccauccccaccaacuucaccaucagcgugaccaccgagauucugcccgugagcaugaccaagaccagcguggacugcaccauguacaucugcggcgacagcaccgagugcagcaaccugcugcugcaguacggcagcuucugcacccagcugaaccgggcccugaccggcaucgccguggagcaggacaagaacacccaggagguguucgcccaggugaagcagaucuacaagaccccucccaucaaggacuucggcggcuucaacuucagccagauccugcccgaccccagcaagcccagcaagcggagcuucaucgaggaccugcuguucaacaaggugacccuagccgacgccggcuucaucaagcaguacggcgacugccucggcgacauagccgcccgggaccugaucugcgcccagaaguucaacggccugaccgugcugccuccccugcugaccgacgagaugaucgcccaguacaccagcgcccuguuagccggaaccaucaccagcggcuggacuuucggcgcuggagccgcucugcagauccccuucgccaugcagauggccuaccgguucaacggcaucggcgugacccagaacgugcuguacgagaaccagaagcugaucgccaaccaguucaacagcgccaucggcaagauccaggacagccugagcagcaccgcuagcgcccugggcaagcugcaggacguggugaaccagaacgcccaggcccugaacacccuggugaagcagcugagcagcaacuucggcgccaucagcagcgugcugaacgacauccugagccggcuggacaaggucgaggccgaggugcagaucgaccggcugaucacuggccggcugcagagccugcagaccuacgugacccagcagcugauccgggccgccgagauucgggccagcgccaaccuggccgccaccaagaugagcgagugcgugcugggccagagcaagcggguggacuucugcggcaagggcuaccaccugaugagcuuuccccagagcgcaccccacggagugguguuccugcacgugaccuacgugcccgcccaggagaagaacuucaccaccgccccagccaucugccacgacggcaaggcccacuuuccccgggagggcguguucgugagcaacggcacccacugguucgugacccagcggaacuucuacgagccccagaucaucaccaccgacaacaccuucgugagcggcaacugcgacguggugaucggcaucgugaacaacaccguguacgauccccugcagcccgagcuggacagcuucaaggaggagcuggacaaguacuucaagaaucacaccagccccgacguggaccugggcgacaucagcggcaucaacgccagcguggugaacauccagaaggagaucgaucggcugaacgagguggccaagaaccugaacgagagccugaucgaccugcaggagcugggcaaguacgagcaguacaucaaguggcccugguacaucuggcugggcuucaucgccggccugaucgccaucgugauggugaccaucaugcugugcugcaugaccagcugcugcagcugccugaagggcuguugcagcugcggcagcugcugcaaguucgacgaggacgacagcgagcccgugcugaagggcgugaagcugcacuacaccugaggacuaguguccaccugucccuccugggcugcuggauugucucguuuuccugccaaauaaacaggaucagcgcuuuacagaucucaaaggcucuuuucagagccaccaaaaaaaaaaaaaaaaaaaaaaaaaaaaaaaaaaaaaaaaaaaaaaaaaaaaaaaaaaaaaaaaaaaaaaaaaaaaaaaaaaaaaaaaaaaaaaaaaaaaa

SEQ ID NO: 23889 - RNA, 4129 nt, Artificial Sequence
  SARS-CoV-2/Wuhan/WIV05/2019__EPI_ISL_402128 spike protein mRNA gc (1-1273)(S477N_D614G)
aggagacccgugacccggaaguuguacggcuacgcgacuuucccucccacaaacccucgcgcccuuccuuuccuacuugggcccggcagaaagcuuaccauguucguguuccuggugcugcugccccuggugagcagccagugcgugaaccugaccacccggacccagcugccaccagccuacaccaacagcuucacccggggcgucuacuaccccgacaagguguuccggagcagcguccugcacagcacccaggaccuguuccugcccuucuucagcaacgugaccugguuccacgccauccacgugagcggcaccaacggcaccaagcgguucgacaaccccgugcugcccuucaacgacggcguguacuucgccagcaccgagaagagcaacaucauccggggcuggaucuucggcaccacccuggacagcaagacccagagccugcugaucgugaauaacgccaccaacguggugaucaaggugugcgaguuccaguucugcaacgaccccuuccugggcguguacuaccacaagaacaacaagagcuggauggagagcgaguuccggguguacagcagcgccaacaacugcaccuucgaguacgugagccagcccuuccugauggaccuggagggcaagcagggcaacuucaagaaccugcgggaguucguguucaagaacaucgacggcuacuucaagaucuacagcaagcacaccccaaucaaccuggugcgggaucugccccagggcuucucagcccuggagccccugguggaccugcccaucggcaucaacaucacccgguuccagacccugcuggcccugcaccggagcuaccugaccccaggcgacagcagcagcggguggacagcaggcgcggcugcuuacuacgugggcuaccugcagccccggaccuuccugcugaaguacaacgagaacggcaccaucaccgacgccguggacugcgcccuggacccucugagcgagaccaagugcacccugaagagcuucaccguggagaagggcaucuaccagaccagcaacuuccgggugcagcccaccgagagcaucgugcgguuccccaacaucaccaaccugugccccuucggcgagguguucaacgccacccgguucgccagcguguacgccuggaaccggaagcggaucagcaacugcguggccgacuacagcgugcuguacaacagcgccagcuucagcaccuucaagugcuacggcgugagccccaccaagcugaacgaccugugcuucaccaacguguacgccgacagcuucgugauccguggcgacgaggugcggcagaucgcacccggccagacaggcaagaucgccgacuacaacuacaagcugcccgacgacuucaccggcugcgugaucgccuggaacagcaacaaccucgacagcaaggugggcggcaacuacaacuaccuguaccggcuguuccggaagagcaaccugaagcccuucgagcgggacaucagcaccgagaucuaccaagccggcaacaccccuugcaacggcguggagggcuucaacugcuacuucccucugcagagcuacggcuuccagcccaccaacggcgugggcuaccagcccuaccgggugguggugcugagcuucgagcugcugcacgccccagccaccguguguggccccaagaagagcaccaaccuggugaagaacaagugcgugaacuucaacuucaacggccuuaccggcaccggcgugcugaccgagagcaacaagaaauuccugcccuuucagcaguucggccgggacaucgccgacaccaccgacgcugugcgggauccccagacccuggagauccuggacaucaccccuugcagcuucggcggcgugagcgugaucaccccaggcaccaacaccagcaaccagguggccgugcuguaccagggcgugaacugcaccgaggugcccguggccauccacgccgaccagcugacacccaccuggcgggucuacagcaccggcagcaacguguuccagacccgggccgguugccugaucggcgccgagcacgugaacaacagcuacgagugcgacauccccaucggcgccggcaucugugccagcuaccagacccagaccaauucaccccggagggcaaggagcguggccagccagagcaucaucgccuacaccaugagccugggcgccgagaacagcguggccuacagcaacaacagcaucgccauccccaccaacuucaccaucagcgugaccaccgagauucugcccgugagcaugaccaagaccagcguggacugcaccauguacaucugcggcgacagcaccgagugcagcaaccugcugcugcaguacggcagcuucugcacccagcugaaccgggcccugaccggcaucgccguggagcaggacaagaacacccaggagguguucgcccaggugaagcagaucuacaagaccccucccaucaaggacuucggcggcuucaacuucagccagauccugcccgaccccagcaagcccagcaagcggagcuucaucgaggaccugcuguucaacaaggugacccuagccgacgccggcuucaucaagcaguacggcgacugccucggcgacauagccgcccgggaccugaucugcgcccagaaguucaacggccugaccgugcugccuccccugcugaccgacgagaugaucgcccaguacaccagcgcccuguuagccggaaccaucaccagcggcuggacuuucggcgcuggagccgcucugcagauccccuucgccaugcagauggccuaccgguucaacggcaucggcgugacccagaacgugcuguacgagaaccagaagcugaucgccaaccaguucaacagcgccaucggcaagauccaggacagccugagcagcaccgcuagcgcccugggcaagcugcaggacguggugaaccagaacgcccaggcccugaacacccuggugaagcagcugagcagcaacuucggcgccaucagcagcgugcugaacgacauccugagccggcuggacaaggucgaggccgaggugcagaucgaccggcugaucacuggccggcugcagagccugcagaccuacgugacccagcagcugauccgggccgccgagauucgggccagcgccaaccuggccgccaccaagaugagcgagugcgugcugggccagagcaagcggguggacuucugcggcaagggcuaccaccugaugagcuuuccccagagcgcaccccacggagugguguuccugcacgugaccuacgugcccgcccaggagaagaacuucaccaccgccccagccaucugccacgacggcaaggcccacuuuccccgggagggcguguucgugagcaacggcacccacugguucgugacccagcggaacuucuacgagccccagaucaucaccaccgacaacaccuucgugagcggcaacugcgacguggugaucggcaucgugaacaacaccguguacgauccccugcagcccgagcuggacagcuucaaggaggagcuggacaaguacuucaagaaucacaccagccccgacguggaccugggcgacaucagcggcaucaacgccagcguggugaacauccagaaggagaucgaucggcugaacgagguggccaagaaccugaacgagagccugaucgaccugcaggagcugggcaaguacgagcaguacaucaaguggcccugguacaucuggcugggcuucaucgccggccugaucgccaucgugauggugaccaucaugcugugcugcaugaccagcugcugcagcugccugaagggcuguugcagcugcggcagcugcugcaaguucgacgaggacgacagcgagcccgugcugaagggcgugaagcugcacuacaccugaggacuaguguccaccugucccuccugggcugcuggauugucucguuuuccugccaaauaaacaggaucagcgcuuuacagaucucaaaggcucuuuucagagccaccaaaaaaaaaaaaaaaaaaaaaaaaaaaaaaaaaaaaaaaaaaaaaaaaaaaaaaaaaaaaaaaaaaaaaaaaaaaaaaaaaaaaaaaaaaaaaaaaaaaaa

SEQ ID NO: 23890 - RNA, 4129 nt, Artificial Sequence
  SARS-CoV-2/Wuhan/WIV05/2019__EPI_ISL_402128 spike protein mRNA gc (1-1273)(N501Y_D614G)
aggagacccgugacccggaaguuguacggcuacgcgacuuucccucccacaaacccucgcgcccuuccuuuccuacuugggcccggcagaaagcuuaccauguucguguuccuggugcugcugccccuggugagcagccagugcgugaaccugaccacccggacccagcugccaccagccuacaccaacagcuucacccggggcgucuacuaccccgacaagguguuccggagcagcguccugcacagcacccaggaccuguuccugcccuucuucagcaacgugaccugguuccacgccauccacgugagcggcaccaacggcaccaagcgguucgacaaccccgugcugcccuucaacgacggcguguacuucgccagcaccgagaagagcaacaucauccggggcuggaucuucggcaccacccuggacagcaagacccagagccugcugaucgugaauaacgccaccaacguggugaucaaggugugcgaguuccaguucugcaacgaccccuuccugggcguguacuaccacaagaacaacaagagcuggauggagagcgaguuccggguguacagcagcgccaacaacugcaccuucgaguacgugagccagcccuuccugauggaccuggagggcaagcagggcaacuucaagaaccugcgggaguucguguucaagaacaucgacggcuacuucaagaucuacagcaagcacaccccaaucaaccuggugcgggaucugccccagggcuucucagcccuggagccccugguggaccugcccaucggcaucaacaucacccgguuccagacccugcuggcccugcaccggagcuaccugaccccaggcgacagcagcagcggguggacagcaggcgcggcugcuuacuacgugggcuaccugcagccccggaccuuccugcugaaguacaacgagaacggcaccaucaccgacgccguggacugcgcccuggacccucugagcgagaccaagugcacccugaagagcuucaccguggagaagggcaucuaccagaccagcaacuuccgggugcagcccaccgagagcaucgugcgguuccccaacaucaccaaccugugccccuucggcgagguguucaacgccacccgguucgccagcguguacgccuggaaccggaagcggaucagcaacugcguggccgacuacagcgugcuguacaacagcgccagcuucagcaccuucaagugcuacggcgugagccccaccaagcugaacgaccugugcuucaccaacguguacgccgacagcuucgugauccguggcgacgaggugcggcagaucgcacccggccagacaggcaagaucgccgacuacaacuacaagcugcccgacgacuucaccggcugcgugaucgccuggaacagcaacaaccucgacagcaaggugggcggcaacuacaacuaccuguaccggcuguuccggaagagcaaccugaagcccuucgagcgggacaucagcaccgagaucuaccaagccggcuccaccccuugcaacggcguggagggcuucaacugcuacuucccucugcagagcuacggcuuccagcccaccuacggcgugggcuaccagcccuaccgggugguggugcugagcuucgagcugcugcacgccccagccaccguguguggccccaagaagagcaccaaccuggugaagaacaagugcgugaacuucaacuucaacggccuuaccggcaccggcgugcugaccgagagcaacaagaaauuccugcccuuucagcaguucggccgggacaucgccgacaccaccgacgcugugcgggauccccagacccuggagauccuggacaucaccccuugcagcuucggcggcgugagcgugaucaccccaggcaccaacaccagcaaccagguggccgugcuguaccagggcgugaacugcaccgaggugcccguggccauccacgccgaccagcugacacccaccuggcgggucuacagcaccggcagcaacguguuccagacccgggccgguugccugaucggcgccgagcacgugaacaacagcuacgagugcgacauccccaucggcgccggcaucugugccagcuaccagacccagaccaauucaccccggagggcaaggagcguggccagccagagcaucaucgccuacaccaugagccugggcgccgagaacagcguggccuacagcaacaacagcaucgccauccccaccaacuucaccaucagcgugaccaccgagauucugcccgugagcaugaccaagaccagcguggacugcaccauguacaucugcggcgacagcaccgagugcagcaaccugcugcugcaguacggcagcuucugcacccagcugaaccgggcccugaccggcaucgccguggagcaggacaagaacacccaggagguguucgcccaggugaagcagaucuacaagaccccucccaucaaggacuucggcggcuucaacuucagccagauccugcccgaccccagcaagcccagcaagcggagcuucaucgaggaccugcuguucaacaaggugacccuagccgacgccggcuucaucaagcaguacggcgacugccucggcgacauagccgcccgggaccugaucugcgcccagaaguucaacggccugaccgugcugccuccccugcugaccgacgagaugaucgcccaguacaccagcgcccuguuagccggaaccaucaccagcggcuggacuuucggcgcuggagccgcucugcagauccccuucgccaugcagauggccuaccgguucaacggcaucggcgugacccagaacgugcuguacgagaaccagaagcugaucgccaaccaguucaacagcgccaucggcaagauccaggacagccugagcagcaccgcuagcgcccugggcaagcugcaggacguggugaaccagaacgcccaggcccugaacacccuggugaagcagcugagcagcaacuucggcgccaucagcagcgugcugaacgacauccugagccggcuggacaaggucgaggccgaggugcagaucgaccggcugaucacuggccggcugcagagccugcagaccuacgugacccagcagcugauccgggccgccgagauucgggccagcgccaaccuggccgccaccaagaugagcgagugcgugcugggccagagcaagcggguggacuucugcggcaagggcuaccaccugaugagcuuuccccagagcgcaccccacggagugguguuccugcacgugaccuacgugcccgcccaggagaagaacuucaccaccgccccagccaucugccacgacggcaaggcccacuuuccccgggagggcguguucgugagcaacggcacccacugguucgugacccagcggaacuucuacgagccccagaucaucaccaccgacaacaccuucgugagcggcaacugcgacguggugaucggcaucgugaacaacaccguguacgauccccugcagcccgagcuggacagcuucaaggaggagcuggacaaguacuucaagaaucacaccagccccgacguggaccugggcgacaucagcggcaucaacgccagcguggugaacauccagaaggagaucgaucggcugaacgagguggccaagaaccugaacgagagccugaucgaccugcaggagcugggcaaguacgagcaguacaucaaguggcccugguacaucuggcugggcuucaucgccggccugaucgccaucgugauggugaccaucaugcugugcugcaugaccagcugcugcagcugccugaagggcuguugcagcugcggcagcugcugcaaguucgacgaggacgacagcgagcccgugcugaagggcgugaagcugcacuacaccugaggacuaguguccaccugucccuccugggcugcuggauugucucguuuuccugccaaauaaacaggaucagcgcuuuacagaucucaaaggcucuuuucagagccaccaaaaaaaaaaaaaaaaaaaaaaaaaaaaaaaaaaaaaaaaaaaaaaaaaaaaaaaaaaaaaaaaaaaaaaaaaaaaaaaaaaaaaaaaaaaaaaaaaaaaa

SEQ ID NO: 23891 - RNA, 4123 nt, Artificial Sequence
  SARS-CoV-2/Wuhan/WIV05/2019__EPI_ISL_402128 spike protein mRNA gc (1-1273)(H69del_V70del_D614G)
aggagacccgugacccggaaguuguacggcuacgcgacuuucccucccacaaacccucgcgcccuuccuuuccuacuugggcccggcagaaagcuuaccauguucguguuccuggugcugcugccccuggugagcagccagugcgugaaccugaccacccggacccagcugccaccagccuacaccaacagcuucacccggggcgucuacuaccccgacaagguguuccggagcagcguccugcacagcacccaggaccuguuccugcccuucuucagcaacgugaccugguuccacgccaucagcggcaccaacggcaccaagcgguucgacaaccccgugcugcccuucaacgacggcguguacuucgccagcaccgagaagagcaacaucauccggggcuggaucuucggcaccacccuggacagcaagacccagagccugcugaucgugaauaacgccaccaacguggugaucaaggugugcgaguuccaguucugcaacgaccccuuccugggcguguacuaccacaagaacaacaagagcuggauggagagcgaguuccggguguacagcagcgccaacaacugcaccuucgaguacgugagccagcccuuccugauggaccuggagggcaagcagggcaacuucaagaaccugcgggaguucguguucaagaacaucgacggcuacuucaagaucuacagcaagcacaccccaaucaaccuggugcgggaucugccccagggcuucucagcccuggagccccugguggaccugcccaucggcaucaacaucacccgguuccagacccugcuggcccugcaccggagcuaccugaccccaggcgacagcagcagcggguggacagcaggcgcggcugcuuacuacgugggcuaccugcagccccggaccuuccugcugaaguacaacgagaacggcaccaucaccgacgccguggacugcgcccuggacccucugagcgagaccaagugcacccugaagagcuucaccguggagaagggcaucuaccagaccagcaacuuccgggugcagcccaccgagagcaucgugcgguuccccaacaucaccaaccugugccccuucggcgagguguucaacgccacccgguucgccagcguguacgccuggaaccggaagcggaucagcaacugcguggccgacuacagcgugcuguacaacagcgccagcuucagcaccuucaagugcuacggcgugagccccaccaagcugaacgaccugugcuucaccaacguguacgccgacagcuucgugauccguggcgacgaggugcggcagaucgcacccggccagacaggcaagaucgccgacuacaacuacaagcugcccgacgacuucaccggcugcgugaucgccuggaacagcaacaaccucgacagcaaggugggcggcaacuacaacuaccuguaccggcuguuccggaagagcaaccugaagcccuucgagcgggacaucagcaccgagaucuaccaagccggcuccaccccuugcaacggcguggagggcuucaacugcuacuucccucugcagagcuacggcuuccagcccaccaacggcgugggcuaccagcccuaccgggugguggugcugagcuucgagcugcugcacgccccagccaccguguguggccccaagaagagcaccaaccuggugaagaacaagugcgugaacuucaacuucaacggccuuaccggcaccggcgugcugaccgagagcaacaagaaauuccugcccuuucagcaguucggccgggacaucgccgacaccaccgacgcugugcgggauccccagacccuggagauccuggacaucaccccuugcagcuucggcggcgugagcgugaucaccccaggcaccaacaccagcaaccagguggccgugcuguaccagggcgugaacugcaccgaggugcccguggccauccacgccgaccagcugacacccaccuggcgggucuacagcaccggcagcaacguguuccagacccgggccgguugccugaucggcgccgagcacgugaacaacagcuacgagugcgacauccccaucggcgccggcaucugugccagcuaccagacccagaccaauucaccccggagggcaaggagcguggccagccagagcaucaucgccuacaccaugagccugggcgccgagaacagcguggccuacagcaacaacagcaucgccauccccaccaacuucaccaucagcgugaccaccgagauucugcccgugagcaugaccaagaccagcguggacugcaccauguacaucugcggcgacagcaccgagugcagcaaccugcugcugcaguacggcagcuucugcacccagcugaaccgggcccugaccggcaucgccguggagcaggacaagaacacccaggagguguucgcccaggugaagcagaucuacaagaccccucccaucaaggacuucggcggcuucaacuucagccagauccugcccgaccccagcaagcccagcaagcggagcuucaucgaggaccugcuguucaacaaggugacccuagccgacgccggcuucaucaagcaguacggcgacugccucggcgacauagccgcccgggaccugaucugcgcccagaaguucaacggccugaccgugcugccuccccugcugaccgacgagaugaucgcccaguacaccagcgcccuguuagccggaaccaucaccagcggcuggacuuucggcgcuggagccgcucugcagauccccuucgccaugcagauggccuaccgguucaacggcaucggcgugacccagaacgugcuguacgagaaccagaagcugaucgccaaccaguucaacagcgccaucggcaagauccaggacagccugagcagcaccgcuagcgcccugggcaagcugcaggacguggugaaccagaacgcccaggcccugaacacccuggugaagcagcugagcagcaacuucggcgccaucagcagcgugcugaacgacauccugagccggcuggacaaggucgaggccgaggugcagaucgaccggcugaucacuggccggcugcagagccugcagaccuacgugacccagcagcugauccgggccgccgagauucgggccagcgccaaccuggccgccaccaagaugagcgagugcgugcugggccagagcaagcggguggacuucugcggcaagggcuaccaccugaugagcuuuccccagagcgcaccccacggagugguguuccugcacgugaccuacgugcccgcccaggagaagaacuucaccaccgccccagccaucugccacgacggcaaggcccacuuuccccgggagggcguguucgugagcaacggcacccacugguucgugacccagcggaacuucuacgagccccagaucaucaccaccgacaacaccuucgugagcggcaacugcgacguggugaucggcaucgugaacaacaccguguacgauccccugcagcccgagcuggacagcuucaaggaggagcuggacaaguacuucaagaaucacaccagccccgacguggaccugggcgacaucagcggcaucaacgccagcguggugaacauccagaaggagaucgaucggcugaacgagguggccaagaaccugaacgagagccugaucgaccugcaggagcugggcaaguacgagcaguacaucaaguggcccugguacaucuggcugggcuucaucgccggccugaucgccaucgugauggugaccaucaugcugugcugcaugaccagcugcugcagcugccugaagggcuguugcagcugcggcagcugcugcaaguucgacgaggacgacagcgagcccgugcugaagggcgugaagcugcacuacaccugaggacuaguguccaccugucccuccugggcugcuggauugucucguuuuccugccaaauaaacaggaucagcgcuuuacagaucucaaaggcucuuuucagagccaccaaaaaaaaaaaaaaaaaaaaaaaaaaaaaaaaaaaaaaaaaaaaaaaaaaaaaaaaaaaaaaaaaaaaaaaaaaaaaaaaaaaaaaaaaaaaaaaaaaaaa

SEQ ID NO: 23892 - RNA, 4129 nt, Artificial Sequence
  SARS-CoV-2/Wuhan/WIV05/2019__EPI_ISL_402128 spike protein mRNA gc (1-1273)(Y453F_D614G)
aggagacccgugacccggaaguuguacggcuacgcgacuuucccucccacaaacccucgcgcccuuccuuuccuacuugggcccggcagaaagcuuaccauguucguguuccuggugcugcugccccuggugagcagccagugcgugaaccugaccacccggacccagcugccaccagccuacaccaacagcuucacccggggcgucuacuaccccgacaagguguuccggagcagcguccugcacagcacccaggaccuguuccugcccuucuucagcaacgugaccugguuccacgccauccacgugagcggcaccaacggcaccaagcgguucgacaaccccgugcugcccuucaacgacggcguguacuucgccagcaccgagaagagcaacaucauccggggcuggaucuucggcaccacccuggacagcaagacccagagccugcugaucgugaauaacgccaccaacguggugaucaaggugugcgaguuccaguucugcaacgaccccuuccugggcguguacuaccacaagaacaacaagagcuggauggagagcgaguuccggguguacagcagcgccaacaacugcaccuucgaguacgugagccagcccuuccugauggaccuggagggcaagcagggcaacuucaagaaccugcgggaguucguguucaagaacaucgacggcuacuucaagaucuacagcaagcacaccccaaucaaccuggugcgggaucugccccagggcuucucagcccuggagccccugguggaccugcccaucggcaucaacaucacccgguuccagacccugcuggcccugcaccggagcuaccugaccccaggcgacagcagcagcggguggacagcaggcgcggcugcuuacuacgugggcuaccugcagccccggaccuuccugcugaaguacaacgagaacggcaccaucaccgacgccguggacugcgcccuggacccucugagcgagaccaagugcacccugaagagcuucaccguggagaagggcaucuaccagaccagcaacuuccgggugcagcccaccgagagcaucgugcgguuccccaacaucaccaaccugugccccuucggcgagguguucaacgccacccgguucgccagcguguacgccuggaaccggaagcggaucagcaacugcguggccgacuacagcgugcuguacaacagcgccagcuucagcaccuucaagugcuacggcgugagccccaccaagcugaacgaccugugcuucaccaacguguacgccgacagcuucgugauccguggcgacgaggugcggcagaucgcacccggccagacaggcaagaucgccgacuacaacuacaagcugcccgacgacuucaccggcugcgugaucgccuggaacagcaacaaccucgacagcaaggugggcggcaacuacaacuaccuguuccggcuguuccggaagagcaaccugaagcccuucgagcgggacaucagcaccgagaucuaccaagccggcuccaccccuugcaacggcguggagggcuucaacugcuacuucccucugcagagcuacggcuuccagcccaccaacggcgugggcuaccagcccuaccgggugguggugcugagcuucgagcugcugcacgccccagccaccguguguggccccaagaagagcaccaaccuggugaagaacaagugcgugaacuucaacuucaacggccuuaccggcaccggcgugcugaccgagagcaacaagaaauuccugcccuuucagcaguucggccgggacaucgccgacaccaccgacgcugugcgggauccccagacccuggagauccuggacaucaccccuugcagcuucggcggcgugagcgugaucaccccaggcaccaacaccagcaaccagguggccgugcuguaccagggcgugaacugcaccgaggugcccguggccauccacgccgaccagcugacacccaccuggcgggucuacagcaccggcagcaacguguuccagacccgggccgguugccugaucggcgccgagcacgugaacaacagcuacgagugcgacauccccaucggcgccggcaucugugccagcuaccagacccagaccaauucaccccggagggcaaggagcguggccagccagagcaucaucgccuacaccaugagccugggcgccgagaacagcguggccuacagcaacaacagcaucgccauccccaccaacuucaccaucagcgugaccaccgagauucugcccgugagcaugaccaagaccagcguggacugcaccauguacaucugcggcgacagcaccgagugcagcaaccugcugcugcaguacggcagcuucugcacccagcugaaccgggcccugaccggcaucgccguggagcaggacaagaacacccaggagguguucgcccaggugaagcagaucuacaagaccccucccaucaaggacuucggcggcuucaacuucagccagauccugcccgaccccagcaagcccagcaagcggagcuucaucgaggaccugcuguucaacaaggugacccuagccgacgccggcuucaucaagcaguacggcgacugccucggcgacauagccgcccgggaccugaucugcgcccagaaguucaacggccugaccgugcugccuccccugcugaccgacgagaugaucgcccaguacaccagcgcccuguuagccggaaccaucaccagcggcuggacuuucggcgcuggagccgcucugcagauccccuucgccaugcagauggccuaccgguucaacggcaucggcgugacccagaacgugcuguacgagaaccagaagcugaucgccaaccaguucaacagcgccaucggcaagauccaggacagccugagcagcaccgcuagcgcccugggcaagcugcaggacguggugaaccagaacgcccaggcccugaacacccuggugaagcagcugagcagcaacuucggcgccaucagcagcgugcugaacgacauccugagccggcuggacaaggucgaggccgaggugcagaucgaccggcugaucacuggccggcugcagagccugcagaccuacgugacccagcagcugauccgggccgccgagauucgggccagcgccaaccuggccgccaccaagaugagcgagugcgugcugggccagagcaagcggguggacuucugcggcaagggcuaccaccugaugagcuuuccccagagcgcaccccacggagugguguuccugcacgugaccuacgugcccgcccaggagaagaacuucaccaccgccccagccaucugccacgacggcaaggcccacuuuccccgggagggcguguucgugagcaacggcacccacugguucgugacccagcggaacuucuacgagccccagaucaucaccaccgacaacaccuucgugagcggcaacugcgacguggugaucggcaucgugaacaacaccguguacgauccccugcagcccgagcuggacagcuucaaggaggagcuggacaaguacuucaagaaucacaccagccccgacguggaccugggcgacaucagcggcaucaacgccagcguggugaacauccagaaggagaucgaucggcugaacgagguggccaagaaccugaacgagagccugaucgaccugcaggagcugggcaaguacgagcaguacaucaaguggcccugguacaucuggcugggcuucaucgccggccugaucgccaucgugauggugaccaucaugcugugcugcaugaccagcugcugcagcugccugaagggcuguugcagcugcggcagcugcugcaaguucgacgaggacgacagcgagcccgugcugaagggcgugaagcugcacuacaccugaggacuaguguccaccugucccuccugggcugcuggauugucucguuuuccugccaaauaaacaggaucagcgcuuuacagaucucaaaggcucuuuucagagccaccaaaaaaaaaaaaaaaaaaaaaaaaaaaaaaaaaaaaaaaaaaaaaaaaaaaaaaaaaaaaaaaaaaaaaaaaaaaaaaaaaaaaaaaaaaaaaaaaaaaaa

SEQ ID NO: 23893 - RNA, 4129 nt, Artificial Sequence
  SARS-CoV-2/Wuhan/WIV05/2019__EPI_ISL_402128 spike protein mRNA gc (1-1273)(D614G_I692V)
aggagacccgugacccggaaguuguacggcuacgcgacuuucccucccacaaacccucgcgcccuuccuuuccuacuugggcccggcagaaagcuuaccauguucguguuccuggugcugcugccccuggugagcagccagugcgugaaccugaccacccggacccagcugccaccagccuacaccaacagcuucacccggggcgucuacuaccccgacaagguguuccggagcagcguccugcacagcacccaggaccuguuccugcccuucuucagcaacgugaccugguuccacgccauccacgugagcggcaccaacggcaccaagcgguucgacaaccccgugcugcccuucaacgacggcguguacuucgccagcaccgagaagagcaacaucauccggggcuggaucuucggcaccacccuggacagcaagacccagagccugcugaucgugaauaacgccaccaacguggugaucaaggugugcgaguuccaguucugcaacgaccccuuccugggcguguacuaccacaagaacaacaagagcuggauggagagcgaguuccggguguacagcagcgccaacaacugcaccuucgaguacgugagccagcccuuccugauggaccuggagggcaagcagggcaacuucaagaaccugcgggaguucguguucaagaacaucgacggcuacuucaagaucuacagcaagcacaccccaaucaaccuggugcgggaucugccccagggcuucucagcccuggagccccugguggaccugcccaucggcaucaacaucacccgguuccagacccugcuggcccugcaccggagcuaccugaccccaggcgacagcagcagcggguggacagcaggcgcggcugcuuacuacgugggcuaccugcagccccggaccuuccugcugaaguacaacgagaacggcaccaucaccgacgccguggacugcgcccuggacccucugagcgagaccaagugcacccugaagagcuucaccguggagaagggcaucuaccagaccagcaacuuccgggugcagcccaccgagagcaucgugcgguuccccaacaucaccaaccugugccccuucggcgagguguucaacgccacccgguucgccagcguguacgccuggaaccggaagcggaucagcaacugcguggccgacuacagcgugcuguacaacagcgccagcuucagcaccuucaagugcuacggcgugagccccaccaagcugaacgaccugugcuucaccaacguguacgccgacagcuucgugauccguggcgacgaggugcggcagaucgcacccggccagacaggcaagaucgccgacuacaacuacaagcugcccgacgacuucaccggcugcgugaucgccuggaacagcaacaaccucgacagcaaggugggcggcaacuacaacuaccuguaccggcuguuccggaagagcaaccugaagcccuucgagcgggacaucagcaccgagaucuaccaagccggcuccaccccuugcaacggcguggagggcuucaacugcuacuucccucugcagagcuacggcuuccagcccaccaacggcgugggcuaccagcccuaccgggugguggugcugagcuucgagcugcugcacgccccagccaccguguguggccccaagaagagcaccaaccuggugaagaacaagugcgugaacuucaacuucaacggccuuaccggcaccggcgugcugaccgagagcaacaagaaauuccugcccuuucagcaguucggccgggacaucgccgacaccaccgacgcugugcgggauccccagacccuggagauccuggacaucaccccuugcagcuucggcggcgugagcgugaucaccccaggcaccaacaccagcaaccagguggccgugcuguaccagggcgugaacugcaccgaggugcccguggccauccacgccgaccagcugacacccaccuggcgggucuacagcaccggcagcaacguguuccagacccgggccgguugccugaucggcgccgagcacgugaacaacagcuacgagugcgacauccccaucggcgccggcaucugugccagcuaccagacccagaccaauucaccccggagggcaaggagcguggccagccagagcgugaucgccuacaccaugagccugggcgccgagaacagcguggccuacagcaacaacagcaucgccauccccaccaacuucaccaucagcgugaccaccgagauucugcccgugagcaugaccaagaccagcguggacugcaccauguacaucugcggcgacagcaccgagugcagcaaccugcugcugcaguacggcagcuucugcacccagcugaaccgggcccugaccggcaucgccguggagcaggacaagaacacccaggagguguucgcccaggugaagcagaucuacaagaccccucccaucaaggacuucggcggcuucaacuucagccagauccugcccgaccccagcaagcccagcaagcggagcuucaucgaggaccugcuguucaacaaggugacccuagccgacgccggcuucaucaagcaguacggcgacugccucggcgacauagccgcccgggaccugaucugcgcccagaaguucaacggccugaccgugcugccuccccugcugaccgacgagaugaucgcccaguacaccagcgcccuguuagccggaaccaucaccagcggcuggacuuucggcgcuggagccgcucugcagauccccuucgccaugcagauggccuaccgguucaacggcaucggcgugacccagaacgugcuguacgagaaccagaagcugaucgccaaccaguucaacagcgccaucggcaagauccaggacagccugagcagcaccgcuagcgcccugggcaagcugcaggacguggugaaccagaacgcccaggcccugaacacccuggugaagcagcugagcagcaacuucggcgccaucagcagcgugcugaacgacauccugagccggcuggacaaggucgaggccgaggugcagaucgaccggcugaucacuggccggcugcagagccugcagaccuacgugacccagcagcugauccgggccgccgagauucgggccagcgccaaccuggccgccaccaagaugagcgagugcgugcugggccagagcaagcggguggacuucugcggcaagggcuaccaccugaugagcuuuccccagagcgcaccccacggagugguguuccugcacgugaccuacgugcccgcccaggagaagaacuucaccaccgccccagccaucugccacgacggcaaggcccacuuuccccgggagggcguguucgugagcaacggcacccacugguucgugacccagcggaacuucuacgagccccagaucaucaccaccgacaacaccuucgugagcggcaacugcgacguggugaucggcaucgugaacaacaccguguacgauccccugcagcccgagcuggacagcuucaaggaggagcuggacaaguacuucaagaaucacaccagccccgacguggaccugggcgacaucagcggcaucaacgccagcguggugaacauccagaaggagaucgaucggcugaacgagguggccaagaaccugaacgagagccugaucgaccugcaggagcugggcaaguacgagcaguacaucaaguggcccugguacaucuggcugggcuucaucgccggccugaucgccaucgugauggugaccaucaugcugugcugcaugaccagcugcugcagcugccugaagggcuguugcagcugcggcagcugcugcaaguucgacgaggacgacagcgagcccgugcugaagggcgugaagcugcacuacaccugaggacuaguguccaccugucccuccugggcugcuggauugucucguuuuccugccaaauaaacaggaucagcgcuuuacagaucucaaaggcucuuuucagagccaccaaaaaaaaaaaaaaaaaaaaaaaaaaaaaaaaaaaaaaaaaaaaaaaaaaaaaaaaaaaaaaaaaaaaaaaaaaaaaaaaaaaaaaaaaaaaaaaaaaaaa

SEQ ID NO: 23894 - RNA, 4129 nt, Artificial Sequence
  SARS-CoV-2/Wuhan/WIV05/2019__EPI_ISL_402128 spike protein mRNA gc (1-1273)(D614G_M1229I)
aggagacccgugacccggaaguuguacggcuacgcgacuuucccucccacaaacccucgcgcccuuccuuuccuacuugggcccggcagaaagcuuaccauguucguguuccuggugcugcugccccuggugagcagccagugcgugaaccugaccacccggacccagcugccaccagccuacaccaacagcuucacccggggcgucuacuaccccgacaagguguuccggagcagcguccugcacagcacccaggaccuguuccugcccuucuucagcaacgugaccugguuccacgccauccacgugagcggcaccaacggcaccaagcgguucgacaaccccgugcugcccuucaacgacggcguguacuucgccagcaccgagaagagcaacaucauccggggcuggaucuucggcaccacccuggacagcaagacccagagccugcugaucgugaauaacgccaccaacguggugaucaaggugugcgaguuccaguucugcaacgaccccuuccugggcguguacuaccacaagaacaacaagagcuggauggagagcgaguuccggguguacagcagcgccaacaacugcaccuucgaguacgugagccagcccuuccugauggaccuggagggcaagcagggcaacuucaagaaccugcgggaguucguguucaagaacaucgacggcuacuucaagaucuacagcaagcacaccccaaucaaccuggugcgggaucugccccagggcuucucagcccuggagccccugguggaccugcccaucggcaucaacaucacccgguuccagacccugcuggcccugcaccggagcuaccugaccccaggcgacagcagcagcggguggacagcaggcgcggcugcuuacuacgugggcuaccugcagccccggaccuuccugcugaaguacaacgagaacggcaccaucaccgacgccguggacugcgcccuggacccucugagcgagaccaagugcacccugaagagcuucaccguggagaagggcaucuaccagaccagcaacuuccgggugcagcccaccgagagcaucgugcgguuccccaacaucaccaaccugugccccuucggcgagguguucaacgccacccgguucgccagcguguacgccuggaaccggaagcggaucagcaacugcguggccgacuacagcgugcuguacaacagcgccagcuucagcaccuucaagugcuacggcgugagccccaccaagcugaacgaccugugcuucaccaacguguacgccgacagcuucgugauccguggcgacgaggugcggcagaucgcacccggccagacaggcaagaucgccgacuacaacuacaagcugcccgacgacuucaccggcugcgugaucgccuggaacagcaacaaccucgacagcaaggugggcggcaacuacaacuaccuguaccggcuguuccggaagagcaaccugaagcccuucgagcgggacaucagcaccgagaucuaccaagccggcuccaccccuugcaacggcguggagggcuucaacugcuacuucccucugcagagcuacggcuuccagcccaccaacggcgugggcuaccagcccuaccgggugguggugcugagcuucgagcugcugcacgccccagccaccguguguggccccaagaagagcaccaaccuggugaagaacaagugcgugaacuucaacuucaacggccuuaccggcaccggcgugcugaccgagagcaacaagaaauuccugcccuuucagcaguucggccgggacaucgccgacaccaccgacgcugugcgggauccccagacccuggagauccuggacaucaccccuugcagcuucggcggcgugagcgugaucaccccaggcaccaacaccagcaaccagguggccgugcuguaccagggcgugaacugcaccgaggugcccguggccauccacgccgaccagcugacacccaccuggcgggucuacagcaccggcagcaacguguuccagacccgggccgguugccugaucggcgccgagcacgugaacaacagcuacgagugcgacauccccaucggcgccggcaucugugccagcuaccagacccagaccaauucaccccggagggcaaggagcguggccagccagagcaucaucgccuacaccaugagccugggcgccgagaacagcguggccuacagcaacaacagcaucgccauccccaccaacuucaccaucagcgugaccaccgagauucugcccgugagcaugaccaagaccagcguggacugcaccauguacaucugcggcgacagcaccgagugcagcaaccugcugcugcaguacggcagcuucugcacccagcugaaccgggcccugaccggcaucgccguggagcaggacaagaacacccaggagguguucgcccaggugaagcagaucuacaagaccccucccaucaaggacuucggcggcuucaacuucagccagauccugcccgaccccagcaagcccagcaagcggagcuucaucgaggaccugcuguucaacaaggugacccuagccgacgccggcuucaucaagcaguacggcgacugccucggcgacauagccgcccgggaccugaucugcgcccagaaguucaacggccugaccgugcugccuccccugcugaccgacgagaugaucgcccaguacaccagcgcccuguuagccggaaccaucaccagcggcuggacuuucggcgcuggagccgcucugcagauccccuucgccaugcagauggccuaccgguucaacggcaucggcgugacccagaacgugcuguacgagaaccagaagcugaucgccaaccaguucaacagcgccaucggcaagauccaggacagccugagcagcaccgcuagcgcccugggcaagcugcaggacguggugaaccagaacgcccaggcccugaacacccuggugaagcagcugagcagcaacuucggcgccaucagcagcgugcugaacgacauccugagccggcuggacaaggucgaggccgaggugcagaucgaccggcugaucacuggccggcugcagagccugcagaccuacgugacccagcagcugauccgggccgccgagauucgggccagcgccaaccuggccgccaccaagaugagcgagugcgugcugggccagagcaagcggguggacuucugcggcaagggcuaccaccugaugagcuuuccccagagcgcaccccacggagugguguuccugcacgugaccuacgugcccgcccaggagaagaacuucaccaccgccccagccaucugccacgacggcaaggcccacuuuccccgggagggcguguucgugagcaacggcacccacugguucgugacccagcggaacuucuacgagccccagaucaucaccaccgacaacaccuucgugagcggcaacugcgacguggugaucggcaucgugaacaacaccguguacgauccccugcagcccgagcuggacagcuucaaggaggagcuggacaaguacuucaagaaucacaccagccccgacguggaccugggcgacaucagcggcaucaacgccagcguggugaacauccagaaggagaucgaucggcugaacgagguggccaagaaccugaacgagagccugaucgaccugcaggagcugggcaaguacgagcaguacaucaaguggcccugguacaucuggcugggcuucaucgccggccugaucgccaucgugaucgugaccaucaugcugugcugcaugaccagcugcugcagcugccugaagggcuguugcagcugcggcagcugcugcaaguucgacgaggacgacagcgagcccgugcugaagggcgugaagcugcacuacaccugaggacuaguguccaccugucccuccugggcugcuggauugucucguuuuccugccaaauaaacaggaucagcgcuuuacagaucucaaaggcucuuuucagagccaccaaaaaaaaaaaaaaaaaaaaaaaaaaaaaaaaaaaaaaaaaaaaaaaaaaaaaaaaaaaaaaaaaaaaaaaaaaaaaaaaaaaaaaaaaaaaaaaaaaaaa

SEQ ID NO: 23895 - RNA, 4123 nt, Artificial Sequence
  SARS-CoV-2/Wuhan/WIV05/2019__EPI_ISL_402128 spike protein mRNA gc (1-1273)(H69del_V70del_A222V_Y453F_S477N_D614G_I692V)
aggagacccgugacccggaaguuguacggcuacgcgacuuucccucccacaaacccucgcgcccuuccuuuccuacuugggcccggcagaaagcuuaccauguucguguuccuggugcugcugccccuggugagcagccagugcgugaaccugaccacccggacccagcugccaccagccuacaccaacagcuucacccggggcgucuacuaccccgacaagguguuccggagcagcguccugcacagcacccaggaccuguuccugcccuucuucagcaacgugaccugguuccacgccaucagcggcaccaacggcaccaagcgguucgacaaccccgugcugcccuucaacgacggcguguacuucgccagcaccgagaagagcaacaucauccggggcuggaucuucggcaccacccuggacagcaagacccagagccugcugaucgugaauaacgccaccaacguggugaucaaggugugcgaguuccaguucugcaacgaccccuuccugggcguguacuaccacaagaacaacaagagcuggauggagagcgaguuccggguguacagcagcgccaacaacugcaccuucgaguacgugagccagcccuuccugauggaccuggagggcaagcagggcaacuucaagaaccugcgggaguucguguucaagaacaucgacggcuacuucaagaucuacagcaagcacaccccaaucaaccuggugcgggaucugccccagggcuucucagugcuggagccccugguggaccugcccaucggcaucaacaucacccgguuccagacccugcuggcccugcaccggagcuaccugaccccaggcgacagcagcagcggguggacagcaggcgcggcugcuuacuacgugggcuaccugcagccccggaccuuccugcugaaguacaacgagaacggcaccaucaccgacgccguggacugcgcccuggacccucugagcgagaccaagugcacccugaagagcuucaccguggagaagggcaucuaccagaccagcaacuuccgggugcagcccaccgagagcaucgugcgguuccccaacaucaccaaccugugccccuucggcgagguguucaacgccacccgguucgccagcguguacgccuggaaccggaagcggaucagcaacugcguggccgacuacagcgugcuguacaacagcgccagcuucagcaccuucaagugcuacggcgugagccccaccaagcugaacgaccugugcuucaccaacguguacgccgacagcuucgugauccguggcgacgaggugcggcagaucgcacccggccagacaggcaagaucgccgacuacaacuacaagcugcccgacgacuucaccggcugcgugaucgccuggaacagcaacaaccucgacagcaaggugggcggcaacuacaacuaccuguuccggcuguuccggaagagcaaccugaagcccuucgagcgggacaucagcaccgagaucuaccaagccggcaacaccccuugcaacggcguggagggcuucaacugcuacuucccucugcagagcuacggcuuccagcccaccaacggcgugggcuaccagcccuaccgggugguggugcugagcuucgagcugcugcacgccccagccaccguguguggccccaagaagagcaccaaccuggugaagaacaagugcgugaacuucaacuucaacggccuuaccggcaccggcgugcugaccgagagcaacaagaaauuccugcccuuucagcaguucggccgggacaucgccgacaccaccgacgcugugcgggauccccagacccuggagauccuggacaucaccccuugcagcuucggcggcgugagcgugaucaccccaggcaccaacaccagcaaccagguggccgugcuguaccagggcgugaacugcaccgaggugcccguggccauccacgccgaccagcugacacccaccuggcgggucuacagcaccggcagcaacguguuccagacccgggccgguugccugaucggcgccgagcacgugaacaacagcuacgagugcgacauccccaucggcgccggcaucugugccagcuaccagacccagaccaauucaccccggagggcaaggagcguggccagccagagcgugaucgccuacaccaugagccugggcgccgagaacagcguggccuacagcaacaacagcaucgccauccccaccaacuucaccaucagcgugaccaccgagauucugcccgugagcaugaccaagaccagcguggacugcaccauguacaucugcggcgacagcaccgagugcagcaaccugcugcugcaguacggcagcuucugcacccagcugaaccgggcccugaccggcaucgccguggagcaggacaagaacacccaggagguguucgcccaggugaagcagaucuacaagaccccucccaucaaggacuucggcggcuucaacuucagccagauccugcccgaccccagcaagcccagcaagcggagcuucaucgaggaccugcuguucaacaaggugacccuagccgacgccggcuucaucaagcaguacggcgacugccucggcgacauagccgcccgggaccugaucugcgcccagaaguucaacggccugaccgugcugccuccccugcugaccgacgagaugaucgcccaguacaccagcgcccuguuagccggaaccaucaccagcggcuggacuuucggcgcuggagccgcucugcagauccccuucgccaugcagauggccuaccgguucaacggcaucggcgugacccagaacgugcuguacgagaaccagaagcugaucgccaaccaguucaacagcgccaucggcaagauccaggacagccugagcagcaccgcuagcgcccugggcaagcugcaggacguggugaaccagaacgcccaggcccugaacacccuggugaagcagcugagcagcaacuucggcgccaucagcagcgugcugaacgacauccugagccggcuggacaaggucgaggccgaggugcagaucgaccggcugaucacuggccggcugcagagccugcagaccuacgugacccagcagcugauccgggccgccgagauucgggccagcgccaaccuggccgccaccaagaugagcgagugcgugcugggccagagcaagcggguggacuucugcggcaagggcuaccaccugaugagcuuuccccagagcgcaccccacggagugguguuccugcacgugaccuacgugcccgcccaggagaagaacuucaccaccgccccagccaucugccacgacggcaaggcccacuuuccccgggagggcguguucgugagcaacggcacccacugguucgugacccagcggaacuucuacgagccccagaucaucaccaccgacaacaccuucgugagcggcaacugcgacguggugaucggcaucgugaacaacaccguguacgauccccugcagcccgagcuggacagcuucaaggaggagcuggacaaguacuucaagaaucacaccagccccgacguggaccugggcgacaucagcggcaucaacgccagcguggugaacauccagaaggagaucgaucggcugaacgagguggccaagaaccugaacgagagccugaucgaccugcaggagcugggcaaguacgagcaguacaucaaguggcccugguacaucuggcugggcuucaucgccggccugaucgccaucgugauggugaccaucaugcugugcugcaugaccagcugcugcagcugccugaagggcuguugcagcugcggcagcugcugcaaguucgacgaggacgacagcgagcccgugcugaagggcgugaagcugcacuacaccugaggacuaguguccaccugucccuccugggcugcuggauugucucguuuuccugccaaauaaacaggaucagcgcuuuacagaucucaaaggcucuuuucagagccaccaaaaaaaaaaaaaaaaaaaaaaaaaaaaaaaaaaaaaaaaaaaaaaaaaaaaaaaaaaaaaaaaaaaaaaaaaaaaaaaaaaaaaaaaaaaaaaaaaaaaa

SEQ ID NO: 23896 - RNA, 4123 nt, Artificial Sequence
  SARS-CoV-2/Wuhan/WIV05/2019__EPI_ISL_402128 spike protein mRNA gc (1-1273)(H69del_V70del_Y453F_D614G_I692V_M1229I)
aggagacccgugacccggaaguuguacggcuacgcgacuuucccucccacaaacccucgcgcccuuccuuuccuacuugggcccggcagaaagcuuaccauguucguguuccuggugcugcugccccuggugagcagccagugcgugaaccugaccacccggacccagcugccaccagccuacaccaacagcuucacccggggcgucuacuaccccgacaagguguuccggagcagcguccugcacagcacccaggaccuguuccugcccuucuucagcaacgugaccugguuccacgccaucagcggcaccaacggcaccaagcgguucgacaaccccgugcugcccuucaacgacggcguguacuucgccagcaccgagaagagcaacaucauccggggcuggaucuucggcaccacccuggacagcaagacccagagccugcugaucgugaauaacgccaccaacguggugaucaaggugugcgaguuccaguucugcaacgaccccuuccugggcguguacuaccacaagaacaacaagagcuggauggagagcgaguuccggguguacagcagcgccaacaacugcaccuucgaguacgugagccagcccuuccugauggaccuggagggcaagcagggcaacuucaagaaccugcgggaguucguguucaagaacaucgacggcuacuucaagaucuacagcaagcacaccccaaucaaccuggugcgggaucugccccagggcuucucagcccuggagccccugguggaccugcccaucggcaucaacaucacccgguuccagacccugcuggcccugcaccggagcuaccugaccccaggcgacagcagcagcggguggacagcaggcgcggcugcuuacuacgugggcuaccugcagccccggaccuuccugcugaaguacaacgagaacggcaccaucaccgacgccguggacugcgcccuggacccucugagcgagaccaagugcacccugaagagcuucaccguggagaagggcaucuaccagaccagcaacuuccgggugcagcccaccgagagcaucgugcgguuccccaacaucaccaaccugugccccuucggcgagguguucaacgccacccgguucgccagcguguacgccuggaaccggaagcggaucagcaacugcguggccgacuacagcgugcuguacaacagcgccagcuucagcaccuucaagugcuacggcgugagccccaccaagcugaacgaccugugcuucaccaacguguacgccgacagcuucgugauccguggcgacgaggugcggcagaucgcacccggccagacaggcaagaucgccgacuacaacuacaagcugcccgacgacuucaccggcugcgugaucgccuggaacagcaacaaccucgacagcaaggugggcggcaacuacaacuaccuguuccggcuguuccggaagagcaaccugaagcccuucgagcgggacaucagcaccgagaucuaccaagccggcuccaccccuugcaacggcguggagggcuucaacugcuacuucccucugcagagcuacggcuuccagcccaccaacggcgugggcuaccagcccuaccgggugguggugcugagcuucgagcugcugcacgccccagccaccguguguggccccaagaagagcaccaaccuggugaagaacaagugcgugaacuucaacuucaacggccuuaccggcaccggcgugcugaccgagagcaacaagaaauuccugcccuuucagcaguucggccgggacaucgccgacaccaccgacgcugugcgggauccccagacccuggagauccuggacaucaccccuugcagcuucggcggcgugagcgugaucaccccaggcaccaacaccagcaaccagguggccgugcuguaccagggcgugaacugcaccgaggugcccguggccauccacgccgaccagcugacacccaccuggcgggucuacagcaccggcagcaacguguuccagacccgggccgguugccugaucggcgccgagcacgugaacaacagcuacgagugcgacauccccaucggcgccggcaucugugccagcuaccagacccagaccaauucaccccggagggcaaggagcguggccagccagagcgugaucgccuacaccaugagccugggcgccgagaacagcguggccuacagcaacaacagcaucgccauccccaccaacuucaccaucagcgugaccaccgagauucugcccgugagcaugaccaagaccagcguggacugcaccauguacaucugcggcgacagcaccgagugcagcaaccugcugcugcaguacggcagcuucugcacccagcugaaccgggcccugaccggcaucgccguggagcaggacaagaacacccaggagguguucgcccaggugaagcagaucuacaagaccccucccaucaaggacuucggcggcuucaacuucagccagauccugcccgaccccagcaagcccagcaagcggagcuucaucgaggaccugcuguucaacaaggugacccuagccgacgccggcuucaucaagcaguacggcgacugccucggcgacauagccgcccgggaccugaucugcgcccagaaguucaacggccugaccgugcugccuccccugcugaccgacgagaugaucgcccaguacaccagcgcccuguuagccggaaccaucaccagcggcuggacuuucggcgcuggagccgcucugcagauccccuucgccaugcagauggccuaccgguucaacggcaucggcgugacccagaacgugcuguacgagaaccagaagcugaucgccaaccaguucaacagcgccaucggcaagauccaggacagccugagcagcaccgcuagcgcccugggcaagcugcaggacguggugaaccagaacgcccaggcccugaacacccuggugaagcagcugagcagcaacuucggcgccaucagcagcgugcugaacgacauccugagccggcuggacaaggucgaggccgaggugcagaucgaccggcugaucacuggccggcugcagagccugcagaccuacgugacccagcagcugauccgggccgccgagauucgggccagcgccaaccuggccgccaccaagaugagcgagugcgugcugggccagagcaagcggguggacuucugcggcaagggcuaccaccugaugagcuuuccccagagcgcaccccacggagugguguuccugcacgugaccuacgugcccgcccaggagaagaacuucaccaccgccccagccaucugccacgacggcaaggcccacuuuccccgggagggcguguucgugagcaacggcacccacugguucgugacccagcggaacuucuacgagccccagaucaucaccaccgacaacaccuucgugagcggcaacugcgacguggugaucggcaucgugaacaacaccguguacgauccccugcagcccgagcuggacagcuucaaggaggagcuggacaaguacuucaagaaucacaccagccccgacguggaccugggcgacaucagcggcaucaacgccagcguggugaacauccagaaggagaucgaucggcugaacgagguggccaagaaccugaacgagagccugaucgaccugcaggagcugggcaaguacgagcaguacaucaaguggcccugguacaucuggcugggcuucaucgccggccugaucgccaucgugaucgugaccaucaugcugugcugcaugaccagcugcugcagcugccugaagggcuguugcagcugcggcagcugcugcaaguucgacgaggacgacagcgagcccgugcugaagggcgugaagcugcacuacaccugaggacuaguguccaccugucccuccugggcugcuggauugucucguuuuccugccaaauaaacaggaucagcgcuuuacagaucucaaaggcucuuuucagagccaccaaaaaaaaaaaaaaaaaaaaaaaaaaaaaaaaaaaaaaaaaaaaaaaaaaaaaaaaaaaaaaaaaaaaaaaaaaaaaaaaaaaaaaaaaaaaaaaaaaaaa

SEQ ID NO: 23897 - RNA, 4120 nt, Artificial Sequence
  SARS-CoV-2/Wuhan/WIV05/2019__EPI_ISL_402128 spike protein mRNA gc (1-1273)(H69del_V70del_Y144del_N501Y_A570D_D614G_P681H_T716I_S982 A_D1118H)
aggagacccgugacccggaaguuguacggcuacgcgacuuucccucccacaaacccucgcgcccuuccuuuccuacuugggcccggcagaaagcuuaccauguucguguuccuggugcugcugccccuggugagcagccagugcgugaaccugaccacccggacccagcugccaccagccuacaccaacagcuucacccggggcgucuacuaccccgacaagguguuccggagcagcguccugcacagcacccaggaccuguuccugcccuucuucagcaacgugaccugguuccacgccaucagcggcaccaacggcaccaagcgguucgacaaccccgugcugcccuucaacgacggcguguacuucgccagcaccgagaagagcaacaucauccggggcuggaucuucggcaccacccuggacagcaagacccagagccugcugaucgugaauaacgccaccaacguggugaucaaggugugcgaguuccaguucugcaacgaccccuuccugggcguguaccacaagaacaacaagagcuggauggagagcgaguuccggguguacagcagcgccaacaacugcaccuucgaguacgugagccagcccuuccugauggaccuggagggcaagcagggcaacuucaagaaccugcgggaguucguguucaagaacaucgacggcuacuucaagaucuacagcaagcacaccccaaucaaccuggugcgggaucugccccagggcuucucagcccuggagccccugguggaccugcccaucggcaucaacaucacccgguuccagacccugcuggcccugcaccggagcuaccugaccccaggcgacagcagcagcggguggacagcaggcgcggcugcuuacuacgugggcuaccugcagccccggaccuuccugcugaaguacaacgagaacggcaccaucaccgacgccguggacugcgcccuggacccucugagcgagaccaagugcacccugaagagcuucaccguggagaagggcaucuaccagaccagcaacuuccgggugcagcccaccgagagcaucgugcgguuccccaacaucaccaaccugugccccuucggcgagguguucaacgccacccgguucgccagcguguacgccuggaaccggaagcggaucagcaacugcguggccgacuacagcgugcuguacaacagcgccagcuucagcaccuucaagugcuacggcgugagccccaccaagcugaacgaccugugcuucaccaacguguacgccgacagcuucgugauccguggcgacgaggugcggcagaucgcacccggccagacaggcaagaucgccgacuacaacuacaagcugcccgacgacuucaccggcugcgugaucgccuggaacagcaacaaccucgacagcaaggugggcggcaacuacaacuaccuguaccggcuguuccggaagagcaaccugaagcccuucgagcgggacaucagcaccgagaucuaccaagccggcuccaccccuugcaacggcguggagggcuucaacugcuacuucccucugcagagcuacggcuuccagcccaccuacggcgugggcuaccagcccuaccgggugguggugcugagcuucgagcugcugcacgccccagccaccguguguggccccaagaagagcaccaaccuggugaagaacaagugcgugaacuucaacuucaacggccuuaccggcaccggcgugcugaccgagagcaacaagaaauuccugcccuuucagcaguucggccgggacaucgacgacaccaccgacgcugugcgggauccccagacccuggagauccuggacaucaccccuugcagcuucggcggcgugagcgugaucaccccaggcaccaacaccagcaaccagguggccgugcuguaccagggcgugaacugcaccgaggugcccguggccauccacgccgaccagcugacacccaccuggcgggucuacagcaccggcagcaacguguuccagacccgggccgguugccugaucggcgccgagcacgugaacaacagcuacgagugcgacauccccaucggcgccggcaucugugccagcuaccagacccagaccaauucacaccggagggcaaggagcguggccagccagagcaucaucgccuacaccaugagccugggcgccgagaacagcguggccuacagcaacaacagcaucgccauccccaucaacuucaccaucagcgugaccaccgagauucugcccgugagcaugaccaagaccagcguggacugcaccauguacaucugcggcgacagcaccgagugcagcaaccugcugcugcaguacggcagcuucugcacccagcugaaccgggcccugaccggcaucgccguggagcaggacaagaacacccaggagguguucgcccaggugaagcagaucuacaagaccccucccaucaaggacuucggcggcuucaacuucagccagauccugcccgaccccagcaagcccagcaagcggagcuucaucgaggaccugcuguucaacaaggugacccuagccgacgccggcuucaucaagcaguacggcgacugccucggcgacauagccgcccgggaccugaucugcgcccagaaguucaacggccugaccgugcugccuccccugcugaccgacgagaugaucgcccaguacaccagcgcccuguuagccggaaccaucaccagcggcuggacuuucggcgcuggagccgcucugcagauccccuucgccaugcagauggccuaccgguucaacggcaucggcgugacccagaacgugcuguacgagaaccagaagcugaucgccaaccaguucaacagcgccaucggcaagauccaggacagccugagcagcaccgcuagcgcccugggcaagcugcaggacguggugaaccagaacgcccaggcccugaacacccuggugaagcagcugagcagcaacuucggcgccaucagcagcgugcugaacgacauccuggcccggcuggacaaggucgaggccgaggugcagaucgaccggcugaucacuggccggcugcagagccugcagaccuacgugacccagcagcugauccgggccgccgagauucgggccagcgccaaccuggccgccaccaagaugagcgagugcgugcugggccagagcaagcggguggacuucugcggcaagggcuaccaccugaugagcuuuccccagagcgcaccccacggagugguguuccugcacgugaccuacgugcccgcccaggagaagaacuucaccaccgccccagccaucugccacgacggcaaggcccacuuuccccgggagggcguguucgugagcaacggcacccacugguucgugacccagcggaacuucuacgagccccagaucaucaccacccacaacaccuucgugagcggcaacugcgacguggugaucggcaucgugaacaacaccguguacgauccccugcagcccgagcuggacagcuucaaggaggagcuggacaaguacuucaagaaucacaccagccccgacguggaccugggcgacaucagcggcaucaacgccagcguggugaacauccagaaggagaucgaucggcugaacgagguggccaagaaccugaacgagagccugaucgaccugcaggagcugggcaaguacgagcaguacaucaaguggcccugguacaucuggcugggcuucaucgccggccugaucgccaucgugauggugaccaucaugcugugcugcaugaccagcugcugcagcugccugaagggcuguugcagcugcggcagcugcugcaaguucgacgaggacgacagcgagcccgugcugaagggcgugaagcugcacuacaccugaggacuaguguccaccugucccuccugggcugcuggauugucucguuuuccugccaaauaaacaggaucagcgcuuuacagaucucaaaggcucuuuucagagccaccaaaaaaaaaaaaaaaaaaaaaaaaaaaaaaaaaaaaaaaaaaaaaaaaaaaaaaaaaaaaaaaaaaaaaaaaaaaaaaaaaaaaaaaaaaaaaaaaaaaaa

SEQ ID NO: 23898 - RNA, 4129 nt, Artificial Sequence
  SARS-CoV-2/Wuhan/WIV05/2019__EPI_ISL_402128 spike protein mRNA gc (1-1273)(K417N_E484K_N501Y_D614G)
aggagacccgugacccggaaguuguacggcuacgcgacuuucccucccacaaacccucgcgcccuuccuuuccuacuugggcccggcagaaagcuuaccauguucguguuccuggugcugcugccccuggugagcagccagugcgugaaccugaccacccggacccagcugccaccagccuacaccaacagcuucacccggggcgucuacuaccccgacaagguguuccggagcagcguccugcacagcacccaggaccuguuccugcccuucuucagcaacgugaccugguuccacgccauccacgugagcggcaccaacggcaccaagcgguucgacaaccccgugcugcccuucaacgacggcguguacuucgccagcaccgagaagagcaacaucauccggggcuggaucuucggcaccacccuggacagcaagacccagagccugcugaucgugaauaacgccaccaacguggugaucaaggugugcgaguuccaguucugcaacgaccccuuccugggcguguacuaccacaagaacaacaagagcuggauggagagcgaguuccggguguacagcagcgccaacaacugcaccuucgaguacgugagccagcccuuccugauggaccuggagggcaagcagggcaacuucaagaaccugcgggaguucguguucaagaacaucgacggcuacuucaagaucuacagcaagcacaccccaaucaaccuggugcgggaucugccccagggcuucucagcccuggagccccugguggaccugcccaucggcaucaacaucacccgguuccagacccugcuggcccugcaccggagcuaccugaccccaggcgacagcagcagcggguggacagcaggcgcggcugcuuacuacgugggcuaccugcagccccggaccuuccugcugaaguacaacgagaacggcaccaucaccgacgccguggacugcgcccuggacccucugagcgagaccaagugcacccugaagagcuucaccguggagaagggcaucuaccagaccagcaacuuccgggugcagcccaccgagagcaucgugcgguuccccaacaucaccaaccugugccccuucggcgagguguucaacgccacccgguucgccagcguguacgccuggaaccggaagcggaucagcaacugcguggccgacuacagcgugcuguacaacagcgccagcuucagcaccuucaagugcuacggcgugagccccaccaagcugaacgaccugugcuucaccaacguguacgccgacagcuucgugauccguggcgacgaggugcggcagaucgcacccggccagacaggcaacaucgccgacuacaacuacaagcugcccgacgacuucaccggcugcgugaucgccuggaacagcaacaaccucgacagcaaggugggcggcaacuacaacuaccuguaccggcuguuccggaagagcaaccugaagcccuucgagcgggacaucagcaccgagaucuaccaagccggcuccaccccuugcaacggcgugaagggcuucaacugcuacuucccucugcagagcuacggcuuccagcccaccuacggcgugggcuaccagcccuaccgggugguggugcugagcuucgagcugcugcacgccccagccaccguguguggccccaagaagagcaccaaccuggugaagaacaagugcgugaacuucaacuucaacggccuuaccggcaccggcgugcugaccgagagcaacaagaaauuccugcccuuucagcaguucggccgggacaucgccgacaccaccgacgcugugcgggauccccagacccuggagauccuggacaucaccccuugcagcuucggcggcgugagcgugaucaccccaggcaccaacaccagcaaccagguggccgugcuguaccagggcgugaacugcaccgaggugcccguggccauccacgccgaccagcugacacccaccuggcgggucuacagcaccggcagcaacguguuccagacccgggccgguugccugaucggcgccgagcacgugaacaacagcuacgagugcgacauccccaucggcgccggcaucugugccagcuaccagacccagaccaauucaccccggagggcaaggagcguggccagccagagcaucaucgccuacaccaugagccugggcgccgagaacagcguggccuacagcaacaacagcaucgccauccccaccaacuucaccaucagcgugaccaccgagauucugcccgugagcaugaccaagaccagcguggacugcaccauguacaucugcggcgacagcaccgagugcagcaaccugcugcugcaguacggcagcuucugcacccagcugaaccgggcccugaccggcaucgccguggagcaggacaagaacacccaggagguguucgcccaggugaagcagaucuacaagaccccucccaucaaggacuucggcggcuucaacuucagccagauccugcccgaccccagcaagcccagcaagcggagcuucaucgaggaccugcuguucaacaaggugacccuagccgacgccggcuucaucaagcaguacggcgacugccucggcgacauagccgcccgggaccugaucugcgcccagaaguucaacggccugaccgugcugccuccccugcugaccgacgagaugaucgcccaguacaccagcgcccuguuagccggaaccaucaccagcggcuggacuuucggcgcuggagccgcucugcagauccccuucgccaugcagauggccuaccgguucaacggcaucggcgugacccagaacgugcuguacgagaaccagaagcugaucgccaaccaguucaacagcgccaucggcaagauccaggacagccugagcagcaccgcuagcgcccugggcaagcugcaggacguggugaaccagaacgcccaggcccugaacacccuggugaagcagcugagcagcaacuucggcgccaucagcagcgugcugaacgacauccugagccggcuggacaaggucgaggccgaggugcagaucgaccggcugaucacuggccggcugcagagccugcagaccuacgugacccagcagcugauccgggccgccgagauucgggccagcgccaaccuggccgccaccaagaugagcgagugcgugcugggccagagcaagcggguggacuucugcggcaagggcuaccaccugaugagcuuuccccagagcgcaccccacggagugguguuccugcacgugaccuacgugcccgcccaggagaagaacuucaccaccgccccagccaucugccacgacggcaaggcccacuuuccccgggagggcguguucgugagcaacggcacccacugguucgugacccagcggaacuucuacgagccccagaucaucaccaccgacaacaccuucgugagcggcaacugcgacguggugaucggcaucgugaacaacaccguguacgauccccugcagcccgagcuggacagcuucaaggaggagcuggacaaguacuucaagaaucacaccagccccgacguggaccugggcgacaucagcggcaucaacgccagcguggugaacauccagaaggagaucgaucggcugaacgagguggccaagaaccugaacgagagccugaucgaccugcaggagcugggcaaguacgagcaguacaucaaguggcccugguacaucuggcugggcuucaucgccggccugaucgccaucgugauggugaccaucaugcugugcugcaugaccagcugcugcagcugccugaagggcuguugcagcugcggcagcugcugcaaguucgacgaggacgacagcgagcccgugcugaagggcgugaagcugcacuacaccugaggacuaguguccaccugucccuccugggcugcuggauugucucguuuuccugccaaauaaacaggaucagcgcuuuacagaucucaaaggcucuuuucagagccaccaaaaaaaaaaaaaaaaaaaaaaaaaaaaaaaaaaaaaaaaaaaaaaaaaaaaaaaaaaaaaaaaaaaaaaaaaaaaaaaaaaaaaaaaaaaaaaaaaaaaa

SEQ ID NO: 23899 - RNA, 4120 nt, Artificial Sequence
  SARS-CoV-2/Wuhan/WIV05/2019__EPI_ISL_402128 spike protein mRNA gc (1-1273)(L18F_D80A_D215G_L242del_A243del_L244del_R246I_K417N_E484 K_N501Y_D614G_A701V)
aggagacccgugacccggaaguuguacggcuacgcgacuuucccucccacaaacccucgcgcccuuccuuuccuacuugggcccggcagaaagcuuaccauguucguguuccuggugcugcugccccuggugagcagccagugcgugaacuucaccacccggacccagcugccaccagccuacaccaacagcuucacccggggcgucuacuaccccgacaagguguuccggagcagcguccugcacagcacccaggaccuguuccugcccuucuucagcaacgugaccugguuccacgccauccacgugagcggcaccaacggcaccaagcgguucgccaaccccgugcugcccuucaacgacggcguguacuucgccagcaccgagaagagcaacaucauccggggcuggaucuucggcaccacccuggacagcaagacccagagccugcugaucgugaauaacgccaccaacguggugaucaaggugugcgaguuccaguucugcaacgaccccuuccugggcguguacuaccacaagaacaacaagagcuggauggagagcgaguuccggguguacagcagcgccaacaacugcaccuucgaguacgugagccagcccuuccugauggaccuggagggcaagcagggcaacuucaagaaccugcgggaguucguguucaagaacaucgacggcuacuucaagaucuacagcaagcacaccccaaucaaccuggugcggggccugccccagggcuucucagcccuggagccccugguggaccugcccaucggcaucaacaucacccgguuccagacccugcacaucagcuaccugaccccaggcgacagcagcagcggguggacagcaggcgcggcugcuuacuacgugggcuaccugcagccccggaccuuccugcugaaguacaacgagaacggcaccaucaccgacgccguggacugcgcccuggacccucugagcgagaccaagugcacccugaagagcuucaccguggagaagggcaucuaccagaccagcaacuuccgggugcagcccaccgagagcaucgugcgguuccccaacaucaccaaccugugccccuucggcgagguguucaacgccacccgguucgccagcguguacgccuggaaccggaagcggaucagcaacugcguggccgacuacagcgugcuguacaacagcgccagcuucagcaccuucaagugcuacggcgugagccccaccaagcugaacgaccugugcuucaccaacguguacgccgacagcuucgugauccguggcgacgaggugcggcagaucgcacccggccagacaggcaacaucgccgacuacaacuacaagcugcccgacgacuucaccggcugcgugaucgccuggaacagcaacaaccucgacagcaaggugggcggcaacuacaacuaccuguaccggcuguuccggaagagcaaccugaagcccuucgagcgggacaucagcaccgagaucuaccaagccggcuccaccccuugcaacggcgugaagggcuucaacugcuacuucccucugcagagcuacggcuuccagcccaccuacggcgugggcuaccagcccuaccgggugguggugcugagcuucgagcugcugcacgccccagccaccguguguggccccaagaagagcaccaaccuggugaagaacaagugcgugaacuucaacuucaacggccuuaccggcaccggcgugcugaccgagagcaacaagaaauuccugcccuuucagcaguucggccgggacaucgccgacaccaccgacgcugugcgggauccccagacccuggagauccuggacaucaccccuugcagcuucggcggcgugagcgugaucaccccaggcaccaacaccagcaaccagguggccgugcuguaccagggcgugaacugcaccgaggugcccguggccauccacgccgaccagcugacacccaccuggcgggucuacagcaccggcagcaacguguuccagacccgggccgguugccugaucggcgccgagcacgugaacaacagcuacgagugcgacauccccaucggcgccggcaucugugccagcuaccagacccagaccaauucaccccggagggcaaggagcguggccagccagagcaucaucgccuacaccaugagccugggcguggagaacagcguggccuacagcaacaacagcaucgccauccccaccaacuucaccaucagcgugaccaccgagauucugcccgugagcaugaccaagaccagcguggacugcaccauguacaucugcggcgacagcaccgagugcagcaaccugcugcugcaguacggcagcuucugcacccagcugaaccgggcccugaccggcaucgccguggagcaggacaagaacacccaggagguguucgcccaggugaagcagaucuacaagaccccucccaucaaggacuucggcggcuucaacuucagccagauccugcccgaccccagcaagcccagcaagcggagcuucaucgaggaccugcuguucaacaaggugacccuagccgacgccggcuucaucaagcaguacggcgacugccucggcgacauagccgcccgggaccugaucugcgcccagaaguucaacggccugaccgugcugccuccccugcugaccgacgagaugaucgcccaguacaccagcgcccuguuagccggaaccaucaccagcggcuggacuuucggcgcuggagccgcucugcagauccccuucgccaugcagauggccuaccgguucaacggcaucggcgugacccagaacgugcuguacgagaaccagaagcugaucgccaaccaguucaacagcgccaucggcaagauccaggacagccugagcagcaccgcuagcgcccugggcaagcugcaggacguggugaaccagaacgcccaggcccugaacacccuggugaagcagcugagcagcaacuucggcgccaucagcagcgugcugaacgacauccugagccggcuggacaaggucgaggccgaggugcagaucgaccggcugaucacuggccggcugcagagccugcagaccuacgugacccagcagcugauccgggccgccgagauucgggccagcgccaaccuggccgccaccaagaugagcgagugcgugcugggccagagcaagcggguggacuucugcggcaagggcuaccaccugaugagcuuuccccagagcgcaccccacggagugguguuccugcacgugaccuacgugcccgcccaggagaagaacuucaccaccgccccagccaucugccacgacggcaaggcccacuuuccccgggagggcguguucgugagcaacggcacccacugguucgugacccagcggaacuucuacgagccccagaucaucaccaccgacaacaccuucgugagcggcaacugcgacguggugaucggcaucgugaacaacaccguguacgauccccugcagcccgagcuggacagcuucaaggaggagcuggacaaguacuucaagaaucacaccagccccgacguggaccugggcgacaucagcggcaucaacgccagcguggugaacauccagaaggagaucgaucggcugaacgagguggccaagaaccugaacgagagccugaucgaccugcaggagcugggcaaguacgagcaguacaucaaguggcccugguacaucuggcugggcuucaucgccggccugaucgccaucgugauggugaccaucaugcugugcugcaugaccagcugcugcagcugccugaagggcuguugcagcugcggcagcugcugcaaguucgacgaggacgacagcgagcccgugcugaagggcgugaagcugcacuacaccugaggacuaguguccaccugucccuccugggcugcuggauugucucguuuuccugccaaauaaacaggaucagcgcuuuacagaucucaaaggcucuuuucagagccaccaaaaaaaaaaaaaaaaaaaaaaaaaaaaaaaaaaaaaaaaaaaaaaaaaaaaaaaaaaaaaaaaaaaaaaaaaaaaaaaaaaaaaaaaaaaaaaaaaaaaa

SEQ ID NO: 23900 - RNA, 4129 nt, Artificial Sequence
  SARS-CoV-2/Wuhan/WIV05/2019__EPI_ISL_402128 spike protein mRNA gc (1-1273)(E484K_D614G)
aggagacccgugacccggaaguuguacggcuacgcgacuuucccucccacaaacccucgcgcccuuccuuuccuacuugggcccggcagaaagcuuaccauguucguguuccuggugcugcugccccuggugagcagccagugcgugaaccugaccacccggacccagcugccaccagccuacaccaacagcuucacccggggcgucuacuaccccgacaagguguuccggagcagcguccugcacagcacccaggaccuguuccugcccuucuucagcaacgugaccugguuccacgccauccacgugagcggcaccaacggcaccaagcgguucgacaaccccgugcugcccuucaacgacggcguguacuucgccagcaccgagaagagcaacaucauccggggcuggaucuucggcaccacccuggacagcaagacccagagccugcugaucgugaauaacgccaccaacguggugaucaaggugugcgaguuccaguucugcaacgaccccuuccugggcguguacuaccacaagaacaacaagagcuggauggagagcgaguuccggguguacagcagcgccaacaacugcaccuucgaguacgugagccagcccuuccugauggaccuggagggcaagcagggcaacuucaagaaccugcgggaguucguguucaagaacaucgacggcuacuucaagaucuacagcaagcacaccccaaucaaccuggugcgggaucugccccagggcuucucagcccuggagccccugguggaccugcccaucggcaucaacaucacccgguuccagacccugcuggcccugcaccggagcuaccugaccccaggcgacagcagcagcggguggacagcaggcgcggcugcuuacuacgugggcuaccugcagccccggaccuuccugcugaaguacaacgagaacggcaccaucaccgacgccguggacugcgcccuggacccucugagcgagaccaagugcacccugaagagcuucaccguggagaagggcaucuaccagaccagcaacuuccgggugcagcccaccgagagcaucgugcgguuccccaacaucaccaaccugugccccuucggcgagguguucaacgccacccgguucgccagcguguacgccuggaaccggaagcggaucagcaacugcguggccgacuacagcgugcuguacaacagcgccagcuucagcaccuucaagugcuacggcgugagccccaccaagcugaacgaccugugcuucaccaacguguacgccgacagcuucgugauccguggcgacgaggugcggcagaucgcacccggccagacaggcaagaucgccgacuacaacuacaagcugcccgacgacuucaccggcugcgugaucgccuggaacagcaacaaccucgacagcaaggugggcggcaacuacaacuaccuguaccggcuguuccggaagagcaaccugaagcccuucgagcgggacaucagcaccgagaucuaccaagccggcuccaccccuugcaacggcgugaagggcuucaacugcuacuucccucugcagagcuacggcuuccagcccaccaacggcgugggcuaccagcccuaccgggugguggugcugagcuucgagcugcugcacgccccagccaccguguguggccccaagaagagcaccaaccuggugaagaacaagugcgugaacuucaacuucaacggccuuaccggcaccggcgugcugaccgagagcaacaagaaauuccugcccuuucagcaguucggccgggacaucgccgacaccaccgacgcugugcgggauccccagacccuggagauccuggacaucaccccuugcagcuucggcggcgugagcgugaucaccccaggcaccaacaccagcaaccagguggccgugcuguaccagggcgugaacugcaccgaggugcccguggccauccacgccgaccagcugacacccaccuggcgggucuacagcaccggcagcaacguguuccagacccgggccgguugccugaucggcgccgagcacgugaacaacagcuacgagugcgacauccccaucggcgccggcaucugugccagcuaccagacccagaccaauucaccccggagggcaaggagcguggccagccagagcaucaucgccuacaccaugagccugggcgccgagaacagcguggccuacagcaacaacagcaucgccauccccaccaacuucaccaucagcgugaccaccgagauucugcccgugagcaugaccaagaccagcguggacugcaccauguacaucugcggcgacagcaccgagugcagcaaccugcugcugcaguacggcagcuucugcacccagcugaaccgggcccugaccggcaucgccguggagcaggacaagaacacccaggagguguucgcccaggugaagcagaucuacaagaccccucccaucaaggacuucggcggcuucaacuucagccagauccugcccgaccccagcaagcccagcaagcggagcuucaucgaggaccugcuguucaacaaggugacccuagccgacgccggcuucaucaagcaguacggcgacugccucggcgacauagccgcccgggaccugaucugcgcccagaaguucaacggccugaccgugcugccuccccugcugaccgacgagaugaucgcccaguacaccagcgcccuguuagccggaaccaucaccagcggcuggacuuucggcgcuggagccgcucugcagauccccuucgccaugcagauggccuaccgguucaacggcaucggcgugacccagaacgugcuguacgagaaccagaagcugaucgccaaccaguucaacagcgccaucggcaagauccaggacagccugagcagcaccgcuagcgcccugggcaagcugcaggacguggugaaccagaacgcccaggcccugaacacccuggugaagcagcugagcagcaacuucggcgccaucagcagcgugcugaacgacauccugagccggcuggacaaggucgaggccgaggugcagaucgaccggcugaucacuggccggcugcagagccugcagaccuacgugacccagcagcugauccgggccgccgagauucgggccagcgccaaccuggccgccaccaagaugagcgagugcgugcugggccagagcaagcggguggacuucugcggcaagggcuaccaccugaugagcuuuccccagagcgcaccccacggagugguguuccugcacgugaccuacgugcccgcccaggagaagaacuucaccaccgccccagccaucugccacgacggcaaggcccacuuuccccgggagggcguguucgugagcaacggcacccacugguucgugacccagcggaacuucuacgagccccagaucaucaccaccgacaacaccuucgugagcggcaacugcgacguggugaucggcaucgugaacaacaccguguacgauccccugcagcccgagcuggacagcuucaaggaggagcuggacaaguacuucaagaaucacaccagccccgacguggaccugggcgacaucagcggcaucaacgccagcguggugaacauccagaaggagaucgaucggcugaacgagguggccaagaaccugaacgagagccugaucgaccugcaggagcugggcaaguacgagcaguacaucaaguggcccugguacaucuggcugggcuucaucgccggccugaucgccaucgugauggugaccaucaugcugugcugcaugaccagcugcugcagcugccugaagggcuguugcagcugcggcagcugcugcaaguucgacgaggacgacagcgagcccgugcugaagggcgugaagcugcacuacaccugaggacuaguguccaccugucccuccugggcugcuggauugucucguuuuccugccaaauaaacaggaucagcgcuuuacagaucucaaaggcucuuuucagagccaccaaaaaaaaaaaaaaaaaaaaaaaaaaaaaaaaaaaaaaaaaaaaaaaaaaaaaaaaaaaaaaaaaaaaaaaaaaaaaaaaaaaaaaaaaaaaaaaaaaaaa

SEQ ID NO: 23901 - RNA, 4129 nt, Artificial Sequence
  SARS-CoV-2/Wuhan/WIV05/2019__EPI_ISL_402128 spike protein mRNA gc (1-1273)(L18F_T20N_P26S_D138Y_R190S_K417T_E484K_N501Y_D614G_H655Y _T1027I)
aggagacccgugacccggaaguuguacggcuacgcgacuuucccucccacaaacccucgcgcccuuccuuuccuacuugggcccggcagaaagcuuaccauguucguguuccuggugcugcugccccuggugagcagccagugcgugaacuucaccaaccggacccagcugccaagcgccuacaccaacagcuucacccggggcgucuacuaccccgacaagguguuccggagcagcguccugcacagcacccaggaccuguuccugcccuucuucagcaacgugaccugguuccacgccauccacgugagcggcaccaacggcaccaagcgguucgacaaccccgugcugcccuucaacgacggcguguacuucgccagcaccgagaagagcaacaucauccggggcuggaucuucggcaccacccuggacagcaagacccagagccugcugaucgugaauaacgccaccaacguggugaucaaggugugcgaguuccaguucugcaacuaccccuuccugggcguguacuaccacaagaacaacaagagcuggauggagagcgaguuccggguguacagcagcgccaacaacugcaccuucgaguacgugagccagcccuuccugauggaccuggagggcaagcagggcaacuucaagaaccugagcgaguucguguucaagaacaucgacggcuacuucaagaucuacagcaagcacaccccaaucaaccuggugcgggaucugccccagggcuucucagcccuggagccccugguggaccugcccaucggcaucaacaucacccgguuccagacccugcuggcccugcaccggagcuaccugaccccaggcgacagcagcagcggguggacagcaggcgcggcugcuuacuacgugggcuaccugcagccccggaccuuccugcugaaguacaacgagaacggcaccaucaccgacgccguggacugcgcccuggacccucugagcgagaccaagugcacccugaagagcuucaccguggagaagggcaucuaccagaccagcaacuuccgggugcagcccaccgagagcaucgugcgguuccccaacaucaccaaccugugccccuucggcgagguguucaacgccacccgguucgccagcguguacgccuggaaccggaagcggaucagcaacugcguggccgacuacagcgugcuguacaacagcgccagcuucagcaccuucaagugcuacggcgugagccccaccaagcugaacgaccugugcuucaccaacguguacgccgacagcuucgugauccguggcgacgaggugcggcagaucgcacccggccagacaggcaccaucgccgacuacaacuacaagcugcccgacgacuucaccggcugcgugaucgccuggaacagcaacaaccucgacagcaaggugggcggcaacuacaacuaccuguaccggcuguuccggaagagcaaccugaagcccuucgagcgggacaucagcaccgagaucuaccaagccggcuccaccccuugcaacggcgugaagggcuucaacugcuacuucccucugcagagcuacggcuuccagcccaccuacggcgugggcuaccagcccuaccgggugguggugcugagcuucgagcugcugcacgccccagccaccguguguggccccaagaagagcaccaaccuggugaagaacaagugcgugaacuucaacuucaacggccuuaccggcaccggcgugcugaccgagagcaacaagaaauuccugcccuuucagcaguucggccgggacaucgccgacaccaccgacgcugugcgggauccccagacccuggagauccuggacaucaccccuugcagcuucggcggcgugagcgugaucaccccaggcaccaacaccagcaaccagguggccgugcuguaccagggcgugaacugcaccgaggugcccguggccauccacgccgaccagcugacacccaccuggcgggucuacagcaccggcagcaacguguuccagacccgggccgguugccugaucggcgccgaguacgugaacaacagcuacgagugcgacauccccaucggcgccggcaucugugccagcuaccagacccagaccaauucaccccggagggcaaggagcguggccagccagagcaucaucgccuacaccaugagccugggcgccgagaacagcguggccuacagcaacaacagcaucgccauccccaccaacuucaccaucagcgugaccaccgagauucugcccgugagcaugaccaagaccagcguggacugcaccauguacaucugcggcgacagcaccgagugcagcaaccugcugcugcaguacggcagcuucugcacccagcugaaccgggcccugaccggcaucgccguggagcaggacaagaacacccaggagguguucgcccaggugaagcagaucuacaagaccccucccaucaaggacuucggcggcuucaacuucagccagauccugcccgaccccagcaagcccagcaagcggagcuucaucgaggaccugcuguucaacaaggugacccuagccgacgccggcuucaucaagcaguacggcgacugccucggcgacauagccgcccgggaccugaucugcgcccagaaguucaacggccugaccgugcugccuccccugcugaccgacgagaugaucgcccaguacaccagcgcccuguuagccggaaccaucaccagcggcuggacuuucggcgcuggagccgcucugcagauccccuucgccaugcagauggccuaccgguucaacggcaucggcgugacccagaacgugcuguacgagaaccagaagcugaucgccaaccaguucaacagcgccaucggcaagauccaggacagccugagcagcaccgcuagcgcccugggcaagcugcaggacguggugaaccagaacgcccaggcccugaacacccuggugaagcagcugagcagcaacuucggcgccaucagcagcgugcugaacgacauccugagccggcuggacaaggucgaggccgaggugcagaucgaccggcugaucacuggccggcugcagagccugcagaccuacgugacccagcagcugauccgggccgccgagauucgggccagcgccaaccuggccgccaucaagaugagcgagugcgugcugggccagagcaagcggguggacuucugcggcaagggcuaccaccugaugagcuuuccccagagcgcaccccacggagugguguuccugcacgugaccuacgugcccgcccaggagaagaacuucaccaccgccccagccaucugccacgacggcaaggcccacuuuccccgggagggcguguucgugagcaacggcacccacugguucgugacccagcggaacuucuacgagccccagaucaucaccaccgacaacaccuucgugagcggcaacugcgacguggugaucggcaucgugaacaacaccguguacgauccccugcagcccgagcuggacagcuucaaggaggagcuggacaaguacuucaagaaucacaccagccccgacguggaccugggcgacaucagcggcaucaacgccagcguggugaacauccagaaggagaucgaucggcugaacgagguggccaagaaccugaacgagagccugaucgaccugcaggagcugggcaaguacgagcaguacaucaaguggcccugguacaucuggcugggcuucaucgccggccugaucgccaucgugauggugaccaucaugcugugcugcaugaccagcugcugcagcugccugaagggcuguugcagcugcggcagcugcugcaaguucgacgaggacgacagcgagcccgugcugaagggcgugaagcugcacuacaccugaggacuaguguccaccugucccuccugggcugcuggauugucucguuuuccugccaaauaaacaggaucagcgcuuuacagaucucaaaggcucuuuucagagccaccaaaaaaaaaaaaaaaaaaaaaaaaaaaaaaaaaaaaaaaaaaaaaaaaaaaaaaaaaaaaaaaaaaaaaaaaaaaaaaaaaaaaaaaaaaaaaaaaaaaaa

SEQ ID NO: 23902 - RNA, 4129 nt, Artificial Sequence
  SARS-CoV-2/Wuhan/WIV05/2019__EPI_ISL_402128 spike protein mRNA gc (1-1273)(S13I_W152C_L452R_D614G)
aggagacccgugacccggaaguuguacggcuacgcgacuuucccucccacaaacccucgcgcccuuccuuuccuacuugggcccggcagaaagcuuaccauguucguguuccuggugcugcugccccuggugagcauccagugcgugaaccugaccacccggacccagcugccaccagccuacaccaacagcuucacccggggcgucuacuaccccgacaagguguuccggagcagcguccugcacagcacccaggaccuguuccugcccuucuucagcaacgugaccugguuccacgccauccacgugagcggcaccaacggcaccaagcgguucgacaaccccgugcugcccuucaacgacggcguguacuucgccagcaccgagaagagcaacaucauccggggcuggaucuucggcaccacccuggacagcaagacccagagccugcugaucgugaauaacgccaccaacguggugaucaaggugugcgaguuccaguucugcaacgaccccuuccugggcguguacuaccacaagaacaacaagagcugcauggagagcgaguuccggguguacagcagcgccaacaacugcaccuucgaguacgugagccagcccuuccugauggaccuggagggcaagcagggcaacuucaagaaccugcgggaguucguguucaagaacaucgacggcuacuucaagaucuacagcaagcacaccccaaucaaccuggugcgggaucugccccagggcuucucagcccuggagccccugguggaccugcccaucggcaucaacaucacccgguuccagacccugcuggcccugcaccggagcuaccugaccccaggcgacagcagcagcggguggacagcaggcgcggcugcuuacuacgugggcuaccugcagccccggaccuuccugcugaaguacaacgagaacggcaccaucaccgacgccguggacugcgcccuggacccucugagcgagaccaagugcacccugaagagcuucaccguggagaagggcaucuaccagaccagcaacuuccgggugcagcccaccgagagcaucgugcgguuccccaacaucaccaaccugugccccuucggcgagguguucaacgccacccgguucgccagcguguacgccuggaaccggaagcggaucagcaacugcguggccgacuacagcgugcuguacaacagcgccagcuucagcaccuucaagugcuacggcgugagccccaccaagcugaacgaccugugcuucaccaacguguacgccgacagcuucgugauccguggcgacgaggugcggcagaucgcacccggccagacaggcaagaucgccgacuacaacuacaagcugcccgacgacuucaccggcugcgugaucgccuggaacagcaacaaccucgacagcaaggugggcggcaacuacaacuaccgcuaccggcuguuccggaagagcaaccugaagcccuucgagcgggacaucagcaccgagaucuaccaagccggcuccaccccuugcaacggcguggagggcuucaacugcuacuucccucugcagagcuacggcuuccagcccaccaacggcgugggcuaccagcccuaccgggugguggugcugagcuucgagcugcugcacgccccagccaccguguguggccccaagaagagcaccaaccuggugaagaacaagugcgugaacuucaacuucaacggccuuaccggcaccggcgugcugaccgagagcaacaagaaauuccugcccuuucagcaguucggccgggacaucgccgacaccaccgacgcugugcgggauccccagacccuggagauccuggacaucaccccuugcagcuucggcggcgugagcgugaucaccccaggcaccaacaccagcaaccagguggccgugcuguaccagggcgugaacugcaccgaggugcccguggccauccacgccgaccagcugacacccaccuggcgggucuacagcaccggcagcaacguguuccagacccgggccgguugccugaucggcgccgagcacgugaacaacagcuacgagugcgacauccccaucggcgccggcaucugugccagcuaccagacccagaccaauucaccccggagggcaaggagcguggccagccagagcaucaucgccuacaccaugagccugggcgccgagaacagcguggccuacagcaacaacagcaucgccauccccaccaacuucaccaucagcgugaccaccgagauucugcccgugagcaugaccaagaccagcguggacugcaccauguacaucugcggcgacagcaccgagugcagcaaccugcugcugcaguacggcagcuucugcacccagcugaaccgggcccugaccggcaucgccguggagcaggacaagaacacccaggagguguucgcccaggugaagcagaucuacaagaccccucccaucaaggacuucggcggcuucaacuucagccagauccugcccgaccccagcaagcccagcaagcggagcuucaucgaggaccugcuguucaacaaggugacccuagccgacgccggcuucaucaagcaguacggcgacugccucggcgacauagccgcccgggaccugaucugcgcccagaaguucaacggccugaccgugcugccuccccugcugaccgacgagaugaucgcccaguacaccagcgcccuguuagccggaaccaucaccagcggcuggacuuucggcgcuggagccgcucugcagauccccuucgccaugcagauggccuaccgguucaacggcaucggcgugacccagaacgugcuguacgagaaccagaagcugaucgccaaccaguucaacagcgccaucggcaagauccaggacagccugagcagcaccgcuagcgcccugggcaagcugcaggacguggugaaccagaacgcccaggcccugaacacccuggugaagcagcugagcagcaacuucggcgccaucagcagcgugcugaacgacauccugagccggcuggacaaggucgaggccgaggugcagaucgaccggcugaucacuggccggcugcagagccugcagaccuacgugacccagcagcugauccgggccgccgagauucgggccagcgccaaccuggccgccaccaagaugagcgagugcgugcugggccagagcaagcggguggacuucugcggcaagggcuaccaccugaugagcuuuccccagagcgcaccccacggagugguguuccugcacgugaccuacgugcccgcccaggagaagaacuucaccaccgccccagccaucugccacgacggcaaggcccacuuuccccgggagggcguguucgugagcaacggcacccacugguucgugacccagcggaacuucuacgagccccagaucaucaccaccgacaacaccuucgugagcggcaacugcgacguggugaucggcaucgugaacaacaccguguacgauccccugcagcccgagcuggacagcuucaaggaggagcuggacaaguacuucaagaaucacaccagccccgacguggaccugggcgacaucagcggcaucaacgccagcguggugaacauccagaaggagaucgaucggcugaacgagguggccaagaaccugaacgagagccugaucgaccugcaggagcugggcaaguacgagcaguacaucaaguggcccugguacaucuggcugggcuucaucgccggccugaucgccaucgugauggugaccaucaugcugugcugcaugaccagcugcugcagcugccugaagggcuguugcagcugcggcagcugcugcaaguucgacgaggacgacagcgagcccgugcugaagggcgugaagcugcacuacaccugaggacuaguguccaccugucccuccugggcugcuggauugucucguuuuccugccaaauaaacaggaucagcgcuuuacagaucucaaaggcucuuuucagagccaccaaaaaaaaaaaaaaaaaaaaaaaaaaaaaaaaaaaaaaaaaaaaaaaaaaaaaaaaaaaaaaaaaaaaaaaaaaaaaaaaaaaaaaaaaaaaaaaaaaaaa

SEQ ID NO: 23903 - RNA, 4129 nt, Artificial Sequence
  SARS-CoV-2/Wuhan/WIV05/2019__EPI_ISL_402128 spike protein mRNA gc (1-1273)
aggagacccgugacccggaaguuguacggcuacgcgacuuucccucccacaaacccucgcgcccuuccuuuccuacuugggcccggcagaaagcuuaccauguucguguuccuggugcugcugccccuggugagcagccagugcgugaaccugaccacccggacccagcugcccccugccuacaccaacagcuucacccggggcguguacuaccccgacaagguguuccggagcagcgugcugcacagcacccaggaccuguuccugcccuucuucagcaacgugaccugguuccacgccauccacgugagcggcaccaacggcaccaagcgguucgacaacccagugcugcccuucaacgacggcguguacuucgccagcaccgagaagucaaacaucauccggggcuggaucuucggcaccacccuggacagcaagacacagagccugcugaucgugaacaacgccaccaacguggugaucaaggugugcgaguuucaguucugcaacgaccccuuccugggcguguacuaccacaagaacaacaagagcuggauggagagcgaguuccgggucuacagcagcgcuaacaauugcaccuucgaguacgugagccagcccuuccugauggaccucgagggcaagcagggcaacuucaagaaccugcgggaguucguguucaagaacaucgauggcuacuucaagaucuacagcaagcacacccccaucaaccuggugcgggaccugccccagggauucagcgcccuggagccucugguggaccugcccaucggcaucaacaucaccagguuccagacccugcuggcccugcaccggagcuaccugacccccggcgacagcagcagcggcuggaccgccggcgccgccgcauacuacgugggcuaccugcagccacggaccuuccugcugaaguacaacgagaacggcaccaucaccgacgccguggacugcgcccuggacccccugagcgagaccaagugcacccuaaagagcuucaccguggagaagggcaucuaccagaccagcaacuuccgggugcagcccacugagagcaucgugcgguuccccaacauuaccaaccugugucccuucggcgagguguucaacgccacccgguucgccagcguguacgccuggaaccggaagcggaucagcaacugcguggccgacuacagcgugcuguacaacagcgccagcuucagcaccuucaagugcuacggcgugagcccuaccaagcugaacgaccugugcuucaccaacguguacgcugacagcuucgugauccggggcgacgaggugcggcagaucgcccccggccagaccggcaagaucgccgacuacaacuacaagcugcccgacgacuucaccggcugcgugaucgccuggaacagcaacaaccuggacagcaaggugggcggcaacuacaacuaccuguaccggcuguuccguaagagcaaccugaagccauucgagcgggacaucagcaccgagaucuaccaggccggcagcacccccugcaacgguguggagggcuuuaacugcuacuucccccugcagagcuacggcuuccagcccaccaacggcgugggcuaccagcccuaccgggugguggugcugagcuucgagcugcugcacgcccccgccaccgugugcggcccuaaaaagagcaccaaccuggugaagaacaagugcgugaacuucaauuucaacggccugaccggcaccggcgugcugaccgagagcaacaagaaguuccugcccuuccagcaguucggccgggauaucgccgacaccaccgacgcagugcgggacccccagacccuggagauccuggacaucaccccaugcagcuucggcggcgugagcgucaucacccccggcacaaacaccagcaaccagguggccgugcuguaccaggacgugaacugcaccgaggugcccguggccauccacgccgaccagcugacccccaccuggcggguguacagcaccggaagcaacguguuccagacccgggccggcugccugaucggcgccgagcacgugaacaacuccuacgagugcgacauccccaucggcgcuggcaucugcgccagcuaccagacccagaccaacagcccccggcgggcccggagcguggccagccagagcaucaucgccuacaccaugagcuuaggcgccgagaacagcguggccuacagcaacaacagcaucgcgaucccuaccaacuucaccaucagcgugaccaccgagauacugcccgugagcaugaccaagaccagcguggacuguaccauguacaucugcggcgacagcaccgagugcagcaaccugcugcugcaguacggcagcuucugcacccagcugaaccgggcccugaccggcaucgccguggagcaggacaagaacacccaagagguguucgcccaggugaagcagaucuacaagacucccccaaucaaggacuucggcggcuucaacuucagccagauccugcccgaccccagcaagcccagcaagcggagcuucaucgaggaccugcuguucaacaaggugacccuggccgacgccggcuucaucaagcaguacggcgauugccugggcgacaucgccgcucgggaccugaucugcgcccagaaguucaacgggcugaccgugcugcccccucugcugaccgacgagaugaucgcccaguacaccagcgcccugcuugccggcaccaucaccagcggcuggaccuucggcgccggcgcagcccugcagauccccuucgccaugcagauggccuaccgguucaacggcaucggcgugacccagaacgugcuguacgagaaccagaagcugaucgccaaccaguucaacagcgccaucggcaagauccaggacagccugagcagcaccgccagcgcccugggcaagcugcaggacguggugaaccagaacgcucaggcccugaacacccuggugaagcagcugagcagcaacuucggcgccaucagcucagugcugaaugacauccugagcaggcuggacaagguggaggccgaggugcagaucgaccggcugaucaccggccggcugcagagccugcagaccuacgugacccagcagcugauccgggccgccgagauccgggccagcgccaaccuggcagccaccaagaugagcgagugcgugcugggccagagcaagcggguggacuuuugcggcaagggcuaccaccugaugagcuucccccagagcgccccacacggcgugguguuccuccacgucacauacgugcccgcccaggagaagaacuucaccaccgcccccgccauuugccacgacggcaaggcucacuucccccgggagggcguguucgugagcaacggaacccacugguucgugacccagcggaacuucuacgagccccagaucaucaccaccgacaacaccuucgugagcggcaacugcgacguggugaucggcaucgugaacaacaccguguacgacccccugcagccugagcuggacagcuucaaggaggagcuggacaaguacuucaagaaccacaccagccccgauguggaccugggcgacaucagcggcaucaacgccagcguggugaacauccagaaggagaucgaccggcugaacgagguggccaagaaccugaacgagagccugaucgaccugcaggagcugggcaaguacgagcaguacaucaaguggcccugguacaucuggcugggcuucaucgccggccugaucgccaucgugauggugaccaucaugcugugcugcaugaccagcugcuguagcugccugaagggcugcugcagcugcggcagcugcugcaaguucgacgaggacgacagcgagccagugcugaagggcgugaagcugcacuacaccugaggacuaguguccaccugucccuccugggcugcuggauugucucguuuuccugccaaauaaacaggaucagcgcuuuacagaucucaaaggcucuuuucagagccaccaaaaaaaaaaaaaaaaaaaaaaaaaaaaaaaaaaaaaaaaaaaaaaaaaaaaaaaaaaaaaaaaaaaaaaaaaaaaaaaaaaaaaaaaaaaaaaaaaaaaa

SEQ ID NO: 23904 - RNA, 4129 nt, Artificial Sequence
  SARS-CoV-2/Wuhan/WIV05/2019__EPI_ISL_402128 spike protein mRNA gc (1-1273)(D614G)
aggagacccgugacccggaaguuguacggcuacgcgacuuucccucccacaaacccucgcgcccuuccuuuccuacuugggcccggcagaaagcuuaccauguucguguuccuggugcugcugccccuggugagcagccagugcgugaaccugaccacccggacccagcugcccccugccuacaccaacagcuucacccggggcguguacuaccccgacaagguguuccggagcagcgugcugcacagcacccaggaccuguuccugcccuucuucagcaacgugaccugguuccacgccauccacgugagcggcaccaacggcaccaagcgguucgacaacccagugcugcccuucaacgacggcguguacuucgccagcaccgagaagucaaacaucauccggggcuggaucuucggcaccacccuggacagcaagacacagagccugcugaucgugaacaacgccaccaacguggugaucaaggugugcgaguuucaguucugcaacgaccccuuccugggcguguacuaccacaagaacaacaagagcuggauggagagcgaguuccgggucuacagcagcgcuaacaauugcaccuucgaguacgugagccagcccuuccugauggaccucgagggcaagcagggcaacuucaagaaccugcgggaguucguguucaagaacaucgauggcuacuucaagaucuacagcaagcacacccccaucaaccuggugcgggaccugccccagggauucagcgcccuggagccucugguggaccugcccaucggcaucaacaucaccagguuccagacccugcuggcccugcaccggagcuaccugacccccggcgacagcagcagcggcuggaccgccggcgccgccgcauacuacgugggcuaccugcagccacggaccuuccugcugaaguacaacgagaacggcaccaucaccgacgccguggacugcgcccuggacccccugagcgagaccaagugcacccuaaagagcuucaccguggagaagggcaucuaccagaccagcaacuuccgggugcagcccacugagagcaucgugcgguuccccaacauuaccaaccugugucccuucggcgagguguucaacgccacccgguucgccagcguguacgccuggaaccggaagcggaucagcaacugcguggccgacuacagcgugcuguacaacagcgccagcuucagcaccuucaagugcuacggcgugagcccuaccaagcugaacgaccugugcuucaccaacguguacgcugacagcuucgugauccggggcgacgaggugcggcagaucgcccccggccagaccggcaagaucgccgacuacaacuacaagcugcccgacgacuucaccggcugcgugaucgccuggaacagcaacaaccuggacagcaaggugggcggcaacuacaacuaccuguaccggcuguuccguaagagcaaccugaagccauucgagcgggacaucagcaccgagaucuaccaggccggcagcacccccugcaacgguguggagggcuuuaacugcuacuucccccugcagagcuacggcuuccagcccaccaacggcgugggcuaccagcccuaccgggugguggugcugagcuucgagcugcugcacgcccccgccaccgugugcggcccuaaaaagagcaccaaccuggugaagaacaagugcgugaacuucaauuucaacggccugaccggcaccggcgugcugaccgagagcaacaagaaguuccugcccuuccagcaguucggccgggauaucgccgacaccaccgacgcagugcgggacccccagacccuggagauccuggacaucaccccaugcagcuucggcggcgugagcgucaucacccccggcacaaacaccagcaaccagguggccgugcuguaccagggagugaacugcaccgaggugcccguggccauccacgccgaccagcugacccccaccuggcggguguacagcaccggcagcaacguguuccagacccgggccggcugccugaucggcgccgagcacgugaacaacuccuacgagugcgacauccccaucggcgcuggcaucugcgccagcuaccagacccagaccaacagcccccggcgggcccggagcguggccagccagagcaucaucgccuacaccaugagcuuaggcgccgagaacagcguggccuacagcaacaacagcaucgcgaucccuaccaacuucaccaucagcgugaccaccgagauacugcccgugagcaugaccaagaccagcguggacuguaccauguacaucugcggcgacagcaccgagugcagcaaccugcugcugcaguacggcagcuucugcacccagcugaaccgggcccugaccggcaucgccguggagcaggacaagaacacccaagagguguucgcccaggugaagcagaucuacaagacucccccaaucaaggacuucggcggcuucaacuucagccagauccugcccgaccccagcaagcccagcaagcggagcuucaucgaggaccugcuguucaacaaggugacccuggccgacgccggcuucaucaagcaguacggcgacugccugggggauaucgccgcucgggaccugaucugcgcccagaaguucaacggccugaccgugcugcccccucugcugaccgacgagaugaucgcccaguacaccagcgcccugcuugccggcaccaucaccagcggcuggaccuucggcgccggcgcagcccugcagauccccuucgccaugcagauggccuaccgguucaacggcaucggcgugacccagaacgugcuguacgagaaccagaagcugaucgccaaccaguucaacagcgccaucggcaagauccaggacagccugagcagcaccgccagcgcccugggcaagcugcaggacguggugaaccagaacgcucaggcccugaacacccuggugaagcagcugagcagcaacuucggcgccaucagcucagugcugaaugacauccugagcaggcuggacaagguggaggccgaggugcagaucgaccggcugaucaccggccggcugcagagccugcagaccuacgugacccagcagcugauccgggccgccgagauccgggccagcgccaaccuggcagccaccaagaugagcgagugcgugcugggccagagcaagcggguggacuuuugcggcaagggcuaccaccugaugagcuucccccagagcgccccacacggcgugguguuccuccacgucacauacgugcccgcccaggagaagaacuucaccaccgcccccgccauuugccacgacggcaaggcucacuucccccgggagggaguguucgugagcaacggcacccacugguucgugacccagcggaacuucuacgagccccagaucaucaccaccgacaacaccuucgugagcggcaacugcgacguggugaucggcaucgugaacaacaccguguacgacccccugcagccugagcuggacagcuucaaggaggagcuggacaaguacuucaagaaccacaccagccccgacguggaucugggcgacaucagcggcaucaacgccagcguggugaacauccagaaggagaucgaccggcugaacgagguggccaagaaccugaacgagagccugaucgaccugcaggagcugggcaaguacgagcaguacaucaaguggcccugguacaucuggcugggcuucaucgccggccugaucgccaucgugauggugaccaucaugcugugcugcaugaccagcugcuguagcugccugaagggcugcugcagcugcggcagcugcugcaaguucgacgaggacgacagcgagccagugcugaagggcgugaagcugcacuacaccugaggacuaguguccaccugucccuccugggcugcuggauugucucguuuuccugccaaauaaacaggaucagcgcuuuacagaucucaaaggcucuuuucagagccaccaaaaaaaaaaaaaaaaaaaaaaaaaaaaaaaaaaaaaaaaaaaaaaaaaaaaaaaaaaaaaaaaaaaaaaaaaaaaaaaaaaaaaaaaaaaaaaaaaaaaa

SEQ ID NO: 23905 - RNA, 4129 nt, Artificial Sequence
  SARS-CoV-2/Wuhan/WIV05/2019__EPI_ISL_402128 spike protein mRNA gc (1-1273)(A222V_D614G)
aggagacccgugacccggaaguuguacggcuacgcgacuuucccucccacaaacccucgcgcccuuccuuuccuacuugggcccggcagaaagcuuaccauguucguguuccuggugcugcugccccuggugagcagccagugcgugaaccugaccacccggacccagcugcccccugccuacaccaacagcuucacccggggcguguacuaccccgacaagguguuccggagcagcgugcugcacagcacccaggaccuguuccugcccuucuucagcaacgugaccugguuccacgccauccacgugagcggcaccaacggcaccaagcgguucgacaacccagugcugcccuucaacgacggcguguacuucgccagcaccgagaagucaaacaucauccggggcuggaucuucggcaccacccuggacagcaagacacagagccugcugaucgugaacaacgccaccaacguggugaucaaggugugcgaguuucaguucugcaacgaccccuuccugggcguguacuaccacaagaacaacaagagcuggauggagagcgaguuccgggucuacagcagcgcuaacaauugcaccuucgaguacgugagccagcccuuccugauggaccucgagggcaagcagggcaacuucaagaaccugcgggaguucguguucaagaacaucgauggcuacuucaagaucuacagcaagcacacccccaucaaccuggugcgggaccugccccagggauucagcgugcuggagccucugguggaccugcccaucggcaucaacaucaccagguuccagacccugcuggcccugcaccggagcuaccugacccccggcgacagcagcagcggcuggaccgccggcgccgccgccuacuacgugggcuaccugcagccacggaccuuccugcugaaguacaacgagaacggcaccaucaccgacgcaguggacugcgcccuggacccccugagcgagaccaagugcacccuaaagagcuucaccguggagaagggcaucuaccagaccagcaacuuccgggugcagcccacugagagcaucgugcgguuccccaacauuaccaaccugugucccuucggcgagguguucaacgccacccgguucgccagcguguacgccuggaaccggaagcggaucagcaacugcguggccgacuacagcgugcuguacaacagcgccagcuucagcaccuucaagugcuacggcgugagcccuaccaagcugaacgaccugugcuucaccaacguguacgccgacagcuucgugauccggggcgacgaggugcggcagaucgcucccggccagaccggcaagaucgccgacuacaacuacaagcugcccgacgacuucaccggcugcgugaucgccuggaacagcaacaaccuggacagcaaggugggcggcaacuacaacuaccuguaccggcuguuccguaagagcaaccugaagccauucgagcgggacaucagcaccgagaucuaccaggccggcagcacccccugcaacgguguggagggcuuuaacugcuacuucccccugcagagcuacggcuuccagcccaccaacggcgugggcuaccagcccuaccgggugguggugcugagcuucgagcugcugcacgcccccgccaccgugugcggcccuaaaaagagcaccaaccuggugaagaacaagugcgugaacuucaauuucaacggccugaccggcaccggcgugcugaccgagagcaacaagaaguuccugcccuuccagcaguucggccgggauaucgccgacaccaccgacgccgugcgggacccccagacccuggagauccuggacaucaccccaugcagcuucggcggcgucagcgugaucacccccggcacaaacaccagcaaccagguggcagugcuguaccagggagugaacugcaccgaggugcccguggccauccacgccgaccagcugacccccaccuggcggguguacagcaccggcagcaacguguuccagacccgggccggcugccugaucggcgccgagcacgugaacaacuccuacgagugcgacauccccaucggcgccggcaucugcgcuagcuaccagacccagaccaacagcccccggcgggcccggagcguggccagccagagcaucaucgccuacaccaugagcuuaggcgccgagaacagcguggccuacagcaacaacagcaucgccaucccuaccaacuucaccaucagcgugaccaccgagauacugcccgugagcaugaccaagaccagcguggacuguaccauguacaucugcggcgacagcaccgagugcagcaaccugcugcugcaguacggcagcuucugcacccagcugaaccgggcgcugaccggcaucgccguggagcaggacaagaacacccaagagguguucgcccaggugaagcagaucuacaagacucccccaaucaaggacuucggcggcuucaacuucagccagauccugcccgaccccagcaagcccagcaagcggagcuucaucgaggaccugcuguucaacaaggugacccuggccgacgccggcuucaucaagcaguacggcgacugccugggggauaucgccgcccgggaccugaucugcgcucagaaguucaacggccugaccgugcugcccccucugcugaccgacgagaugaucgcccaguacaccagcgcccugcuugccggcaccaucaccagcggcuggaccuucggcgccggcgccgcacugcagauccccuucgccaugcagauggccuaccgguucaacggcaucggcgugacccagaacgugcuguacgagaaccagaagcugaucgccaaccaguucaacagcgccaucggcaagauccaggacagccugagcagcaccgccagcgcccugggcaagcugcaggacguggugaaccagaacgcccaggcucugaacacccuggugaagcagcugagcagcaacuucggcgccaucagcucagugcugaaugacauccugagcaggcuggacaagguggaggccgaggugcagaucgaccggcugaucaccggccggcugcagagccugcagaccuacgugacccagcagcugauccgggccgccgagauccgggccagcgccaaccuggccgcaaccaagaugagcgagugcgugcugggccagagcaagcggguggacuuuugcggcaagggcuaccaccugaugagcuucccccagagcgccccacacggcguggucuuccuccacgugacauacgugcccgcccaggagaagaacuucaccaccgcccccgccauuugccacgacggcaaggcccacuucccccgggagggaguguucgugagcaacggcacccacugguucgugacccagcggaacuucuacgagccccagaucaucaccaccgacaacaccuucgugagcggcaacugcgacguggugaucggcaucgugaacaacaccguguacgacccccugcagccugagcuggacagcuucaaggaggagcuggacaaguacuucaagaaccacaccagccccgacguggaucugggcgacaucagcggcaucaacgcuagcguggugaacauccagaaggagaucgaccggcugaacgagguggccaagaaccugaacgagagccugaucgaccugcaggagcugggcaaguacgagcaguacaucaaguggcccugguacaucuggcugggcuucaucgccggccugaucgccaucgugauggugaccaucaugcugugcugcaugaccagcugcuguagcugccugaagggcugcugcagcugcggcagcugcugcaaguucgacgaggacgacagcgagccagugcugaagggcgugaagcugcacuacaccugaggacuaguguccaccugucccuccugggcugcuggauugucucguuuuccugccaaauaaacaggaucagcgcuuuacagaucucaaaggcucuuuucagagccaccaaaaaaaaaaaaaaaaaaaaaaaaaaaaaaaaaaaaaaaaaaaaaaaaaaaaaaaaaaaaaaaaaaaaaaaaaaaaaaaaaaaaaaaaaaaaaaaaaaaaa

SEQ ID NO: 23906 - RNA, 4129 nt, Artificial Sequence
  SARS-CoV-2/Wuhan/WIV05/2019__EPI_ISL_402128 spike protein mRNA gc (1-1273)(N439K_D614G)
aggagacccgugacccggaaguuguacggcuacgcgacuuucccucccacaaacccucgcgcccuuccuuuccuacuugggcccggcagaaagcuuaccauguucguguuccuggugcugcugccccuggugagcagccagugcgugaaccugaccacccggacccagcugcccccugccuacaccaacagcuucacccggggcguguacuaccccgacaagguguuccggagcagcgugcugcacagcacccaggaccuguuccugcccuucuucagcaacgugaccugguuccacgccauccacgugagcggcaccaacggcaccaagcgguucgacaacccagugcugcccuucaacgacggcguguacuucgccagcaccgagaagucaaacaucauccggggcuggaucuucggcaccacccuggacagcaagacacagagccugcugaucgugaacaacgccaccaacguggugaucaaggugugcgaguuucaguucugcaacgaccccuuccugggcguguacuaccacaagaacaacaagagcuggauggagagcgaguuccgggucuacagcagcgcuaacaauugcaccuucgaguacgugagccagcccuuccugauggaccucgagggcaagcagggcaacuucaagaaccugcgggaguucguguucaagaacaucgauggcuacuucaagaucuacagcaagcacacccccaucaaccuggugcgggaccugccccagggauucagcgcccuggagccucugguggaccugcccaucggcaucaacaucaccagguuccagacccugcuggcccugcaccggagcuaccugacccccggcgacagcagcagcggcuggaccgccggcgccgccgcauacuacgugggcuaccugcagccacggaccuuccugcugaaguacaacgagaacggcaccaucaccgacgccguggacugcgcccuggacccccugagcgagaccaagugcacccuaaagagcuucaccguggagaagggcaucuaccagaccagcaacuuccgggugcagcccacugagagcaucgugcgguuccccaacauuaccaaccugugucccuucggcgagguguucaacgccacccgguucgccagcguguacgccuggaaccggaagcggaucagcaacugcguggccgacuacagcgugcuguacaacagcgccagcuucagcaccuucaagugcuacggcgugagcccuaccaagcugaacgaccugugcuucaccaacguguacgcugacagcuucgugauccggggcgacgaggugcggcagaucgcccccggccagaccggcaagaucgccgacuacaacuacaagcugcccgacgacuucaccggcugcgugaucgccuggaacagcaagaaccuggacagcaaggugggcggcaacuacaacuaccuguaccggcuguuccguaagagcaaccugaagccauucgagcgggacaucagcaccgagaucuaccaggccggcagcacccccugcaacgguguggagggcuuuaacugcuacuucccccugcagagcuacggcuuccagcccaccaacggcgugggcuaccagcccuaccgggugguggugcugagcuucgagcugcugcacgcccccgccaccgugugcggcccuaaaaagagcaccaaccuggugaagaacaagugcgugaacuucaacuucaauggccugaccggcaccggcgugcugaccgagagcaacaagaaguuccugcccuuccagcaguucggccgggauaucgccgacaccaccgacgcagugcgggacccccagacccuggagauccuggacaucaccccaugcagcuucggcggcgugagcgucaucacccccggcacaaacaccagcaaccagguggccgugcuguaccagggagugaacugcaccgaggugcccguggccauccacgccgaccagcugacccccaccuggcggguguacagcaccggcagcaacguguuccagacccgggccggcugccugaucggcgccgagcacgugaacaacuccuacgagugcgacauccccaucggcgcuggcaucugcgccagcuaccagacccagaccaacagcccccggcgggcccggagcguggccagccagagcaucaucgccuacaccaugagcuuaggcgccgagaacagcguggccuacagcaacaacagcaucgcgaucccuaccaacuucaccaucagcgugaccaccgagauacugcccgugagcaugaccaagaccagcguggacuguaccauguacaucugcggcgacagcaccgagugcagcaaccugcugcugcaguacggcagcuucugcacccagcugaaccgggcccugaccggcaucgccguggagcaggacaagaacacccaagagguguucgcccaggugaagcagaucuacaagacucccccaaucaaggacuucggcggcuucaacuucagccagauccugcccgaccccagcaagcccagcaagcggagcuucaucgaggaccugcuguucaacaaggugacccuggccgacgccggcuucaucaagcaguacggcgacugccugggggauaucgccgcucgggaccugaucugcgcccagaaguucaacggccugaccgugcugcccccucugcugaccgacgagaugaucgcccaguacaccagcgcccugcuugccggcaccaucaccagcggcuggaccuucggcgccggcgcagcccugcagauccccuucgccaugcagauggccuaccgguucaacggcaucggcgugacccagaacgugcuguacgagaaccagaagcugaucgccaaccaguucaacagcgccaucggcaagauccaggacagccugagcagcaccgccagcgcccugggcaagcugcaggacguggugaaccagaacgcucaggcccugaacacccuggugaagcagcugagcagcaacuucggcgccaucagcucagugcugaacgacauccugagcaggcuggacaagguggaggccgaggugcagaucgaccggcugaucaccggccggcugcagagccugcagaccuacgugacccagcagcugauccgggccgccgagauccgggccagcgccaaucuggcagccaccaagaugagcgagugcgugcugggccagagcaagcggguggacuuuugcggcaagggcuaccaccugaugagcuucccccagagcgccccacacggcgugguguuccuccacgucacauacgugcccgcccaggagaagaacuucaccaccgcccccgccauuugccacgacggcaaggcucacuucccccgggagggaguguucgugagcaacggcacccacugguucgugacccagcggaacuucuacgagccccagaucaucaccaccgacaacaccuucgugagcggcaacugcgacguggugaucggcaucgugaacaacaccguguacgacccccugcagccugagcuggacagcuucaaggaggagcuggacaaguacuucaagaaccacaccagccccgacguggaucugggcgacaucagcggcaucaacgccagcguggugaacauccagaaggagaucgaccggcugaacgagguggccaagaaccugaacgagagccugaucgaccugcaggagcugggcaaguacgagcaguacaucaaguggcccugguacaucuggcugggcuucaucgccggccugaucgccaucgugauggugaccaucaugcugugcugcaugaccagcugcuguagcugccugaagggcugcugcagcugcggcagcugcugcaaguucgacgaggacgacagcgagccagugcugaagggcgugaagcugcacuacaccugaggacuaguguccaccugucccuccugggcugcuggauugucucguuuuccugccaaauaaacaggaucagcgcuuuacagaucucaaaggcucuuuucagagccaccaaaaaaaaaaaaaaaaaaaaaaaaaaaaaaaaaaaaaaaaaaaaaaaaaaaaaaaaaaaaaaaaaaaaaaaaaaaaaaaaaaaaaaaaaaaaaaaaaaaaa

SEQ ID NO: 23907 - RNA, 4129 nt, Artificial Sequence
  SARS-CoV-2/Wuhan/WIV05/2019__EPI_ISL_402128 spike protein mRNA gc (1-1273)(S477N_D614G)
aggagacccgugacccggaaguuguacggcuacgcgacuuucccucccacaaacccucgcgcccuuccuuuccuacuugggcccggcagaaagcuuaccauguucguguuccuggugcugcugccccuggugagcagccagugcgugaaccugaccacccggacccagcugcccccugccuacaccaacagcuucacccggggcguguacuaccccgacaagguguuccggagcagcgugcugcacagcacccaggaccuguuccugcccuucuucagcaacgugaccugguuccacgccauccacgugagcggcaccaacggcaccaagcgguucgacaacccagugcugcccuucaacgacggcguguacuucgccagcaccgagaagucaaacaucauccggggcuggaucuucggcaccacccuggacagcaagacacagagccugcugaucgugaacaacgccaccaacguggugaucaaggugugcgaguuucaguucugcaacgaccccuuccugggcguguacuaccacaagaacaacaagagcuggauggagagcgaguuccgggucuacagcagcgcuaacaauugcaccuucgaguacgugagccagcccuuccugauggaccucgagggcaagcagggcaacuucaagaaccugcgggaguucguguucaagaacaucgauggcuacuucaagaucuacagcaagcacacccccaucaaccuggugcgggaccugccccagggauucagcgcccuggagccucugguggaccugcccaucggcaucaacaucaccagguuccagacccugcuggcccugcaccggagcuaccugacccccggcgacagcagcagcggcuggaccgccggcgccgccgcauacuacgugggcuaccugcagccacggaccuuccugcugaaguacaacgagaacggcaccaucaccgacgccguggacugcgcccuggacccccugagcgagaccaagugcacccuaaagagcuucaccguggagaagggcaucuaccagaccagcaacuuccgggugcagcccacugagagcaucgugcgguuccccaacauuaccaaccugugucccuucggcgagguguucaacgccacccgguucgccagcguguacgccuggaaccggaagcggaucagcaacugcguggccgacuacagcgugcuguacaacagcgccagcuucagcaccuucaagugcuacggcgugagcccuaccaagcugaacgaccugugcuucaccaacguguacgcugacagcuucgugauccggggcgacgaggugcggcagaucgcccccggccagaccggcaagaucgccgacuacaacuacaagcugcccgacgacuucaccggcugcgugaucgccuggaacagcaacaaccuggacagcaaggugggcggcaacuacaacuaccuguaccggcuguuccguaagagcaaccugaagccauucgagcgggacaucagcaccgagaucuaccaggccggcaacacccccugcaacgguguggagggcuuuaacugcuacuucccccugcagagcuacggcuuccagcccaccaacggcgugggcuaccagcccuaccgggugguggugcugagcuucgagcugcugcacgcccccgccaccgugugcggcccuaaaaagagcaccaaccuggugaagaacaagugcgugaauuucaacuucaacggccugaccggcaccggcgugcugaccgagagcaacaagaaguuccugcccuuccagcaguucggccgggauaucgccgacaccaccgacgcagugcgggacccccagacccuggagauccuggacaucaccccaugcagcuucggcggcgugagcgucaucacccccggcacaaacaccagcaaccagguggccgugcuguaccagggagugaacugcaccgaggugcccguggccauccacgccgaccagcugacccccaccuggcggguguacagcaccggcagcaacguguuccagacccgggccggcugccugaucggcgccgagcacgugaacaacagcuacgagugcgacauccccaucggcgcuggcaucugcgccuccuaccagacccagaccaacagcccccggcgggcccggagcguggccagccagagcaucaucgccuacaccaugagcuuaggcgccgagaacagcguggccuacagcaacaacagcaucgcgaucccuaccaacuucaccaucagcgugaccaccgagauacugcccgugagcaugaccaagaccagcguggacuguaccauguacaucugcggcgacagcaccgagugcagcaaccugcugcugcaguacggcagcuucugcacccagcugaaccgggcccugaccggcaucgccguggagcaggacaagaacacccaagagguguucgcccaggugaagcagaucuacaagacucccccaaucaaggacuucggcggcuucaacuucagccagauccugcccgaccccagcaagcccagcaagcggagcuucaucgaggaccugcuguucaacaaggugacccuggccgacgccggcuucaucaagcaguacggcgacugccugggggauaucgccgcucgggaccugaucugcgcccagaaguucaacggccugaccgugcugcccccucugcugaccgacgagaugaucgcccaguacaccagcgcccugcuugccggcaccaucaccagcggcuggaccuucggcgccggcgcagcccugcagauccccuucgccaugcagauggccuaccgguucaacggcaucggcgugacccagaacgugcuguacgagaaccagaagcugaucgccaaccaguucaacagcgccaucggcaagauccaggacagccugagcagcaccgccagcgcccugggcaagcugcaggacguggugaaccagaacgcucaggcccugaacacccuggugaagcagcugagcagcaauuucggcgccaucagcagcgugcugaacgacauccugucaaggcuggacaagguggaggccgaggugcagaucgaccggcugaucaccggccggcugcagagccugcagaccuacgugacccagcagcugauccgggccgccgagauccgggccagcgccaaccuggcagccaccaagaugagcgagugcgugcugggccagagcaagcggguggacuuuugcggcaagggcuaccaccugaugagcuucccccagagcgccccacacggcgugguguuccuccacgucacauacgugcccgcccaggagaagaacuucaccaccgcccccgccauuugccacgacggcaaggcucacuucccccgggagggaguguucgugagcaacggcacccacugguucgugacccagcggaacuucuacgagccccagaucaucaccaccgacaacaccuucgugagcggcaacugcgacguggugaucggcaucgugaacaacaccguguacgacccccugcagccugagcuggacagcuucaaggaggagcuggacaaguacuucaagaaccacaccagccccgacguggaucugggcgacaucagcggcaucaacgccagcguggugaacauccagaaggagaucgaccggcugaacgagguggccaagaaccugaacgagagccugaucgaccugcaggagcugggcaaguacgagcaguacaucaaguggcccugguacaucuggcugggcuucaucgccggccugaucgccaucgugauggugaccaucaugcugugcugcaugaccagcugcuguagcugccugaagggcugcugcagcugcggcagcugcugcaaguucgacgaggacgacagcgagccagugcugaagggcgugaagcugcacuacaccugaggacuaguguccaccugucccuccugggcugcuggauugucucguuuuccugccaaauaaacaggaucagcgcuuuacagaucucaaaggcucuuuucagagccaccaaaaaaaaaaaaaaaaaaaaaaaaaaaaaaaaaaaaaaaaaaaaaaaaaaaaaaaaaaaaaaaaaaaaaaaaaaaaaaaaaaaaaaaaaaaaaaaaaaaaa

SEQ ID NO: 23908 - RNA, 4129 nt, Artificial Sequence
  SARS-CoV-2/Wuhan/WIV05/2019__EPI_ISL_402128 spike protein mRNA gc (1-1273)(N501Y_D614G)
aggagacccgugacccggaaguuguacggcuacgcgacuuucccucccacaaacccucgcgcccuuccuuuccuacuugggcccggcagaaagcuuaccauguucguguuccuggugcugcugccccuggugagcagccagugcgugaaccugaccacccggacccagcugcccccugccuacaccaacagcuucacccggggcguguacuaccccgacaagguguuccggagcagcgugcugcacagcacccaggaccuguuccugcccuucuucagcaacgugaccugguuccacgccauccacgugagcggcaccaacggcaccaagcgguucgacaacccagugcugcccuucaacgacggcguguacuucgccagcaccgagaagucaaacaucauccggggcuggaucuucggcaccacccuggacagcaagacacagagccugcugaucgugaacaacgccaccaacguggugaucaaggugugcgaguuucaguucugcaacgaccccuuccugggcguguacuaccacaagaacaacaagagcuggauggagagcgaguuccgggucuacagcagcgcuaacaauugcaccuucgaguacgugagccagcccuuccugauggaccucgagggcaagcagggcaacuucaagaaccugcgggaguucguguucaagaacaucgauggcuacuucaagaucuacagcaagcacacccccaucaaccuggugcgggaccugccccagggauucagcgcccuggagccucugguggaccugcccaucggcaucaacaucaccagguuccagacccugcuggcccugcaccggagcuaccugacccccggcgacagcagcagcggcuggaccgccggcgccgccgcauacuacgugggcuaccugcagccacggaccuuccugcugaaguacaacgagaacggcaccaucaccgacgccguggacugcgcccuggacccccugagcgagaccaagugcacccuaaagagcuucaccguggagaagggcaucuaccagaccagcaacuuccgggugcagcccacugagagcaucgugcgguuccccaacauuaccaaccugugucccuucggcgagguguucaacgccacccgguucgccagcguguacgccuggaaccggaagcggaucagcaacugcguggccgacuacagcgugcuguacaacagcgccagcuucagcaccuucaagugcuacggcgugagcccuaccaagcugaacgaccugugcuucaccaacguguacgcugacagcuucgugauccggggcgacgaggugcggcagaucgcccccggccagaccggcaagaucgccgacuacaacuacaagcugcccgacgacuucaccggcugcgugaucgccuggaacagcaacaaccuggacagcaaggugggcggcaacuacaacuaccuguaccggcuguuccguaagagcaaccugaagccauucgagcgggacaucagcaccgagaucuaccaggccggcagcacccccugcaacgguguggagggcuuuaacugcuacuucccccugcagagcuacggcuuccagcccaccuacggcgugggcuaccagcccuaccgggugguggugcugagcuucgagcugcugcacgcccccgccaccgugugcggcccuaaaaagagcaccaaccuggugaagaacaagugcgugaacuucaacuucaauggccugaccggcaccggcgugcugaccgagagcaacaagaaguuccugcccuuccagcaguucggccgggauaucgccgacaccaccgacgcagugcgggacccccagacccuggagauccuggacaucaccccaugcagcuucggcggcgugagcgucaucacccccggcacaaacaccagcaaccagguggccgugcuguaccagggagugaacugcaccgaggugcccguggccauccacgccgaccagcugacccccaccuggcggguguacagcaccggcagcaacguguuccagacccgggccggcugccugaucggcgccgagcacgugaacaacuccuacgagugcgacauccccaucggcgcuggcaucugcgccagcuaccagacccagaccaacagcccccggcgggcccggagcguggccagccagagcaucaucgccuacaccaugagcuuaggcgccgagaacagcguggccuacagcaacaacagcaucgcgaucccuaccaacuucaccaucagcgugaccaccgagauacugcccgugagcaugaccaagaccagcguggacuguaccauguacaucugcggcgacagcaccgagugcagcaaccugcugcugcaguacggcagcuucugcacccagcugaaccgggcccugaccggcaucgccguggagcaggacaagaacacccaagagguguucgcccaggugaagcagaucuacaagacucccccaaucaaggacuucggcggcuucaacuucagccagauccugcccgaccccagcaagcccagcaagcggagcuucaucgaggaccugcuguucaacaaggugacccuggccgacgccggcuucaucaagcaguacggcgacugccugggggauaucgccgcucgggaccugaucugcgcccagaaguucaacggccugaccgugcugcccccucugcugaccgacgagaugaucgcccaguacaccagcgcccugcuugccggcaccaucaccagcggcuggaccuucggcgccggcgcagcccugcagauccccuucgccaugcagauggccuaccgguucaacggcaucggcgugacccagaacgugcuguacgagaaccagaagcugaucgccaaccaguucaacagcgccaucggcaagauccaggacagccugagcagcaccgccagcgcccugggcaagcugcaggacguggugaaccagaacgcucaggcccugaacacccuggugaagcagcugagcagcaacuucggcgccaucagcucagugcugaacgacauccugagcaggcuggacaagguggaggccgaggugcagaucgaccggcugaucaccggccggcugcagagccugcagaccuacgugacccagcagcugauccgggccgccgagauccgggccagcgccaaucuggcagccaccaagaugagcgagugcgugcugggccagagcaagcggguggacuuuugcggcaagggcuaccaccugaugagcuucccccagagcgccccacacggcgugguguuccuccacgucacauacgugcccgcccaggagaagaacuucaccaccgcccccgccauuugccacgacggcaaggcucacuucccccgggagggaguguucgugagcaacggcacccacugguucgugacccagcggaacuucuacgagccccagaucaucaccaccgacaacaccuucgugagcggcaacugcgacguggugaucggcaucgugaacaacaccguguacgacccccugcagccugagcuggacagcuucaaggaggagcuggacaaguacuucaagaaccacaccagccccgacguggaucugggcgacaucagcggcaucaacgccagcguggugaacauccagaaggagaucgaccggcugaacgagguggccaagaaccugaacgagagccugaucgaccugcaggagcugggcaaguacgagcaguacaucaaguggcccugguacaucuggcugggcuucaucgccggccugaucgccaucgugauggugaccaucaugcugugcugcaugaccagcugcuguagcugccugaagggcugcugcagcugcggcagcugcugcaaguucgacgaggacgacagcgagccagugcugaagggcgugaagcugcacuacaccugaggacuaguguccaccugucccuccugggcugcuggauugucucguuuuccugccaaauaaacaggaucagcgcuuuacagaucucaaaggcucuuuucagagccaccaaaaaaaaaaaaaaaaaaaaaaaaaaaaaaaaaaaaaaaaaaaaaaaaaaaaaaaaaaaaaaaaaaaaaaaaaaaaaaaaaaaaaaaaaaaaaaaaaaaaa

SEQ ID NO: 23909 - RNA, 4123 nt, Artificial Sequence
  SARS-CoV-2/Wuhan/WIV05/2019__EPI_ISL_402128 spike protein mRNA gc (1-1273)(H69del_V70del_D614G)
aggagacccgugacccggaaguuguacggcuacgcgacuuucccucccacaaacccucgcgcccuuccuuuccuacuugggcccggcagaaagcuuaccauguucguguuccuggugcugcugccccuggugagcagccagugcgugaaccugaccacccggacccagcugcccccugccuacaccaacagcuucacccggggcguguacuaccccgacaagguguuccggagcagcgugcugcacagcacccaggaccuguuccugcccuucuucagcaacgugaccugguuccacgccaucagcggcaccaacggcaccaagcgguucgacaacccagugcugcccuucaacgacggcguguacuucgccagcaccgagaagucaaacaucauccggggcuggaucuucggcaccacccuggacagcaagacacagagccugcugaucgugaacaacgccaccaacguggugaucaaggugugcgaguuucaguucugcaacgaccccuuccugggcguguacuaccacaagaacaacaagagcuggauggagagcgaguuccggguguacagcagcgcuaacaauugcaccuucgaguacgucagccagcccuuccugauggaccucgagggcaagcagggcaacuucaagaaccugcgggaguucguguucaagaacaucgauggcuacuucaagaucuacagcaagcacacccccaucaaccuggugcgggaccugccccagggauucagcgcccuggagccucugguggaccugcccaucggcaucaacaucaccagguuccagacccugcuggcccugcaccggagcuaccugacccccggcgacagcagcagcggcuggaccgccggcgccgccgcauacuacgugggcuaccugcagccacggaccuuccugcugaaguacaacgagaacggcaccaucaccgacgccguggacugcgcccuggacccccugagcgagaccaagugcacccuaaagagcuucaccguggagaagggcaucuaccagaccagcaacuuccgggugcagcccacugagagcaucgugcgguuccccaacauuaccaaccugugucccuucggcgagguguucaacgccacccgguucgccagcguguacgccuggaaccggaagcggaucagcaacugcguggccgacuacagcgugcuguacaacagcgccagcuucagcaccuucaagugcuacggcgugagcccuaccaagcugaacgaccugugcuucaccaacguguacgcugacagcuucgugauccggggcgacgaggugcggcagaucgcccccggccagaccggcaagaucgccgacuacaacuacaagcugcccgacgacuucaccggcugcgugaucgccuggaacagcaacaaccuggacagcaaggugggcggcaacuacaacuaccuguaccggcuguuccguaagagcaaccugaagccauucgagcgggacaucagcaccgagaucuaccaggccggcagcacccccugcaacgguguggagggcuuuaacugcuacuucccccugcagagcuacggcuuccagcccaccaacggcgugggcuaccagcccuaccgggugguggugcugagcuucgagcugcugcacgcccccgccaccgugugcggcccuaaaaagagcaccaaccuggugaagaacaagugcgugaacuucaauuucaacggccugaccggcaccggcgugcugaccgagagcaacaagaaguuccugcccuuccagcaguucggccgggauaucgccgacaccaccgacgcagugcgggacccccagacccuggagauccuggacaucaccccaugcagcuucggcggcgugagcgugaucacccccggcacaaacaccagcaaccaggucgccgugcuguaccagggagugaacugcaccgaggugcccguggccauccacgccgaccagcugacccccaccuggcggguguacagcaccggcagcaacguguuccagacccgggccggcugccugaucggcgccgagcacgugaacaacuccuacgagugcgacauccccaucggcgcuggcaucugcgccagcuaccagacccagaccaacagcccccggcgggcccggagcguggccagccagagcaucaucgccuacaccaugagcuuaggcgccgagaacagcguggccuacagcaacaacagcaucgcgaucccuaccaacuucaccaucagcgugaccaccgagauacugcccgugagcaugaccaagaccagcguggacuguaccauguacaucugcggcgacagcaccgagugcagcaaccugcugcugcaguacggcagcuucugcacccagcugaaccgggcccugaccggcaucgccguggagcaggacaagaacacccaagagguguucgcccaggugaagcagaucuacaagacucccccaaucaaggacuucggcggcuucaacuucagccagauccugcccgaccccagcaagcccagcaagcggagcuucaucgaggaccugcuguucaacaaggugacccuggccgacgccggcuucaucaagcaguacggcgacugccugggggauaucgccgcucgggaccugaucugcgcccagaaguucaacggccugaccgugcugcccccucugcugaccgacgagaugaucgcccaguacaccagcgcccugcuugccggcaccaucaccagcggcuggaccuucggcgccggcgcagcccugcagauccccuucgccaugcagauggccuaccgguucaacggcaucggcgugacccagaacgugcuguacgagaaccagaagcugaucgccaaccaguucaacagcgccaucggcaagauccaggacagccugagcagcaccgccagcgcccugggcaagcugcaggacguggugaaccagaacgcucaggcccugaacacccuggugaagcagcugagcagcaacuucggcgccaucagcucagugcugaaugacauccugagcaggcuggacaagguggaggccgaggugcagaucgaccggcugaucaccggccggcugcagagccugcagaccuacgugacccagcagcugauccgggccgccgagauccgggccagcgccaaccuggcagccaccaagaugagcgagugcgugcugggccagagcaagcggguggacuuuugcggcaagggcuaccaccugaugagcuucccccagagcgccccacacggcgugguguuccuccacgugacauacguccccgcccaggagaagaacuucaccaccgcccccgccauuugccacgacggcaaggcucacuucccccgggagggaguguucgugagcaacggcacccacugguucgugacccagcggaacuucuacgagccccagaucaucaccaccgacaacaccuucgugagcggcaacugcgacguggugaucggcaucgugaacaacaccguguacgacccccugcagccugagcuggacagcuucaaggaggagcuggacaaguacuucaagaaccacaccagccccgacguggaucugggcgacaucagcggcaucaacgccagcguggugaacauccagaaggagaucgaccggcugaacgagguggccaagaaccugaacgagagccugaucgaccugcaggagcugggcaaguacgagcaguacaucaaguggcccugguacaucuggcugggcuucaucgccggccugaucgccaucgugauggugaccaucaugcugugcugcaugaccagcugcuguagcugccugaagggcugcugcagcugcggcagcugcugcaaguucgacgaggacgacagcgagccagugcugaagggcgugaagcugcacuacaccugaggacuaguguccaccugucccuccugggcugcuggauugucucguuuuccugccaaauaaacaggaucagcgcuuuacagaucucaaaggcucuuuucagagccaccaaaaaaaaaaaaaaaaaaaaaaaaaaaaaaaaaaaaaaaaaaaaaaaaaaaaaaaaaaaaaaaaaaaaaaaaaaaaaaaaaaaaaaaaaaaaaaaaaaaaa

SEQ ID NO: 23910 - RNA, 4129 nt, Artificial Sequence
  SARS-CoV-2/Wuhan/WIV05/2019__EPI_ISL_402128 spike protein mRNA gc (1-1273)(Y453F_D614G)
aggagacccgugacccggaaguuguacggcuacgcgacuuucccucccacaaacccucgcgcccuuccuuuccuacuugggcccggcagaaagcuuaccauguucguguuccuggugcugcugccccuggugagcagccagugcgugaaccugaccacccggacccagcugcccccugccuacaccaacagcuucacccggggcguguacuaccccgacaagguguuccggagcagcgugcugcacagcacccaggaccuguuccugcccuucuucagcaacgugaccugguuccacgccauccacgugagcggcaccaacggcaccaagcgguucgacaacccagugcugcccuucaacgacggcguguacuucgccagcaccgagaagucaaacaucauccggggcuggaucuucggcaccacccuggacagcaagacacagagccugcugaucgugaacaacgccaccaacguggugaucaaggugugcgaguuucaguucugcaacgaccccuuccugggcguguacuaccacaagaacaacaagagcuggauggagagcgaguuccgggucuacagcagcgcuaacaauugcaccuucgaguacgugagccagcccuuccugauggaccucgagggcaagcagggcaacuucaagaaccugcgggaguucguguucaagaacaucgauggcuacuucaagaucuacagcaagcacacccccaucaaccuggugcgggaccugccccagggauucagcgcccuggagccucugguggaccugcccaucggcaucaacaucaccagguuccagacccugcuggcccugcaccggagcuaccugacccccggcgacagcagcagcggcuggaccgccggcgccgccgcauacuacgugggcuaccugcagccacggaccuuccugcugaaguacaacgagaacggcaccaucaccgacgccguggacugcgcccuggacccccugagcgagaccaagugcacccuaaagagcuucaccguggagaagggcaucuaccagaccagcaacuuccgggugcagcccacugagagcaucgugcgguuccccaacauuaccaaccugugucccuucggcgagguguucaacgccacccgguucgccagcguguacgccuggaaccggaagcggaucagcaacugcguggccgacuacagcgugcuguacaacagcgccagcuucagcaccuucaagugcuacggcgugagcccuaccaagcugaacgaccugugcuucaccaacguguacgcugacagcuucgugauccggggcgacgaggugcggcagaucgcccccggccagaccggcaagaucgccgacuacaacuacaagcugcccgacgacuucaccggcugcgugaucgccuggaacagcaacaaccuggacagcaaggugggcggcaacuacaacuaccuguuccggcuguuccguaagagcaaccugaagccauuugagcgggacaucagcaccgagaucuaccaggccggcagcacccccugcaacgguguggagggcuucaacugcuacuucccccugcagagcuacggcuuccagcccaccaacggcgugggcuaccagcccuaccgggugguggugcugagcuucgagcugcugcacgcccccgccaccgugugcggcccuaaaaagagcaccaaccuggugaagaacaagugcgugaacuucaauuucaacggccugaccggcaccggcgugcugaccgagagcaacaagaaguuccugcccuuccagcaguucggccgggauaucgccgacaccaccgacgcagugcgggacccccagacccuggagauccuggacaucaccccaugcagcuucggcggcgugagcgucaucacccccggcacaaacaccagcaaccagguggccgugcuguaccagggagugaacugcaccgaggugcccguggccauccacgccgaccagcugacccccaccuggcggguguacagcaccggcagcaacguguuccagacccgggccggcugccugaucggcgccgagcacgugaacaacuccuacgagugcgacauccccaucggcgcuggcaucugcgccagcuaccagacccagaccaacagcccccggcgggcccggagcguggccagccagagcaucaucgccuacaccaugagcuuaggcgccgagaacagcguggccuacagcaacaacagcaucgcgaucccuaccaacuucaccaucagcgugaccaccgagauacugcccgugagcaugaccaagaccagcguggacuguaccauguacaucugcggcgacagcaccgagugcagcaaccugcugcugcaguacggcagcuucugcacccagcugaaccgggcccugaccggcaucgccguggagcaggacaagaacacccaagagguguucgcccaggugaagcagaucuacaagacucccccaaucaaggacuucggcggcuucaacuucagccagauccugcccgaccccagcaagcccagcaagcggagcuucaucgaggaccugcuguucaacaaggugacccuggccgacgccggcuucaucaagcaguacggcgacugccugggggauaucgccgcucgggaccugaucugcgcccagaaguucaacggccugaccgugcugcccccucugcugaccgacgagaugaucgcccaguacaccagcgcccugcuugccggcaccaucaccagcggcuggaccuucggcgccggcgcagcccugcagauccccuucgccaugcagauggccuaccgguucaacggcaucggcgugacccagaacgugcuguacgagaaccagaagcugaucgccaaccaguucaacagcgccaucggcaagauccaggacagccugagcagcaccgccagcgcccugggcaagcugcaggacguggugaaccagaacgcucaggcccugaacacccuggugaagcagcugagcagcaacuuuggcgccaucagcucagugcugaaugacauccugagcaggcuggacaagguggaggccgaggugcagaucgaccggcugaucaccggccggcugcagagccugcagaccuacgugacccagcagcugauccgggccgccgagauccgggccagcgccaaccuggcagccaccaagaugagcgagugcgugcugggccagagcaagcggguggacuucugcggcaagggcuaccaccugaugagcuucccccagagcgccccacacggcgugguguuccuccacgucacauacgugcccgcccaggagaagaacuucaccaccgcccccgccauuugccacgacggcaaggcucacuucccccgggagggaguguucgugagcaacggcacccacugguucgugacccagcggaacuucuacgagccccagaucaucaccaccgacaacaccuucgugagcggcaacugcgacguggugaucggcaucgugaacaacaccguguacgacccccugcagccugagcuggacagcuucaaggaggagcuggacaaguacuucaagaaccacaccagccccgacguggaucugggcgacaucagcggcaucaacgccagcguggugaacauccagaaggagaucgaccggcugaacgagguggccaagaaccugaacgagagccugaucgaccugcaggagcugggcaaguacgagcaguacaucaaguggcccugguacaucuggcugggcuucaucgccggccugaucgccaucgugauggugaccaucaugcugugcugcaugaccagcugcuguagcugccugaagggcugcugcagcugcggcagcugcugcaaguucgacgaggacgacagcgagccagugcugaagggcgugaagcugcacuacaccugaggacuaguguccaccugucccuccugggcugcuggauugucucguuuuccugccaaauaaacaggaucagcgcuuuacagaucucaaaggcucuuuucagagccaccaaaaaaaaaaaaaaaaaaaaaaaaaaaaaaaaaaaaaaaaaaaaaaaaaaaaaaaaaaaaaaaaaaaaaaaaaaaaaaaaaaaaaaaaaaaaaaaaaaaaa

SEQ ID NO: 23911 - RNA, 4129 nt, Artificial Sequence
  SARS-CoV-2/Wuhan/WIV05/2019__EPI_ISL_402128 spike protein mRNA gc (1-1273)(D614G_I692V)
aggagacccgugacccggaaguuguacggcuacgcgacuuucccucccacaaacccucgcgcccuuccuuuccuacuugggcccggcagaaagcuuaccauguucguguuccuggugcugcugccccuggugagcagccagugcgugaaccugaccacccggacccagcugcccccugccuacaccaacagcuucacccggggcguguacuaccccgacaagguguuccggagcagcgugcugcacagcacccaggaccuguuccugcccuucuucagcaacgugaccugguuccacgccauccacgugagcggcaccaacggcaccaagcgguucgacaacccagugcugcccuucaacgacggcguguacuucgccagcaccgagaagucaaacaucauccggggcuggaucuucggcaccacccuggacagcaagacacagagccugcugaucgugaacaacgccaccaacguggugaucaaggugugcgaguuucaguucugcaacgaccccuuccugggcguguacuaccacaagaacaacaagagcuggauggagagcgaguuccgggucuacagcagcgcuaacaauugcaccuucgaguacgugagccagcccuuccugauggaccucgagggcaagcagggcaacuucaagaaccugcgggaguucguguucaagaacaucgauggcuacuucaagaucuacagcaagcacacccccaucaaccuggugcgggaccugccccagggauucagcgcccuggagccucugguggaccugcccaucggcaucaacaucaccagguuccagacccugcuggcccugcaccggagcuaccugacccccggcgacagcagcagcggcuggaccgccggcgccgccgcauacuacgugggcuaccugcagccacggaccuuccugcugaaguacaacgagaacggcaccaucaccgacgccguggacugcgcccuggacccccugagcgagaccaagugcacccuaaagagcuucaccguggagaagggcaucuaccagaccagcaacuuccgggugcagcccacugagagcaucgugcgguuccccaacauuaccaaccugugucccuucggcgagguguucaacgccacccgguucgccagcguguacgccuggaaccggaagcggaucagcaacugcguggccgacuacagcgugcuguacaacagcgccagcuucagcaccuucaagugcuacggcgugagcccuaccaagcugaacgaccugugcuucaccaacguguacgcugacagcuucgugauccggggcgacgaggugcggcagaucgcccccggccagaccggcaagaucgccgacuacaacuacaagcugcccgacgacuucaccggcugcgugaucgccuggaacagcaacaaccuggacagcaaggugggcggcaacuacaacuaccuguaccggcuguuccguaagagcaaccugaagccauucgagcgggacaucagcaccgagaucuaccaggccggcagcacccccugcaacgguguggagggcuuuaacugcuacuucccccugcagagcuacggcuuccagcccaccaacggcgugggcuaccagcccuaccgggugguggugcugagcuucgagcugcugcacgcccccgccaccgugugcggcccuaaaaagagcaccaaccuggugaagaacaagugcgugaacuucaauuucaacggccugaccggcaccggcgugcugaccgagagcaacaagaaguuccugcccuuccagcaguucggccgggauaucgccgacaccaccgacgcagugcgggacccccagacccuggagauccuggacaucaccccaugcagcuucggcggcgugagcgucaucacccccggcacaaacaccagcaaccagguggccgugcuguaccagggagugaacugcaccgaggugcccguggccauccacgccgaccagcugacccccaccuggcggguguacagcaccggcagcaacguguuccagacccgggccggcugccugaucggcgccgagcacgugaacaacuccuacgagugcgacauccccaucggcgcuggcaucugcgccagcuaccagacccagaccaacagcccccggcgggcccggagcguggccagccagagcgugaucgccuacaccaugagcuuaggcgccgagaacagcguggccuacagcaacaacagcaucgcgaucccuaccaacuucaccaucagcgugaccaccgagauccugcccgugagcaugaccaagaccagcguggacuguaccauguacauaugcggcgacagcaccgagugcagcaaccugcugcugcaguacggcagcuucugcacccagcugaaccgggcccugaccggcaucgccguggagcaggacaagaacacccaagagguguucgcccaggugaagcagaucuacaagacucccccaaucaaggacuucggcggcuucaacuucagccagauccugcccgaccccagcaagcccagcaagcggagcuucaucgaggaccugcuguucaacaaggugacccuggccgacgccggcuucaucaagcaguacggcgacugccugggggauaucgccgcucgggaccugaucugcgcccagaaguucaacggccugaccgugcugcccccucugcugaccgacgagaugaucgcccaguacaccagcgcccugcuugccggcaccaucaccagcggcuggaccuucggcgccggcgcagcccugcagauccccuucgccaugcagauggccuaccgguucaacggcaucggcgugacccagaacgugcuguacgagaaccagaagcugaucgccaaccaguucaacagcgccaucggcaagauccaggacagccugagcagcaccgccagcgcccugggcaagcugcaggacguggugaaccagaacgcucaggcccugaacacccuggugaagcagcugagcagcaacuucggcgccaucagcucagugcugaaugacauccugagcaggcuggacaagguggaggccgaggugcagaucgaccggcugaucaccggccggcugcagagccugcagaccuacgugacccagcagcugauccgggccgccgagauccgggccagcgccaaccuggcagccaccaagaugagcgagugcgugcugggccagagcaagcggguggacuuuugcggcaagggcuaccaccugaugagcuucccccagagcgccccacacggcguggucuuccuccacgugacauacgugcccgcccaggagaagaacuucaccaccgcccccgccaucugccacgacggcaaggcucacuucccccgggagggaguguucgugagcaacggcacccacugguucgugacccagcggaacuucuacgagccccagauuaucaccaccgacaacaccuucgugagcggcaacugcgacguggugaucggcaucgugaacaacaccguguacgacccccugcagccugagcuggacagcuucaaggaggagcuggacaaguacuucaagaaccacaccagccccgacguggaucugggcgacaucagcggcaucaacgccagcguggugaacauccagaaggagaucgaccggcugaacgagguggccaagaaccugaacgagagccugaucgaccugcaggagcugggcaaguacgagcaguacaucaaguggcccugguacaucuggcugggcuucaucgccggccugaucgccaucgugauggugaccaucaugcugugcugcaugaccagcugcuguagcugccugaagggcugcugcagcugcggcagcugcugcaaguucgacgaggacgacagcgagccagugcugaagggcgugaagcugcacuacaccugaggacuaguguccaccugucccuccugggcugcuggauugucucguuuuccugccaaauaaacaggaucagcgcuuuacagaucucaaaggcucuuuucagagccaccaaaaaaaaaaaaaaaaaaaaaaaaaaaaaaaaaaaaaaaaaaaaaaaaaaaaaaaaaaaaaaaaaaaaaaaaaaaaaaaaaaaaaaaaaaaaaaaaaaaaa

SEQ ID NO: 23912 - RNA, 4129 nt, Artificial Sequence
  SARS-CoV-2/Wuhan/WIV05/2019__EPI_ISL_402128 spike protein mRNA gc (1-1273)(D614G_M1229I)
aggagacccgugacccggaaguuguacggcuacgcgacuuucccucccacaaacccucgcgcccuuccuuuccuacuugggcccggcagaaagcuuaccauguucguguuccuggugcugcugccccuggugagcagccagugcgugaaccugaccacccggacccagcugcccccugccuacaccaacagcuucacccggggcguguacuaccccgacaagguguuccggagcagcgugcugcacagcacccaggaccuguuccugcccuucuucagcaacgugaccugguuccacgccauccacgugagcggcaccaacggcaccaagcgguucgacaacccagugcugcccuucaacgacggcguguacuucgccagcaccgagaagucaaacaucauccggggcuggaucuucggcaccacccuggacagcaagacacagagccugcugaucgugaacaacgccaccaacguggugaucaaggugugcgaguuucaguucugcaacgaccccuuccugggcguguacuaccacaagaacaacaagagcuggauggagagcgaguuccgggucuacagcagcgcuaacaauugcaccuucgaguacgugagccagcccuuccugauggaccucgagggcaagcagggcaacuucaagaaccugcgggaguucguguucaagaacaucgauggcuacuucaagaucuacagcaagcacacccccaucaaccuggugcgggaccugccccagggauucagcgcccuggagccucugguggaccugcccaucggcaucaacaucaccagguuccagacccugcuggcccugcaccggagcuaccugacccccggcgacagcagcagcggcuggaccgccggcgccgccgcauacuacgugggcuaccugcagccacggaccuuccugcugaaguacaacgagaacggcaccaucaccgacgccguggacugcgcccuggacccccugagcgagaccaagugcacccuaaagagcuucaccguggagaagggcaucuaccagaccagcaacuuccgggugcagcccacugagagcaucgugcgguuccccaacauuaccaaccugugucccuucggcgagguguucaacgccacccgguucgccagcguguacgccuggaaccggaagcggaucagcaacugcguggccgacuacagcgugcuguacaacagcgccagcuucagcaccuucaagugcuacggcgugagcccuaccaagcugaacgaccugugcuucaccaacguguacgcugacagcuucgugauccggggcgacgaggugcggcagaucgcccccggccagaccggcaagaucgccgacuacaacuacaagcugcccgacgacuucaccggcugcgugaucgccuggaacagcaacaaccuggacagcaaggugggcggcaacuacaacuaccuguaccggcuguuccguaagagcaaccugaagccauucgagcgggacaucagcaccgagaucuaccaggccggcagcacccccugcaacgguguggagggcuuuaacugcuacuucccccugcagagcuacggcuuccagcccaccaacggcgugggcuaccagcccuaccgggugguggugcugagcuucgagcugcugcacgcccccgccaccgugugcggcccuaaaaagagcaccaaccuggugaagaacaagugcgugaacuucaauuucaacggccugaccggcaccggcgugcugaccgagagcaacaagaaguuccugcccuuccagcaguucggccgggauaucgccgacaccaccgacgcagugcgggacccccagacccuggagauccuggacaucaccccaugcagcuucggcggcgugagcgucaucacccccggcacaaacaccagcaaccagguggccgugcuguaccagggagugaacugcaccgaggugcccguggccauccacgccgaccagcugacccccaccuggcggguguacagcaccggcagcaacguguuccagacccgggccggcugccugaucggcgccgagcacgugaacaacuccuacgagugcgacauccccaucggcgcuggcaucugcgccagcuaccagacccagaccaacagcccccggcgggcccggagcguggccagccagagcaucaucgccuacaccaugagcuuaggcgccgagaacagcguggccuacagcaacaacagcaucgcgaucccuaccaacuucaccaucagcgugaccaccgagauacugcccgugagcaugaccaagaccagcguggacuguaccauguacaucugcggcgacagcaccgagugcagcaaccugcugcugcaguacggcagcuucugcacccagcugaaccgggcccugaccggcaucgccguggagcaggacaagaacacccaagagguguucgcccaggugaagcagaucuacaagacucccccaaucaaggacuucggcggcuucaacuucagccagauccugcccgaccccagcaagcccagcaagcggagcuucaucgaggaccugcuguucaacaaggugacccuggccgacgccggcuucaucaagcaguacggcgacugccugggggauaucgccgcucgggaccugaucugcgcccagaaguucaacggccugaccgugcugcccccucugcugaccgacgagaugaucgcccaguacaccagcgcccugcuugccggcaccaucaccagcggcuggaccuucggcgccggcgcagcccugcagauccccuucgccaugcagauggccuaccgguucaacggcaucggcgugacccagaacgugcuguacgagaaccagaagcugaucgccaaccaguucaacagcgccaucggcaagauccaggacagccugagcagcaccgccagcgcccugggcaagcugcaggacguggugaaccagaacgcucaggcccugaacacccuggugaagcagcugagcagcaacuucggcgccaucagcucagugcugaaugacauccugagcaggcuggacaagguggaggccgaggugcagaucgaccggcugaucaccggccggcugcagagccugcagaccuacgugacccagcagcugauccgggccgccgagauccgggccagcgccaaccuggcagccaccaagaugagcgagugcgugcugggccagagcaagcggguggacuuuugcggcaagggcuaccaccugaugagcuucccccagagcgccccacacggcgugguguuccuccacgucacauacgugcccgcccaggagaagaacuucaccaccgcccccgccauuugccacgacggcaaggcucacuucccccgggagggaguguucgugagcaacggcacccacugguucgugacccagcggaacuucuacgagccccagaucaucaccaccgacaacaccuucgugagcggcaacugcgacguggugaucggcaucgugaacaacaccguguacgacccccugcagccugagcuggacagcuucaaggaggagcuggacaaguacuucaagaaccacaccagccccgacguggaucugggcgacaucagcggcaucaacgccagcguggugaacauccagaaggagaucgaccggcugaacgagguggccaagaaccugaacgagagccugaucgaccugcaggagcugggcaaguacgagcaguacaucaaguggcccugguacaucuggcugggcuucaucgccggccugaucgccaucgugaucgugaccaucaugcugugcugcaugaccagcugcuguagcugccugaagggcugcugcagcugcggcagcugcugcaaguucgacgaggacgacagcgagccagugcugaagggcgugaagcugcacuacaccugaggacuaguguccaccugucccuccugggcugcuggauugucucguuuuccugccaaauaaacaggaucagcgcuuuacagaucucaaaggcucuuuucagagccaccaaaaaaaaaaaaaaaaaaaaaaaaaaaaaaaaaaaaaaaaaaaaaaaaaaaaaaaaaaaaaaaaaaaaaaaaaaaaaaaaaaaaaaaaaaaaaaaaaaaaa

SEQ ID NO: 23913 - RNA, 4123 nt, Artificial Sequence
  SARS-CoV-2/Wuhan/WIV05/2019__EPI_ISL_402128 spike protein mRNA gc (1-1273)(H69del_V70del_A222V_Y453F_S477N_D614G_I692V)
aggagacccgugacccggaaguuguacggcuacgcgacuuucccucccacaaacccucgcgcccuuccuuuccuacuugggcccggcagaaagcuuaccauguucguguuccuggugcugcugccccuggugagcagccagugcgugaaccugaccacccggacccagcugcccccugccuacaccaacagcuucacccggggcguguacuaccccgacaagguguuccggagcagcgugcugcacagcacccaggaccuguuccugcccuucuucagcaacgugaccugguuccacgccaucagcggcaccaacggcaccaagcgguucgacaacccagugcugcccuucaacgacggcguguacuucgccagcaccgagaagucaaacaucauccggggcuggaucuucggcaccacccuggacagcaagacacagagccugcugaucgugaacaacgccaccaacguggugaucaaggugugcgaguuucaguucugcaacgaccccuuccugggcguguacuaccacaagaacaacaagagcuggauggagagcgaguuccggguguacagcagcgcuaacaauugcaccuucgaguacgucagccagcccuuccugauggaccucgagggcaagcagggcaacuucaagaaccugcgggaguucguguucaagaacaucgauggcuacuucaagaucuacagcaagcacacccccaucaaccuggugcgggaccugccccagggauucagcgugcuggagccucugguggaccugcccaucggcaucaacaucaccagguuccagacccugcuggcccugcaccggagcuaccugacccccggcgacagcagcagcggcuggaccgccggcgccgccgccuacuacgugggcuaccugcagccacggaccuuccugcugaaguacaacgagaacggcaccaucaccgacgcaguggacugcgcccuggacccccugagcgagaccaagugcacccuaaagagcuucaccguggagaagggcaucuaccagaccagcaacuuccgggugcagcccacugagagcaucgugcgguuccccaacauuaccaaccugugucccuucggcgagguguucaacgccacccgguucgccagcguguacgccuggaaccggaagcggaucagcaacugcguggccgacuacagcgugcuguacaacagcgccagcuucagcaccuucaagugcuacggcgugagcccuaccaagcugaacgaccugugcuucaccaacguguacgccgacagcuucgugauccggggcgacgaggugcggcagaucgcucccggccagaccggcaagaucgccgacuacaacuacaagcugcccgacgacuucaccggcugcgugaucgccuggaacagcaacaaccuggacagcaaggugggcggcaacuacaacuaccuguuccggcuguuccguaagagcaaccugaagccauuugagcgggacaucagcaccgagaucuaccaggccggcaacacccccugcaacgguguggagggcuucaacugcuacuucccccugcagagcuacggcuuccagcccaccaacggcgugggcuaccagcccuaccgggugguggugcugagcuucgagcugcugcacgcccccgccaccgugugcggcccuaaaaagagcaccaaccuggugaagaacaagugcgugaauuucaacuucaacggccugaccggcaccggcgugcugaccgagagcaacaagaaguuccugcccuuccagcaguucggccgggauaucgccgacaccaccgacgccgugcgggacccccagacccuggagauccuggacaucaccccaugcagcuucggcggcgugagcgucaucacccccggcacaaacaccagcaaccagguggcagugcuguaccagggagugaacugcaccgaggugcccguggccauccacgccgaccagcugacccccaccuggcggguguacagcaccggcagcaacguguuccagacccgggccggcugccugaucggcgccgagcacgugaacaacagcuacgagugcgacauccccaucggcgccggcaucugcgcuuccuaccagacccagaccaacagcccccggcgggcccggagcguggccagccagagcgugaucgccuacaccaugagcuuaggcgccgagaacagcguggccuacagcaacaacagcaucgccaucccuaccaacuucaccaucagcgugaccaccgagauccugcccgugagcaugaccaagaccagcguggacuguaccauguacauaugcggcgacagcaccgagugcagcaaccugcugcugcaguacggcagcuucugcacccagcugaaccgggcgcugaccggcaucgccguggagcaggacaagaacacccaagagguguucgcccaggugaagcagaucuacaagacucccccaaucaaggacuucggcggcuucaacuucagccagauccugcccgaccccagcaagcccagcaagcggagcuucaucgaggaccugcuguucaacaaggugacccuggccgacgccggcuucaucaagcaguacggcgacugccugggggauaucgccgcccgggaccugaucugcgcucagaaguucaacggccugaccgugcugcccccucugcugaccgacgagaugaucgcccaguacaccagcgcccugcuugccggcaccaucaccagcggcuggaccuucggcgccggcgccgcacugcagauccccuucgccaugcagauggccuaccgguucaacggcaucggcgugacccagaacgugcuguacgagaaccagaagcugaucgccaaccaguucaacagcgccaucggcaagauccaggacagccugagcagcaccgccagcgcccugggcaagcugcaggacguggugaaccagaacgcccaggcucugaacacccuggugaagcagcugagcagcaauuuuggcgccaucagcagcgugcugaacgacauccugucaaggcuggacaagguggaggccgaggugcagaucgaccggcugaucaccggccggcugcagagccugcagaccuacgugacccagcagcugauccgggccgccgagauccgggccagcgccaaccuggccgcaaccaagaugagcgagugcgugcugggccagagcaagcggguggacuucugcggcaagggcuaccaccugaugagcuucccccagagcgccccacacggcguggucuuccuccacgugacauacgugcccgcccaggagaagaacuucaccaccgcccccgccaucugccacgacggcaaggcccacuucccccgggagggaguguucgugagcaacggcacccacugguucgugacccagcggaacuucuacgagccccagauuaucaccaccgacaacaccuucgugagcggcaacugcgacguggugaucggcaucgugaacaacaccguguacgacccccugcagccugagcuggacagcuucaaggaggagcuggacaaguacuucaagaaccacaccagccccgacguggaucugggcgacaucagcggcaucaacgcuagcguggugaacauccagaaggagaucgaccggcugaacgagguggccaagaaccugaacgagagccugaucgaccugcaggagcugggcaaguacgagcaguacaucaaguggcccugguacaucuggcugggcuucaucgccggccugaucgccaucgugauggugaccaucaugcugugcugcaugaccagcugcuguagcugccugaagggcugcugcagcugcggcagcugcugcaaguucgacgaggacgacagcgagccagugcugaagggcgugaagcugcacuacaccugaggacuaguguccaccugucccuccugggcugcuggauugucucguuuuccugccaaauaaacaggaucagcgcuuuacagaucucaaaggcucuuuucagagccaccaaaaaaaaaaaaaaaaaaaaaaaaaaaaaaaaaaaaaaaaaaaaaaaaaaaaaaaaaaaaaaaaaaaaaaaaaaaaaaaaaaaaaaaaaaaaaaaaaaaaa

SEQ ID NO: 23914 - RNA, 4123 nt, Artificial Sequence
  SARS-CoV-2/Wuhan/WIV05/2019__EPI_ISL_402128 spike protein mRNA gc (1-1273)(H69del_V70del_Y453F_D614G_I692V_M1229I)
aggagacccgugacccggaaguuguacggcuacgcgacuuucccucccacaaacccucgcgcccuuccuuuccuacuugggcccggcagaaagcuuaccauguucguguuccuggugcugcugccccuggugagcagccagugcgugaaccugaccacccggacccagcugcccccugccuacaccaacagcuucacccggggcguguacuaccccgacaagguguuccggagcagcgugcugcacagcacccaggaccuguuccugcccuucuucagcaacgugaccugguuccacgccaucagcggcaccaacggcaccaagcgguucgacaacccagugcugcccuucaacgacggcguguacuucgccagcaccgagaagucaaacaucauccggggcuggaucuucggcaccacccuggacagcaagacacagagccugcugaucgugaacaacgccaccaacguggugaucaaggugugcgaguuucaguucugcaacgaccccuuccugggcguguacuaccacaagaacaacaagagcuggauggagagcgaguuccggguguacagcagcgcuaacaauugcaccuucgaguacgucagccagcccuuccugauggaccucgagggcaagcagggcaacuucaagaaccugcgggaguucguguucaagaacaucgauggcuacuucaagaucuacagcaagcacacccccaucaaccuggugcgggaccugccccagggauucagcgcccuggagccucugguggaccugcccaucggcaucaacaucaccagguuccagacccugcuggcccugcaccggagcuaccugacccccggcgacagcagcagcggcuggaccgccggcgccgccgcauacuacgugggcuaccugcagccacggaccuuccugcugaaguacaacgagaacggcaccaucaccgacgccguggacugcgcccuggacccccugagcgagaccaagugcacccuaaagagcuucaccguggagaagggcaucuaccagaccagcaacuuccgggugcagcccacugagagcaucgugcgguuccccaacauuaccaaccugugucccuucggcgagguguucaacgccacccgguucgccagcguguacgccuggaaccggaagcggaucagcaacugcguggccgacuacagcgugcuguacaacagcgccagcuucagcaccuucaagugcuacggcgugagcccuaccaagcugaacgaccugugcuucaccaacguguacgcugacagcuucgugauccggggcgacgaggugcggcagaucgcccccggccagaccggcaagaucgccgacuacaacuacaagcugcccgacgacuucaccggcugcgugaucgccuggaacagcaacaaccuggacagcaaggugggcggcaacuacaacuaccuguuccggcuguuccguaagagcaaccugaagccauuugagcgggacaucagcaccgagaucuaccaggccggcagcacccccugcaacgguguggagggcuucaacugcuacuucccccugcagagcuacggcuuccagcccaccaacggcgugggcuaccagcccuaccgggugguggugcugagcuucgagcugcugcacgcccccgccaccgugugcggcccuaaaaagagcaccaaccuggugaagaacaagugcgugaacuucaauuucaacggccugaccggcaccggcgugcugaccgagagcaacaagaaguuccugcccuuccagcaguucggccgggauaucgccgacaccaccgacgcagugcgggacccccagacccuggagauccuggacaucaccccaugcagcuucggcggcgugagcgugaucacccccggcacaaacaccagcaaccaggucgccgugcuguaccagggagugaacugcaccgaggugcccguggccauccacgccgaccagcugacccccaccuggcggguguacagcaccggcagcaacguguuccagacccgggccggcugccugaucggcgccgagcacgugaacaacuccuacgagugcgacauccccaucggcgcuggcaucugcgccagcuaccagacccagaccaacagcccccggcgggcccggagcguggccagccagagcgugaucgccuacaccaugagcuuaggcgccgagaacagcguggccuacagcaacaacagcaucgcgaucccuaccaacuucaccaucagcgugaccaccgagauccugcccgugagcaugaccaagaccagcguggacuguaccauguacauaugcggcgacagcaccgagugcagcaaccugcugcugcaguacggcagcuucugcacccagcugaaccgggcccugaccggcaucgccguggagcaggacaagaacacccaagagguguucgcccaggugaagcagaucuacaagacucccccaaucaaggacuucggcggcuucaacuucagccagauccugcccgaccccagcaagcccagcaagcggagcuucaucgaggaccugcuguucaacaaggugacccuggccgacgccggcuucaucaagcaguacggcgacugccugggggauaucgccgcucgggaccugaucugcgcccagaaguucaacggccugaccgugcugcccccucugcugaccgacgagaugaucgcccaguacaccagcgcccugcuugccggcaccaucaccagcggcuggaccuucggcgccggcgcagcccugcagauccccuucgccaugcagauggccuaccgguucaacggcaucggcgugacccagaacgugcuguacgagaaccagaagcugaucgccaaccaguucaacagcgccaucggcaagauccaggacagccugagcagcaccgccagcgcccugggcaagcugcaggacguggugaaccagaacgcucaggcccugaacacccuggugaagcagcugagcagcaacuuuggcgccaucagcucagugcugaaugacauccugagcaggcuggacaagguggaggccgaggugcagaucgaccggcugaucaccggccggcugcagagccugcagaccuacgugacccagcagcugauccgggccgccgagauccgggccagcgccaaccuggcagccaccaagaugagcgagugcgugcugggccagagcaagcggguggacuucugcggcaagggcuaccaccugaugagcuucccccagagcgccccacacggcgugguguuccuccacgucacauacgugcccgcccaggagaagaacuucaccaccgcccccgccaucugccacgacggcaaggcucacuucccccgggagggaguguucgugagcaacggcacccacugguucgugacccagcggaacuucuacgagccccagauuaucaccaccgacaacaccuucgugagcggcaacugcgacguggugaucggcaucgugaacaacaccguguacgacccccugcagccugagcuggacagcuucaaggaggagcuggacaaguacuucaagaaccacaccagccccgacguggaucugggcgacaucagcggcaucaacgccagcguggugaacauccagaaggagaucgaccggcugaacgagguggccaagaaccugaacgagagccugaucgaccugcaggagcugggcaaguacgagcaguacaucaaguggcccugguacaucuggcugggcuucaucgccggccugaucgccaucgugaucgugaccaucaugcugugcugcaugaccagcugcuguagcugccugaagggcugcugcagcugcggcagcugcugcaaguucgacgaggacgacagcgagccagugcugaagggcgugaagcugcacuacaccugaggacuaguguccaccugucccuccugggcugcuggauugucucguuuuccugccaaauaaacaggaucagcgcuuuacagaucucaaaggcucuuuucagagccaccaaaaaaaaaaaaaaaaaaaaaaaaaaaaaaaaaaaaaaaaaaaaaaaaaaaaaaaaaaaaaaaaaaaaaaaaaaaaaaaaaaaaaaaaaaaaaaaaaaaaa

SEQ ID NO: 23915 - RNA, 4120 nt, Artificial Sequence
  SARS-CoV-2/Wuhan/WIV05/2019__EPI_ISL_402128 spike protein mRNA gc (1-1273)(H69del_V70del_Y144del_N501Y_A570D_D614G_P681H_T716I_S982 A_D1118H)
aggagacccgugacccggaaguuguacggcuacgcgacuuucccucccacaaacccucgcgcccuuccuuuccuacuugggcccggcagaaagcuuaccauguucguguuccuggugcugcugccccuggugagcagccagugcgugaaccugaccacccggacccagcugcccccugccuacaccaacagcuucacccggggcguguacuaccccgacaagguguuccggagcagcgugcugcacagcacccaggaccuguuccugcccuucuucagcaacgugaccugguuccacgccaucagcggcaccaacggcaccaagcgguucgacaacccagugcugcccuucaacgacggcguguacuucgccagcaccgagaagucaaacaucauccggggcuggaucuucggcaccacccuggacagcaagacacagagccugcugaucgugaacaacgccaccaacguggugaucaaggugugcgaguuucaguucugcaacgaccccuuccugggcguguaccacaagaacaacaagagcuggauggagagcgaguuccggguguacagcagcgcuaacaauugcaccuucgaguacgucagccagcccuuccugauggaccucgagggcaagcagggcaacuucaagaaccugcgggaguucguguucaagaacaucgauggcuacuucaagaucuacagcaagcacacccccaucaaccuggugcgggaccugccccagggauucagcgcccuggagccucugguggaccugcccaucggcaucaacaucaccagguuccagacccugcuggcccugcaccggagcuaccugacccccggcgacagcagcagcggcuggaccgccggcgccgccgcauacuacgugggcuaccugcagccacggaccuuccugcugaaguacaacgagaacggcaccaucaccgacgccguggacugcgcccuggacccccugagcgagaccaagugcacccuaaagagcuucaccguggagaagggcaucuaccagaccagcaacuuccgggugcagcccacugagagcaucgugcgguuccccaacauuaccaaccugugucccuucggcgagguguucaacgccacccgguucgccagcguguacgccuggaaccggaagcggaucagcaacugcguggccgacuacagcgugcuguacaacagcgccagcuucagcaccuucaagugcuacggcgugagcccuaccaagcugaacgaccugugcuucaccaacguguacgcugacagcuucgugauccggggcgacgaggugcggcagaucgcccccggccagaccggcaagaucgccgacuacaacuacaagcugcccgacgacuucaccggcugcgugaucgccuggaacagcaacaaccuggacagcaaggugggcggcaacuacaacuaccuguaccggcuguuccguaagagcaaccugaagccauucgagcgggacaucagcaccgagaucuaccaggccggcagcacccccugcaacgguguggagggcuuuaacugcuacuucccccugcagagcuacggcuuccagcccaccuacggcgugggcuaccagcccuaccgggugguggugcugagcuucgagcugcugcacgcccccgccaccgugugcggcccuaaaaagagcaccaaccuggugaagaacaagugcgugaacuucaacuucaauggccugaccggcaccggcgugcugaccgagagcaacaagaaguuccugcccuuccagcaguucggccgggauaucgacgacaccaccgacgccgugcgggacccccagacccuggagauccuggacaucaccccaugcagcuucggcggcgugagcgugaucacccccggcacaaacaccagcaaccaggucgcagugcuguaccagggagugaacugcaccgaggugcccguggccauccacgccgaccagcugacccccaccuggcggguguacagcaccggcagcaacguguuccagacccgggccggcugccugaucggcgccgagcacgugaacaacuccuacgagugcgacauccccaucggcgccggcaucugcgcuagcuaccagacccagaccaacagccaccggcgggcccggagcguggccagccagagcaucaucgccuacaccaugagcuuaggcgccgagaacagcguggccuacagcaacaacagcaucgccauccccaucaacuucaccauaagcgugaccaccgagauccugccugugagcaugaccaagaccagcguggacuguaccauguacaucugcggcgacagcaccgagugcagcaaccugcugcugcaguacggcagcuucugcacccagcugaaccgggcgcugaccggcaucgccguggagcaggacaagaacacccaagagguguucgcccaggugaagcagaucuacaagaccccacccaucaaggacuucggcggcuucaacuucagccagauccugcccgaccccagcaagcccagcaagcggagcuucaucgaggaccugcuguucaacaaggugacucuggccgacgccggcuucaucaagcaguacggcgauugccugggggacaucgccgcccgggaccugaucugcgcucagaaguucaacggccugaccgugcugccuccccugcugaccgacgagaugaucgcccaguacaccagcgcccugcuugccggcaccaucaccagcggcuggaccuucggcgccggcgccgcacugcagauccccuucgccaugcagauggccuaccgguucaacggcaucggcgugacccagaacgugcuguacgagaaccagaagcugaucgccaaccaguucaacagcgccaucggcaagauccaggacagccugagcagcaccgccagcgcccugggcaagcugcaggacguggugaaccagaacgcccaggcucugaacacccuggugaagcagcugagcagcaacuucggcgccaucagcucagugcugaacgacauccuggccaggcuggacaagguggaggccgaggugcagaucgaccggcugaucaccggccggcugcagagccugcagaccuacgugacccagcagcugauccgggccgccgagauucgggccagcgccaaucuggcagccaccaagaugagcgagugcgugcugggccagagcaagcggguggacuuuugcggcaagggcuaccaccugaugagcuucccccagagcgcuccccacggcgugguguuccuccacgugaccuacgucccagcccaggagaagaacuucacaaccgcccccgccaucugccacgacggcaaggcccacuucccccgggagggaguguucgugagcaacggcacccacugguucgugacccagcggaacuucuacgagccccagaucaucaccacccacaacaccuucgugagcggcaacugcgacguggugaucggcaucgugaacaacaccguguacgacccccugcagcccgagcuggacagcuucaaggaggagcuggacaaguacuucaagaaccacaccagcccugacguggaucugggcgacaucagcggcaucaacgccagcguggugaacauccagaaggagaucgaccggcugaacgagguggccaagaaccugaacgagagccugaucgaccugcaggagcugggcaaguacgagcaguacaucaaguggcccugguacaucuggcugggcuucaucgccggccugaucgccaucgugauggugaccaucaugcugugcugcaugaccagcugcuguagcugccugaagggcugcugcagcugcggcagcugcugcaaguucgacgaggacgacagcgagcccgugcugaagggcgugaagcugcacuacaccugaggacuaguguccaccugucccuccugggcugcuggauugucucguuuuccugccaaauaaacaggaucagcgcuuuacagaucucaaaggcucuuuucagagccaccaaaaaaaaaaaaaaaaaaaaaaaaaaaaaaaaaaaaaaaaaaaaaaaaaaaaaaaaaaaaaaaaaaaaaaaaaaaaaaaaaaaaaaaaaaaaaaaaaaaaa

SEQ ID NO: 23916 - RNA, 4129 nt, Artificial Sequence
  SARS-CoV-2/Wuhan/WIV05/2019__EPI_ISL_402128 spike protein mRNA gc (1-1273)(K417N_E484K_N501Y_D614G)
aggagacccgugacccggaaguuguacggcuacgcgacuuucccucccacaaacccucgcgcccuuccuuuccuacuugggcccggcagaaagcuuaccauguucguguuccuggugcugcugccccuggugagcagccagugcgugaaccugaccacccggacccagcugcccccugccuacaccaacagcuucacccggggcguguacuaccccgacaagguguuccggagcagcgugcugcacagcacccaggaccuguuccugcccuucuucagcaacgugaccugguuccacgccauccacgugagcggcaccaacggcaccaagcgguucgacaacccagugcugcccuucaacgacggcguguacuucgccagcaccgagaagucaaacaucauccggggcuggaucuucggcaccacccuggacagcaagacacagagccugcugaucgugaacaacgccaccaacguggugaucaaggugugcgaguuucaguucugcaacgaccccuuccugggcguguacuaccacaagaacaacaagagcuggauggagagcgaguuccgggucuacagcagcgcuaacaauugcaccuucgaguacgugagccagcccuuccugauggaccucgagggcaagcagggcaacuucaagaaccugcgggaguucguguucaagaacaucgauggcuacuucaagaucuacagcaagcacacccccaucaaccuggugcgggaccugccccagggauucagcgcccuggagccucugguggaccugcccaucggcaucaacaucaccagguuccagacccugcuggcccugcaccggagcuaccugacccccggcgacagcagcagcggcuggaccgccggcgccgccgcauacuacgugggcuaccugcagccacggaccuuccugcugaaguacaacgagaacggcaccaucaccgacgccguggacugcgcccuggacccccugagcgagaccaagugcacccuaaagagcuucaccguggagaagggcaucuaccagaccagcaacuuccgggugcagcccacugagagcaucgugcgguuccccaacauuaccaaccugugucccuucggcgagguguucaacgccacccgguucgccagcguguacgccuggaaccggaagcggaucagcaacugcguggccgacuacagcgugcuguacaacagcgccagcuucagcaccuucaagugcuacggcgugagcccuaccaagcugaacgaccugugcuucaccaacguguacgcugacagcuucgugauccggggcgacgaggugcggcagaucgcccccggccagaccggcaacaucgccgacuacaacuacaagcugcccgacgacuucaccggcugcgugaucgccuggaacagcaacaaccuggacagcaaggugggcggcaacuacaacuaccuguaccggcuguuccguaagagcaaccugaagccauucgagcgggacaucagcaccgagaucuaccaggccggcagcacccccugcaacggugugaagggcuuuaacugcuacuucccccugcagagcuacggcuuccagcccaccuacggcgugggcuaccagcccuaccgggugguggugcugagcuucgagcugcugcacgcccccgccaccgugugcggcccuaaaaagagcaccaaccuggugaagaacaagugcgugaacuucaauuucaacggccugaccggcaccggcgugcugaccgagagcaacaagaaguuccugcccuuccagcaguucggccgggauaucgccgacaccaccgacgcagugcgggacccccagacccuggagauccuggacaucaccccaugcagcuucggcggcgugagcgucaucacccccggcacaaacaccagcaaccagguggccgugcuguaccagggagugaacugcaccgaggugcccguggccauccacgccgaccagcugacccccaccuggcggguguacagcaccggcagcaacguguuccagacccgggccggcugccugaucggcgccgagcacgugaacaacuccuacgagugcgacauccccaucggcgcuggcaucugcgccagcuaccagacccagaccaacagcccccggcgggcccggagcguggccagccagagcaucaucgccuacaccaugagcuuaggcgccgagaacagcguggccuacagcaacaacagcaucgcgaucccuaccaacuucaccaucagcgugaccaccgagauacugcccgugagcaugaccaagaccagcguggacuguaccauguacaucugcggcgacagcaccgagugcagcaaccugcugcugcaguacggcagcuucugcacccagcugaaccgggcccugaccggcaucgccguggagcaggacaagaacacccaagagguguucgcccaggugaagcagaucuacaagacucccccaaucaaggacuucggcggcuucaacuucagccagauccugcccgaccccagcaagcccagcaagcggagcuucaucgaggaccugcuguucaacaaggugacccuggccgacgccggcuucaucaagcaguacggcgacugccugggggauaucgccgcucgggaccugaucugcgcccagaaguucaacggccugaccgugcugcccccucugcugaccgacgagaugaucgcccaguacaccagcgcccugcuugccggcaccaucaccagcggcuggaccuucggcgccggcgcagcccugcagauccccuucgccaugcagauggccuaccgguucaacggcaucggcgugacccagaacgugcuguacgagaaccagaagcugaucgccaaccaguucaacagcgccaucggcaagauccaggacagccugagcagcaccgccagcgcccugggcaagcugcaggacguggugaaccagaacgcucaggcccugaacacccuggugaagcagcugagcagcaacuucggcgccaucagcucagugcugaaugacauccugagcaggcuggacaagguggaggccgaggugcagaucgaccggcugaucaccggccggcugcagagccugcagaccuacgugacccagcagcugauccgggccgccgagauccgggccagcgccaaccuggcagccaccaagaugagcgagugcgugcugggccagagcaagcggguggacuuuugcggcaagggcuaccaccugaugagcuucccccagagcgccccacacggcgugguguuccuccacgucacauacgugcccgcccaggagaagaacuucaccaccgcccccgccauuugccacgacggcaaggcucacuucccccgggagggaguguucgugagcaacggcacccacugguucgugacccagcggaacuucuacgagccccagaucaucaccaccgacaacaccuucgugagcggcaacugcgacguggugaucggcaucgugaacaacaccguguacgacccccugcagccugagcuggacagcuucaaggaggagcuggacaaguacuucaagaaccacaccagccccgacguggaucugggcgacaucagcggcaucaacgccagcguggugaacauccagaaggagaucgaccggcugaacgagguggccaagaaccugaacgagagccugaucgaccugcaggagcugggcaaguacgagcaguacaucaaguggcccugguacaucuggcugggcuucaucgccggccugaucgccaucgugauggugaccaucaugcugugcugcaugaccagcugcuguagcugccugaagggcugcugcagcugcggcagcugcugcaaguucgacgaggacgacagcgagccagugcugaagggcgugaagcugcacuacaccugaggacuaguguccaccugucccuccugggcugcuggauugucucguuuuccugccaaauaaacaggaucagcgcuuuacagaucucaaaggcucuuuucagagccaccaaaaaaaaaaaaaaaaaaaaaaaaaaaaaaaaaaaaaaaaaaaaaaaaaaaaaaaaaaaaaaaaaaaaaaaaaaaaaaaaaaaaaaaaaaaaaaaaaaaaa

SEQ ID NO: 23917 - RNA, 4120 nt, Artificial Sequence
  SARS-CoV-2/Wuhan/WIV05/2019__EPI_ISL_402128 spike protein mRNA gc (1-1273)(L18F_D80A_D215G_L242del_A243del_L244del_R246I_K417N_E484 K_N501Y_D614G_A701V)
aggagacccgugacccggaaguuguacggcuacgcgacuuucccucccacaaacccucgcgcccuuccuuuccuacuugggcccggcagaaagcuuaccauguucguguuccuggugcugcugccccuggugagcagccagugcgugaacuucaccacccggacccagcugcccccugccuacaccaacagcuucacccggggcguguacuaccccgacaagguguuccggagcagcgugcugcacagcacccaggaccuguuccugcccuucuucagcaacgugaccugguuccacgccauccacgugagcggcaccaacggcaccaagcgguucgccaacccagugcugcccuucaacgacggcguguacuucgccagcaccgagaagucaaacaucauccggggcuggaucuuuggcaccacccuggacagcaagacacagagccugcugaucgugaacaacgcuaccaacguggugaucaaggugugcgaguuccaguucugcaacgaccccuuccugggcguguacuaccacaagaacaacaagagcuggauggagagcgaguuccgggucuacagcagcgccaacaauugcaccuucgaguacgugagccagcccuuccugauggaccuggagggcaagcagggcaacuucaagaaccuccgggaguucguguucaagaacaucgacggcuacuucaagaucuacagcaagcacacccccaucaaccuggugcggggacugccccagggcuucagcgcccuggagccucugguggaucugcccaucggcaucaacaucaccagguuccagacccugcacaucagcuaccugacccccggcgacagcagcagcggcuggaccgccggcgccgccgcauacuacgugggcuaccugcagccacggaccuuccugcugaaguacaacgagaacggcaccaucaccgacgccguggacugcgcccuggacccccugagcgagaccaagugcacccuuaagagcuucaccguggagaagggcaucuaccagaccagcaacuuccgggugcagcccacugagagcauugugcgguuccccaacaucaccaaccugugucccuucggcgagguguucaacgccacccgguucgccagcguguacgccuggaaccggaagcggaucagcaacugcguggccgacuacagcgugcuguacaacagcgccagcuucagcaccuucaagugcuacggcgugagcccuaccaagcugaacgaccugugcuucaccaacguguacgcugacagcuucgugauccggggcgacgaggugcggcagaucgcccccggccagaccggcaacaucgccgacuacaacuacaagcugcccgacgacuucaccggcugcgugaucgccuggaacagcaacaaccuggacagcaaggugggcggcaacuacaacuaccuguaccggcuauuccguaagagcaaccugaagccauuugagcgggacaucagcaccgagaucuaccaggccgguagcacccccugcaacggcgugaagggcuucaacugcuacuucccccugcagagcuacggcuuccagcccaccuacggcgugggcuaccagcccuaccgggugguggugcugagcuucgagcugcugcacgcccccgccaccgugugcggcccuaaaaagagcaccaaccuggugaagaacaagugcgugaacuucaauuucaacggccugaccggcaccggcgugcugaccgagagcaacaagaaguuccugcccuuccagcaguucggccgggacaucgccgacaccaccgaugcagugcgggacccccagacccuggagauccuggacaucaccccaugcagcuucggcggcgugagcgucaucacccccggaacaaacaccagcaaccagguggccgugcuguaccagggcgugaacugcaccgaggugcccguggccauccacgccgaccagcugacccccaccuggcggguguacagcaccggcagcaacguguuccagacccgggccggcugccugaucggcgccgagcacgugaacaacuccuacgagugcgacauccccaucggcgcuggcaucugcgccagcuaccagacccagaccaacagcccccggcgggcccggagcguggccagccagagcaucaucgccuacaccaugagccugggcguggagaacagcguggccuacagcaacaacagcaucgccaucccuaccaacuucaccauaagcgugaccaccgagauccugcccgugagcaugaccaagaccagcguggacuguaccauguacaucugcggcgacagcaccgagugcagcaaccuguuacugcaguacggcagcuucugcacccagcugaaccgggcgcugaccggcaucgccguggagcaggacaagaacacccaagagguguucgcccaggugaagcagaucuacaagacucccccaaucaaggacuucggcggcuucaacuucagccagauccugcccgaccccagcaagcccagcaagcggagcuucaucgaggaccugcuguucaacaaggugacccuggccgacgccggcuucaucaagcaguacggggacugccugggcgacaucgccgcccgggaccugaucugcgcucagaaguucaacggccugaccgugcugcccccucugcugaccgaugagaugaucgcccaguacaccagcgcccugcuggccggcaccaucaccagcggcuggaccuucggcgccggcgccgcacugcagauccccuucgccaugcagauggccuaccgguucaacggcaucggcgugacccagaacgugcuguacgagaaccagaagcugaucgccaaccaguucaacagcgccaucggcaagauccaggacagccugagcagcaccgccagcgcccugggcaagcugcaggacguggugaaccagaacgcccaggcucugaacacccuggugaagcagcugagcagcaacuuuggcgccaucagcucagugcugaaugacauccugagccggcuggacaagguggaggccgaggugcagaucgacaggcugaucaccggccggcugcagagccugcagaccuacgugacccagcagcugauccgggccgccgagauucgggccagcgccaaccuggccgcaaccaagaugagcgagugcgugcugggccagagcaagcggguggacuucugcggcaagggcuaccaccugaugagcuucccccagagcgccccacacggcguggucuuccugcacgugacauacgugcccgcccaggagaagaacuucaccaccgcccccgccaucugccacgacggaaaggcccacuucccccgggagggcguguucgugagcaacggcacccacugguucgugacccagcggaacuucuacgagccccagaucaucaccaccgacaacaccuucgugagcggcaacugcgacguggugaucggcaucgugaacaacaccguguacgacccccugcagccugagcuggacagcuucaaggaggagcucgacaaguacuucaagaaccacaccagccccgacguggaccugggcgacaucagcggcaucaacgcuagcguggugaacauccagaaggagaucgaucggcugaacgagguggccaagaaccugaacgagagccugaucgaccugcaggagcugggcaaguacgagcaguacaucaaguggcccugguacaucuggcugggcuucaucgccggccugaucgccaucgugauggugaccaucaugcugugcugcaugaccagcugcuguagcugccugaagggcugcugcagcugcggcagcugcugcaaguucgacgaggacgacagcgagccagugcugaagggcgugaagcugcacuacaccugaggacuaguguccaccugucccuccugggcugcuggauugucucguuuuccugccaaauaaacaggaucagcgcuuuacagaucucaaaggcucuuuucagagccaccaaaaaaaaaaaaaaaaaaaaaaaaaaaaaaaaaaaaaaaaaaaaaaaaaaaaaaaaaaaaaaaaaaaaaaaaaaaaaaaaaaaaaaaaaaaaaaaaaaaaa

SEQ ID NO: 23918 - RNA, 4129 nt, Artificial Sequence
  SARS-CoV-2/Wuhan/WIV05/2019__EPI_ISL_402128 spike protein mRNA gc (1-1273)(E484K_D614G)
aggagacccgugacccggaaguuguacggcuacgcgacuuucccucccacaaacccucgcgcccuuccuuuccuacuugggcccggcagaaagcuuaccauguucguguuccuggugcugcugccccuggugagcagccagugcgugaaccugaccacccggacccagcugcccccugccuacaccaacagcuucacccggggcguguacuaccccgacaagguguuccggagcagcgugcugcacagcacccaggaccuguuccugcccuucuucagcaacgugaccugguuccacgccauccacgugagcggcaccaacggcaccaagcgguucgacaacccagugcugcccuucaacgacggcguguacuucgccagcaccgagaagucaaacaucauccggggcuggaucuucggcaccacccuggacagcaagacacagagccugcugaucgugaacaacgccaccaacguggugaucaaggugugcgaguuucaguucugcaacgaccccuuccugggcguguacuaccacaagaacaacaagagcuggauggagagcgaguuccgggucuacagcagcgcuaacaauugcaccuucgaguacgugagccagcccuuccugauggaccucgagggcaagcagggcaacuucaagaaccugcgggaguucguguucaagaacaucgauggcuacuucaagaucuacagcaagcacacccccaucaaccuggugcgggaccugccccagggauucagcgcccuggagccucugguggaccugcccaucggcaucaacaucaccagguuccagacccugcuggcccugcaccggagcuaccugacccccggcgacagcagcagcggcuggaccgccggcgccgccgcauacuacgugggcuaccugcagccacggaccuuccugcugaaguacaacgagaacggcaccaucaccgacgccguggacugcgcccuggacccccugagcgagaccaagugcacccuaaagagcuucaccguggagaagggcaucuaccagaccagcaacuuccgggugcagcccacugagagcaucgugcgguuccccaacauuaccaaccugugucccuucggcgagguguucaacgccacccgguucgccagcguguacgccuggaaccggaagcggaucagcaacugcguggccgacuacagcgugcuguacaacagcgccagcuucagcaccuucaagugcuacggcgugagcccuaccaagcugaacgaccugugcuucaccaacguguacgcugacagcuucgugauccggggcgacgaggugcggcagaucgcccccggccagaccggcaagaucgccgacuacaacuacaagcugcccgacgacuucaccggcugcgugaucgccuggaacagcaacaaccuggacagcaaggugggcggcaacuacaacuaccuguaccggcuguuccguaagagcaaccugaagccauucgagcgggacaucagcaccgagaucuaccaggccggcagcacccccugcaacggugugaagggcuuuaacugcuacuucccccugcagagcuacggcuuccagcccaccaacggcgugggcuaccagcccuaccgggugguggugcugagcuucgagcugcugcacgcccccgccaccgugugcggcccuaaaaagagcaccaaccuggugaagaacaagugcgugaacuucaauuucaacggccugaccggcaccggcgugcugaccgagagcaacaagaaguuccugcccuuccagcaguucggccgggauaucgccgacaccaccgacgcagugcgggacccccagacccuggagauccuggacaucaccccaugcagcuucggcggcgugagcgucaucacccccggcacaaacaccagcaaccagguggccgugcuguaccagggagugaacugcaccgaggugcccguggccauccacgccgaccagcugacccccaccuggcggguguacagcaccggcagcaacguguuccagacccgggccggcugccugaucggcgccgagcacgugaacaacuccuacgagugcgacauccccaucggcgcuggcaucugcgccagcuaccagacccagaccaacagcccccggcgggcccggagcguggccagccagagcaucaucgccuacaccaugagcuuaggcgccgagaacagcguggccuacagcaacaacagcaucgcgaucccuaccaacuucaccaucagcgugaccaccgagauacugcccgugagcaugaccaagaccagcguggacuguaccauguacaucugcggcgacagcaccgagugcagcaaccugcugcugcaguacggcagcuucugcacccagcugaaccgggcccugaccggcaucgccguggagcaggacaagaacacccaagagguguucgcccaggugaagcagaucuacaagacucccccaaucaaggacuucggcggcuucaacuucagccagauccugcccgaccccagcaagcccagcaagcggagcuucaucgaggaccugcuguucaacaaggugacccuggccgacgccggcuucaucaagcaguacggcgacugccugggggauaucgccgcucgggaccugaucugcgcccagaaguucaacggccugaccgugcugcccccucugcugaccgacgagaugaucgcccaguacaccagcgcccugcuugccggcaccaucaccagcggcuggaccuucggcgccggcgcagcccugcagauccccuucgccaugcagauggccuaccgguucaacggcaucggcgugacccagaacgugcuguacgagaaccagaagcugaucgccaaccaguucaacagcgccaucggcaagauccaggacagccugagcagcaccgccagcgcccugggcaagcugcaggacguggugaaccagaacgcucaggcccugaacacccuggugaagcagcugagcagcaacuucggcgccaucagcucagugcugaaugacauccugagcaggcuggacaagguggaggccgaggugcagaucgaccggcugaucaccggccggcugcagagccugcagaccuacgugacccagcagcugauccgggccgccgagauccgggccagcgccaaccuggcagccaccaagaugagcgagugcgugcugggccagagcaagcggguggacuuuugcggcaagggcuaccaccugaugagcuucccccagagcgccccacacggcgugguguuccuccacgucacauacgugcccgcccaggagaagaacuucaccaccgcccccgccauuugccacgacggcaaggcucacuucccccgggagggaguguucgugagcaacggcacccacugguucgugacccagcggaacuucuacgagccccagaucaucaccaccgacaacaccuucgugagcggcaacugcgacguggugaucggcaucgugaacaacaccguguacgacccccugcagccugagcuggacagcuucaaggaggagcuggacaaguacuucaagaaccacaccagccccgacguggaucugggcgacaucagcggcaucaacgccagcguggugaacauccagaaggagaucgaccggcugaacgagguggccaagaaccugaacgagagccugaucgaccugcaggagcugggcaaguacgagcaguacaucaaguggcccugguacaucuggcugggcuucaucgccggccugaucgccaucgugauggugaccaucaugcugugcugcaugaccagcugcuguagcugccugaagggcugcugcagcugcggcagcugcugcaaguucgacgaggacgacagcgagccagugcugaagggcgugaagcugcacuacaccugaggacuaguguccaccugucccuccugggcugcuggauugucucguuuuccugccaaauaaacaggaucagcgcuuuacagaucucaaaggcucuuuucagagccaccaaaaaaaaaaaaaaaaaaaaaaaaaaaaaaaaaaaaaaaaaaaaaaaaaaaaaaaaaaaaaaaaaaaaaaaaaaaaaaaaaaaaaaaaaaaaaaaaaaaaa

SEQ ID NO: 23919 - RNA, 4129 nt, Artificial Sequence
  SARS-CoV-2/Wuhan/WIV05/2019__EPI_ISL_402128 spike protein mRNA gc (1-1273)(L18F_T20N_P26S_D138Y_R190S_K417T_E484K_N501Y_D614G_H655Y _T1027I)
aggagacccgugacccggaaguuguacggcuacgcgacuuucccucccacaaacccucgcgcccuuccuuuccuacuugggcccggcagaaagcuuaccauguucguguuccuggugcugcugccccuggugagcagccagugcgugaacuucaccaaccggacccagcugcccagcgccuacaccaacagcuucacccggggcguguacuacccugacaagguguuccggagcagcgugcugcacagcacccaggaccuguuccugcccuucuucagcaacgugaccugguuccacgccauccacgugagcggcaccaacggcaccaagcgguucgacaaccccgugcugccauucaacgacggcguguacuucgccagcaccgagaagucaaacaucauccggggcuggaucuuuggcaccacccuggacagcaagacccagagccugcugaucgugaacaacgccacaaacguggugaucaaggugugcgaguuccaguucugcaacuaccccuuccugggcguguacuaccacaagaacaacaagagcuggauggagagcgaguuccgggucuacagcagcgcuaauaacugcaccuucgaguacgugagccagcccuuccugauggaccuggagggcaagcagggcaacuucaagaaccucagcgaguucguguucaagaacaucgacggcuacuucaagaucuacagcaagcacacccccaucaaccuggugcgggaucugccccagggauucagcgcccuggagccccugguggaccugccuaucggcaucaacaucacccgguuccagacccugcuggcccugcacaggagcuaccugacccccggcgacagcagcagcggcuggaccgccggcgccgccgcauacuacgugggcuaccugcagccccggaccuuccugcugaaguacaacgagaacggcaccaucaccgacgccguggacugcgcccuggacccacugagcgagaccaagugcacccuaaagagcuucaccguggagaagggcaucuaccagaccagcaacuuccgggugcagcccaccgagagcaucgugcgguuccccaacauuacuaaccugugucccuucggcgagguguucaacgccacccgguucgccagcguguacgccuggaaccggaagcggaucagcaacugcguggccgacuacagcgugcuguacaacagcgccagcuucagcaccuucaagugcuacggcgugagccccaccaagcugaacgaccugugcuucaccaacguguacgcugacagcuucgugauccggggcgacgaggugcggcagaucgccccuggccagaccggcaccaucgccgacuacaacuacaagcugcccgacgacuucaccggcugcgugaucgccuggaacagcaacaaccuggacagcaaggugggcggcaacuacaacuaccuguaccggcuguuccguaagagcaaccugaagcccuuugagcgggacaucagcaccgagaucuaccaggccggcagcaccccaugcaacggugugaagggcuucaacugcuacuucccccugcagagcuacggcuuccagcccaccuacggcgugggcuaccagcccuaccgggugguggugcugagcuucgagcugcugcacgcccccgccaccgugugcggccccaaaaagagcaccaaccuggugaagaacaagugcgugaacuucaauuucaacggccugaccggcaccggcgugcugaccgagagcaacaagaaguuccugccuuuccagcaguucggccgggacaucgccgauaccaccgacgcagugcgggacccccagacccuggagauccuggacaucacccccugcagcuucggcggcgugagcgucaucaccccaggcacaaacaccagcaaccagguggccgugcuguaccagggagugaacugcaccgaggugcccguggccauccacgccgaccagcugacccccaccuggcggguguacuccaccggcagcaacguguuccagacccgggccggcugccugaucggcgccgaguacgugaacaacagcuacgagugcgacauccccaucggcgcuggcaucugcgccagcuaccagacccagaccaacagcccccggcgggcccggagcguggccagccagagcaucaucgccuacaccaugagccugggcgccgagaacagcguggccuacagcaacaacagcaucgcgauccccaccaacuucaccaucagcgugaccaccgagauauuaccugugagcaugaccaagaccagcguggacuguaccauguacaucugcggcgacagcaccgagugcagcaaccugcugcugcaguacggcagcuucugcacccagcugaaccgggcccugaccggcaucgccguggagcaggacaagaacacccaagagguguucgcccaggugaagcagaucuacaagacuccacccaucaaggacuucggcggcuucaacuucagccagauccugcccgaccccagcaagcccagcaagcggagcuucaucgaggaccugcuguucaacaaggugacccuggccgacgccggcuucaucaagcaguacggcgacugccugggggacaucgccgcucgggaucugaucugcgcccagaaguucaacggccugaccgugcugccuccccugcugaccgacgagaugaucgcccaguacaccagcgcccugcuggccggcaccaucaccagcggcuggaccuucggcgccggcgcagcccuucagauccccuucgccaugcagauggccuaccgguucaacggcaucggcgugacccagaacgugcuguacgagaaccagaagcugaucgccaaccaguucaacagcgccaucggcaagauccaggacagccugagcagcaccgccagcgcccugggcaagcugcaggacguggugaaccagaacgcucaggcccugaacacccuggugaagcagcugagcucaaacuuuggcgccaucagcagcgugcugaaugacauccugagccggcuggacaagguggaggccgaggugcagaucgacaggcugaucaccggccggcugcagagccugcagaccuacgugacccagcagcugauccgggccgccgagauccgggccagcgccaaccuggcagccauuaagaugagcgagugcgugcugggccagagcaagcggguggacuucugcggcaagggcuaccaccugaugagcuucccccagagcgcuccccacggcgugguguuccugcacgucaccuacgugccagcccaggagaagaacuucacaaccgcccccgccaucugccacgacggcaaggcccacuucccccgggagggaguguucgugagcaacggcacccacugguucgugacccagcggaacuucuacgagccccagaucaucaccaccgacaacaccuucgugagcggcaacugcgacguggugaucggcaucgugaacaacaccguguacgacccccuccagcccgagcuggacagcuucaaggaggagcuggacaaguacuucaagaaccacaccagcccugacguggaccugggcgauaucagcggcaucaacgccagcguggugaacauccagaaggagaucgaccggcugaacgagguggccaagaaccugaacgagagccugaucgaccugcaggagcugggcaaguacgagcaguacaucaaguggcccugguacaucuggcugggcuucaucgccggccugaucgccaucgugauggugaccaucaugcugugcugcaugaccagcugcuguagcugccugaagggcugcugcagcugcggcagcugcugcaaguucgacgaggacgacagcgagcccgugcugaagggcgugaagcugcacuacaccugaggacuaguguccaccugucccuccugggcugcuggauugucucguuuuccugccaaauaaacaggaucagcgcuuuacagaucucaaaggcucuuuucagagccaccaaaaaaaaaaaaaaaaaaaaaaaaaaaaaaaaaaaaaaaaaaaaaaaaaaaaaaaaaaaaaaaaaaaaaaaaaaaaaaaaaaaaaaaaaaaaaaaaaaaaa

SEQ ID NO: 23920 - RNA, 4129 nt, Artificial Sequence
  SARS-CoV-2/Wuhan/WIV05/2019__EPI_ISL_402128 spike protein mRNA gc (1-1273)(S13I_W152C_L452R_D614G)
aggagacccgugacccggaaguuguacggcuacgcgacuuucccucccacaaacccucgcgcccuuccuuuccuacuugggcccggcagaaagcuuaccauguucguguuccuggugcugcugccccuggugagcauccagugcgugaaccugaccacccggacccagcugcccccugccuacaccaacagcuucacccggggcguguacuaccccgacaagguguuccggagcagcgugcugcacagcacccaggaccuguuccugcccuucuucagcaacgugaccugguuccacgccauccacgugagcggcaccaacggcaccaagcgguucgacaacccagugcugcccuucaacgacggcguguacuucgccagcaccgagaagucaaacaucauccggggcuggaucuucggcaccacccuggacagcaagacacagagccugcugaucgugaacaacgccaccaacguggugaucaaggugugcgaguuucaguucugcaacgaccccuuccugggcguguacuaccacaagaacaacaagagcugcauggagagcgaguuccgggucuacagcagcgcuaacaauugcaccuucgaguacgugagccagcccuuccugauggaccucgagggcaagcagggcaacuucaagaaccugcgggaguucguguucaagaacaucgauggcuacuucaagaucuacagcaagcacacccccaucaaccuggugcgggaccugccccagggauucagcgcccuggagccucugguggaccugcccaucggcaucaacaucaccagguuccagacccugcuggcccugcaccggagcuaccugacccccggcgacagcagcagcggcuggaccgccggcgccgccgcauacuacgugggcuaccugcagccacggaccuuccugcugaaguacaacgagaacggcaccaucaccgacgccguggacugcgcccuggacccccugagcgagaccaaguguacccuaaagagcuucaccguggagaagggcaucuaccagaccagcaacuuccgggugcagcccacugagagcauugugcgguuccccaacaucaccaaccugugccccuucggcgagguguucaacgccacccgguucgccagcguguacgccuggaaccggaagcggaucagcaacugcguggccgacuacagcgugcuguacaacagcgccagcuucagcaccuucaagugcuacggcgugagcccuaccaagcugaacgaccugugcuucaccaacguguacgcugacagcuucgugauccggggcgacgaggugcggcagaucgcccccggccagaccggcaagaucgccgacuacaacuacaagcugcccgacgacuucaccggcugcgugaucgccuggaacagcaacaaccuggacagcaaggugggcggcaacuacaacuaccgguaccggcuguuccguaagagcaaccugaagccauucgagcgggacaucagcaccgagaucuaccaggccggcagcacccccugcaacgguguggagggcuuuaacugcuacuucccccugcagagcuacggcuuccagcccaccaacggcgugggcuaccagcccuaccgggugguggugcugagcuucgagcugcugcacgcccccgccaccgugugcggcccuaaaaagagcaccaaccuggugaagaacaagugcgugaacuucaauuucaacggccugaccggcaccggcgugcugaccgagagcaacaagaaguuccugcccuuccagcaguucggccgggauaucgccgacaccaccgacgcagugcgggacccccagacccuggagauccuggacaucaccccaugcagcuucggcggcgugagcgucaucacccccggcacaaacaccagcaaccagguggccgugcuguaccagggagugaacugcaccgaggugcccguggccauccacgccgaccagcugacccccaccuggcggguguacagcaccggcagcaacguguuccagacccgggccggcugccugaucggcgccgagcacgugaacaacagcuacgagugcgacauccccaucggcgcuggcaucugugccuccuaccagacccagaccaacagcccccggcgggcccggagcguggccagccagagcaucaucgccuacaccaugagccugggcgccgagaacagcguggccuacagcaacaacagcaucgcgaucccuaccaacuucaccauaagcgugaccaccgagaucuuacccgugagcaugaccaagaccagcguggacugcaccauguacaucugcggcgacagcaccgagugcagcaaccugcugcugcaguacggcagcuucugcacccagcugaaccgggcccugaccggcaucgccguggagcaggacaagaacacccaagagguguucgcccaggugaagcagaucuacaagacucccccaaucaaggacuucggcggcuucaacuucagccagauccugcccgaccccagcaagcccagcaagcggagcuucaucgaggaccugcuguucaacaaggugacccuggccgacgccggcuucaucaagcaguacggcgacugccugggggauaucgccgcucgggaccugaucugcgcccagaaguucaacggccugaccgugcugcccccucugcugaccgacgagaugaucgcccaguacaccagcgcccugcuggccggcaccaucaccagcggcuggaccuucggcgccggcgcagcccuucagauccccuucgccaugcagauggccuacagguucaacggcaucggcgugacccagaacgugcuguacgagaaccagaagcugaucgccaaccaguucaacagcgccaucggcaagauccaggacagccugagcagcaccgccagcgcccugggcaagcugcaggacguggugaaccagaacgcucaggcccugaacacccuggugaagcagcugagcagcaacuucggcgccaucagcagcgugcugaaugacauccugucacggcuggacaagguggaggccgaggugcagaucgaccggcugaucaccggccggcugcagagccugcagaccuacgugacccagcagcugauccgggccgccgagauucgggccagcgccaaccuggcagccaccaagaugagcgagugcgugcugggccagagcaagcggguggacuuuugcggcaagggcuaccaccugaugagcuucccccagagcgccccacacggcgugguguuccugcacgucacauacgugcccgcccaggagaagaacuucaccaccgcccccgccaucugccacgacggcaaggcucacuucccccgggagggaguguucgugagcaacggcacccacugguucgugacccagcggaacuucuacgagccccagaucaucaccaccgacaacaccuucgugagcggcaacugcgacguggugaucggcaucgugaacaacaccguguacgacccccuccagccugagcuggacagcuucaaggaggagcuggacaaguacuucaagaaccacaccagccccgacguggaucugggcgacaucagcggcaucaacgccagcguggugaacauccagaaggagaucgaccggcugaacgagguggccaagaaccugaacgagagccugaucgaccugcaggagcugggcaaguacgagcaguacaucaaguggcccugguacaucuggcugggcuucaucgccggccugaucgccaucgugauggugaccaucaugcugugcugcaugaccagcuguugcagcugccugaagggcugcugcagcugcggcagcugcugcaaguucgacgaggacgacagcgagccagugcugaagggcgugaagcugcacuacaccugaggacuaguguccaccugucccuccugggcugcuggauugucucguuuuccugccaaauaaacaggaucagcgcuuuacagaucucaaaggcucuuuucagagccaccaaaaaaaaaaaaaaaaaaaaaaaaaaaaaaaaaaaaaaaaaaaaaaaaaaaaaaaaaaaaaaaaaaaaaaaaaaaaaaaaaaaaaaaaaaaaaaaaaaaaa

SEQ ID NO: 23921 - RNA, 4129 nt, Artificial Sequence
  SARS-CoV-2/Wuhan/WIV05/2019__EPI_ISL_402128 spike protein mRNA gc mod (1-1273)
aggagacccgugacccggaaguuguacggcuacgcgacuuucccucccacaaacccucgcgcccuuccuuuccuacuugggcccggcagaaagcuuaccauguucguguuucuggugcugcugccccugguguccagccagugugugaaccugaccaccagaacacagcugccuccagccuacaccaacagcuucaccagaggcguguacuaccccgacaagguguucagauccagcgugcugcacucuacccaggaccuguuccugccuuucuucagcaacgugaccugguuccacgccauccacguguccggcaccaauggcaccaagagauucgacaaccccgugcugcccuucaacgacgggguguacuuugccagcaccgagaaguccaacaucaucagaggcuggaucuucggcaccacacuggacagcaagacccagagccugcugaucgugaacaacgccaccaacguggucaucaaagugugcgaguuccaguucugcaacgaccccuuccugggcgucuacuaccacaagaacaacaagagcuggauggaaagcgaguuccggguguacagcagcgccaacaacugcaccuucgaguacgugucccagccuuuccugauggaccuggaaggcaagcagggcaacuucaagaaccugcgcgaguucguguucaagaacaucgacggcuacuucaaaaucuacagcaagcacaccccuaucaaccucgugcgggaucugccucagggcuucucugcucuggaaccccugguggaucugcccaucggcaucaacaucacccgguuucagacacugcuggcccugcacagaagcuaccugacaccuggcgauagcagcagcggauggacagcuggugccgccgcuuacuaugugggcuaccugcagccuagaaccuuccugcugaaguacaacgagaacggcaccaucaccgacgccguggauugugcucuggauccucugagcgagacaaagugcacccugaaguccuucaccguggaaaagggcaucuaccagaccagcaacuuccgggugcagcccaccgaauccaucgugcgguuccccaauaucaccaaucugugccccuucggcgagguguucaaugccaccagauucgccucuguguacgccuggaaccggaagcggaucagcaauugcguggccgacuacuccgugcuguacaacuccgccagcuucagcaccuucaagugcuacggcguguccccuaccaagcugaacgaccugugcuucacaaacguguacgccgacagcuucgugauccggggagaugaagugcggcagauugccccuggacagacaggcaagaucgccgacuacaacuacaagcugcccgacgacuucaccggcugugugauugccuggaacagcaacaaccuggacuccaaagucggcggcaacuacaauuaccuguaccggcuguuccggaaguccaaucugaagcccuucgagcgggacaucagcaccgaaaucuaucaggccggcagcaccccuugcaacggcguggaaggcuucaacugcuacuucccacugcaguccuacggcuuucagcccacaaauggcgugggcuaucagcccuacagagugguggugcugagcuucgaacugcugcaugcuccugccacagugugcggcccuaagaaaagcaccaaucucgugaagaacaaaugcgugaacuucaacuucaacggccugaccggcaccggcgugcugacagagagcaacaagaaguuccugccauuccagcaguuuggccgggauaucgccgauaccacagacgccguuagagauccccagacacuggaaauccuggacaucaccccaugcagcuucggcggagugucugugaucaccccuggcaccaacaccagcaaucagguggcagugcuguaccaggacgugaacuguaccgaagugcccguggccauucacgccgaucagcugacaccuacauggcggguguacuccaccggcagcaauguguuucagaccagagccggcugucugaucggagccgagcacgugaacaauagcuacgagugcgacauccccaucggcgcuggcaucugugccagcuaccagacacagacaaacagccccagacgggcuagaagcguggccagccagagcaucauugccuacacaaugucucugggcgccgagaacagcguggccuacuccaacaacucuaucgcuauccccaccaacuucaccaucagcgugaccaccgagauccugccuguguccaugaccaagaccagcguggacugcaccauguacaucugcggcgauuccaccgagugcuccaaccugcugcugcaguacggcagcuucugcacccagcugaauagagcccugacagggaucgccguggaacaggacaagaacacccaagagguguucgcccaagugaagcaaaucuacaagaccccuccuaucaaggacuucggcggcuucaauuucagccagauucugcccgauccuagcaagcccagcaagcggagcuucaucgaggaccugcuguucaacaaagugacacuggccgacgccggcuucaucaagcaguauggcgauugucugggcgacauugccgccagggaucugauuugcgcccagaaguuuaacggacugacagugcugccuccucugcugaccgaugagaugaucgcccaguacacaucugcccugcuggccggcacaaucacaagcggcuggacauuuggagcuggcgccgcucugcagauccccuuugcuaugcagauggccuaccgguucaacggcaucggagugacccagaaugugcuguacgagaaccagaagcugaucgccaaccaguucaacagcgccaucggcaagauccaggacagccugagcagcacagcaagcgcccugggaaagcugcaggacguggucaaccagaaugcccaggcacugaacacccuggucaagcagcuguccuccaacuucggcgccaucagcucugugcugaacgauauccugagcagacuggacaaggucgaggccgaggugcagaucgacagacugaucacaggcagacugcagagccuccagacauacgugacccagcagcugaucagagccgccgagauuagagccucugccaaucuggccgccaccaagaugucugagugugugcugggccagagcaagagaguggacuuuugcggcaagggcuaccaccugaugagcuucccucagucugccccucacggcgugguguuucugcacgugacauaugugcccgcucaagagaagaauuucaccaccgcuccagccaucugccacgacggcaaagcccacuuuccuagagaaggcguguucguguccaacggcacccauugguucgugacacagcggaacuucuacgagccccagaucaucaccaccgacaacaccuucgugucuggcaacugcgacguugugaucggcauugugaacaauaccguguacgacccucugcagcccgagcuggacagcuucaaagaggaacuggacaaguacuuuaagaaccacacaagccccgacguggaccugggcgauaucagcggaaucaaugccagcgucgugaacauccagaaagagaucgaccggcugaacgagguggccaagaaucugaacgagagccugaucgaccugcaagaacuggggaaguacgagcaguacaucaaguggcccugguacaucuggcugggcuuuaucgccggacugauugccaucgugauggucacaaucaugcuguguugcaugaccagcugcuguagcugccugaagggcuguuguagcuguggcagcugcugcaaguucgacgaggacgauucugagcccgugcugaagggcgugaaacugcacuacaccugaggacuaguguccaccugucccuccugggcugcuggauugucucguuuuccugccaaauaaacaggaucagcgcuuuacagaucucaaaggcucuuuucagagccaccaaaaaaaaaaaaaaaaaaaaaaaaaaaaaaaaaaaaaaaaaaaaaaaaaaaaaaaaaaaaaaaaaaaaaaaaaaaaaaaaaaaaaaaaaaaaaaaaaaaaa

SEQ ID NO: 23922 - RNA, 4129 nt, Artificial Sequence
  SARS-CoV-2/Wuhan/WIV05/2019__EPI_ISL_402128 spike protein mRNA gc mod (1-1273)(D614G)
aggagacccgugacccggaaguuguacggcuacgcgacuuucccucccacaaacccucgcgcccuuccuuuccuacuugggcccggcagaaagcuuaccauguucguguuucuggugcugcugccccugguguccagccagugugugaaccugaccaccagaacacagcugccuccagccuacaccaacagcuucaccagaggcguguacuaccccgacaagguguucagauccagcgugcugcacucuacccaggaccuguuccugccuuucuucagcaacgugaccugguuccacgccauccacguguccggcaccaauggcaccaagagauucgacaaccccgugcugcccuucaacgacgggguguacuuugccagcaccgagaaguccaacaucaucagaggcuggaucuucggcaccacacuggacagcaagacccagagccugcugaucgugaacaacgccaccaacguggucaucaaagugugcgaguuccaguucugcaacgaccccuuccugggcgucuacuaccacaagaacaacaagagcuggauggaaagcgaguuccggguguacagcagcgccaacaacugcaccuucgaguacgugucccagccuuuccugauggaccuggaaggcaagcagggcaacuucaagaaccugcgcgaguucguguucaagaacaucgacggcuacuucaaaaucuacagcaagcacaccccuaucaaccucgugcgggaucugccucagggcuucucugcucuggaaccccugguggaucugcccaucggcaucaacaucacccgguuucagacacugcuggcccugcacagaagcuaccugacaccuggcgauagcagcagcggauggacagcuggugccgccgcuuacuaugugggcuaccugcagccuagaaccuuccugcugaaguacaacgagaacggcaccaucaccgacgccguggauugugcucuggauccucugagcgagacaaagugcacccugaaguccuucaccguggaaaagggcaucuaccagaccagcaacuuccgggugcagcccaccgaauccaucgugcgguuccccaauaucaccaaucugugccccuucggcgagguguucaaugccaccagauucgccucuguguacgccuggaaccggaagcggaucagcaauugcguggccgacuacuccgugcuguacaacuccgccagcuucagcaccuucaagugcuacggcguguccccuaccaagcugaacgaccugugcuucacaaacguguacgccgacagcuucgugauccggggagaugaagugcggcagauugccccuggacagacaggcaagaucgccgacuacaacuacaagcugcccgacgacuucaccggcugugugauugccuggaacagcaacaaccuggacuccaaagucggcggcaacuacaauuaccuguaccggcuguuccggaaguccaaucugaagcccuucgagcgggacaucagcaccgaaaucuaucaggccggcagcaccccuugcaacggcguggaaggcuucaacugcuacuucccacugcaguccuacggcuuucagcccacaaauggcgugggcuaucagcccuacagagugguggugcugagcuucgaacugcugcaugcuccugccacagugugcggcccuaagaaaagcaccaaucucgugaagaacaaaugcgugaacuucaacuucaacggccugaccggcaccggcgugcugacagagagcaacaagaaguuccugccauuccagcaguuuggccgggauaucgccgauaccacagacgccguuagagauccccagacacuggaaauccuggacaucaccccaugcagcuucggcggagugucugugaucaccccuggcaccaacaccagcaaucagguggcagugcuguaccagggcgugaacuguaccgaagugcccguggccauucacgccgaucagcugacaccuacauggcggguguacuccaccggcagcaauguguuucagaccagagccggcugucugaucggagccgagcacgugaacaauagcuacgagugcgacauccccaucggcgcuggcaucugugccagcuaccagacacagacaaacagccccagacgggcuagaagcguggccagccagagcaucauugccuacacaaugucucugggcgccgagaacagcguggccuacuccaacaacucuaucgcuauccccaccaacuucaccaucagcgugaccaccgagauccugccuguguccaugaccaagaccagcguggacugcaccauguacaucugcggcgauuccaccgagugcuccaaccugcugcugcaguacggcagcuucugcacccagcugaauagagcccugacagggaucgccguggaacaggacaagaacacccaagagguguucgcccaagugaagcaaaucuacaagaccccuccuaucaaggacuucggcggcuucaauuucagccagauucugcccgauccuagcaagcccagcaagcggagcuucaucgaggaccugcuguucaacaaagugacacuggccgacgccggcuucaucaagcaguauggcgauugucugggcgacauugccgccagggaucugauuugcgcccagaaguuuaacggacugacagugcugccuccucugcugaccgaugagaugaucgcccaguacacaucugcccugcuggccggcacaaucacaagcggcuggacauuuggagcuggcgccgcucugcagauccccuuugcuaugcagauggccuaccgguucaacggcaucggagugacccagaaugugcuguacgagaaccagaagcugaucgccaaccaguucaacagcgccaucggcaagauccaggacagccugagcagcacagcaagcgcccugggaaagcugcaggacguggucaaccagaaugcccaggcacugaacacccuggucaagcagcuguccuccaacuucggcgccaucagcucugugcugaacgauauccugagcagacuggacaaggucgaggccgaggugcagaucgacagacugaucacaggcagacugcagagccuccagacauacgugacccagcagcugaucagagccgccgagauuagagccucugccaaucuggccgccaccaagaugucugagugugugcugggccagagcaagagaguggacuuuugcggcaagggcuaccaccugaugagcuucccucagucugccccucacggcgugguguuucugcacgugacauaugugcccgcucaagagaagaauuucaccaccgcuccagccaucugccacgacggcaaagcccacuuuccuagagaaggcguguucguguccaacggcacccauugguucgugacacagcggaacuucuacgagccccagaucaucaccaccgacaacaccuucgugucuggcaacugcgacguugugaucggcauugugaacaauaccguguacgacccucugcagcccgagcuggacagcuucaaagaggaacuggacaaguacuuuaagaaccacacaagccccgacguggaccugggcgauaucagcggaaucaaugccagcgucgugaacauccagaaagagaucgaccggcugaacgagguggccaagaaucugaacgagagccugaucgaccugcaagaacuggggaaguacgagcaguacaucaaguggcccugguacaucuggcugggcuuuaucgccggacugauugccaucgugauggucacaaucaugcuguguugcaugaccagcugcuguagcugccugaagggcuguuguagcuguggcagcugcugcaaguucgacgaggacgauucugagcccgugcugaagggcgugaaacugcacuacaccugaggacuaguguccaccugucccuccugggcugcuggauugucucguuuuccugccaaauaaacaggaucagcgcuuuacagaucucaaaggcucuuuucagagccaccaaaaaaaaaaaaaaaaaaaaaaaaaaaaaaaaaaaaaaaaaaaaaaaaaaaaaaaaaaaaaaaaaaaaaaaaaaaaaaaaaaaaaaaaaaaaaaaaaaaaa

SEQ ID NO: 23923 - RNA, 4129 nt, Artificial Sequence
  SARS-CoV-2/Wuhan/WIV05/2019__EPI_ISL_402128 spike protein mRNA gc mod (1-1273)(A222V_D614G)
aggagacccgugacccggaaguuguacggcuacgcgacuuucccucccacaaacccucgcgcccuuccuuuccuacuugggcccggcagaaagcuuaccauguucguguuucuggugcugcugccccugguguccagccagugugugaaccugaccaccagaacacagcugccuccagccuacaccaacagcuucaccagaggcguguacuaccccgacaagguguucagauccagcgugcugcacucuacccaggaccuguuccugccuuucuucagcaacgugaccugguuccacgccauccacguguccggcaccaauggcaccaagagauucgacaaccccgugcugcccuucaacgacgggguguacuuugccagcaccgagaaguccaacaucaucagaggcuggaucuucggcaccacacuggacagcaagacccagagccugcugaucgugaacaacgccaccaacguggucaucaaagugugcgaguuccaguucugcaacgaccccuuccugggcgucuacuaccacaagaacaacaagagcuggauggaaagcgaguuccggguguacagcagcgccaacaacugcaccuucgaguacgugucccagccuuuccugauggaccuggaaggcaagcagggcaacuucaagaaccugcgcgaguucguguucaagaacaucgacggcuacuucaaaaucuacagcaagcacaccccuaucaaccucgugcgggaucugccucagggcuucucugugcuggaaccccugguggaucugcccaucggcaucaacaucacccgguuucagacacugcuggcccugcacagaagcuaccugacaccuggcgauagcagcagcggauggacagcuggugccgccgcuuacuaugugggcuaccugcagccuagaaccuuccugcugaaguacaacgagaacggcaccaucaccgacgccguggauugugcucuggauccucugagcgagacaaagugcacccugaaguccuucaccguggaaaagggcaucuaccagaccagcaacuuccgggugcagcccaccgaauccaucgugcgguuccccaauaucaccaaucugugccccuucggcgagguguucaaugccaccagauucgccucuguguacgccuggaaccggaagcggaucagcaauugcguggccgacuacuccgugcuguacaacuccgccagcuucagcaccuucaagugcuacggcguguccccuaccaagcugaacgaccugugcuucacaaacguguacgccgacagcuucgugauccggggagaugaagugcggcagauugccccuggacagacaggcaagaucgccgacuacaacuacaagcugcccgacgacuucaccggcugugugauugccuggaacagcaacaaccuggacuccaaagucggcggcaacuacaauuaccuguaccggcuguuccggaaguccaaucugaagcccuucgagcgggacaucagcaccgaaaucuaucaggccggcagcaccccuugcaacggcguggaaggcuucaacugcuacuucccacugcaguccuacggcuuucagcccacaaauggcgugggcuaucagcccuacagagugguggugcugagcuucgaacugcugcaugcuccugccacagugugcggcccuaagaaaagcaccaaucucgugaagaacaaaugcgugaacuucaacuucaacggccugaccggcaccggcgugcugacagagagcaacaagaaguuccugccauuccagcaguuuggccgggauaucgccgauaccacagacgccguuagagauccccagacacuggaaauccuggacaucaccccaugcagcuucggcggagugucugugaucaccccuggcaccaacaccagcaaucagguggcagugcuguaccagggcgugaacuguaccgaagugcccguggccauucacgccgaucagcugacaccuacauggcggguguacuccaccggcagcaauguguuucagaccagagccggcugucugaucggagccgagcacgugaacaauagcuacgagugcgacauccccaucggcgcuggcaucugugccagcuaccagacacagacaaacagccccagacgggcuagaagcguggccagccagagcaucauugccuacacaaugucucugggcgccgagaacagcguggccuacuccaacaacucuaucgcuauccccaccaacuucaccaucagcgugaccaccgagauccugccuguguccaugaccaagaccagcguggacugcaccauguacaucugcggcgauuccaccgagugcuccaaccugcugcugcaguacggcagcuucugcacccagcugaauagagcccugacagggaucgccguggaacaggacaagaacacccaagagguguucgcccaagugaagcaaaucuacaagaccccuccuaucaaggacuucggcggcuucaauuucagccagauucugcccgauccuagcaagcccagcaagcggagcuucaucgaggaccugcuguucaacaaagugacacuggccgacgccggcuucaucaagcaguauggcgauugucugggcgacauugccgccagggaucugauuugcgcccagaaguuuaacggacugacagugcugccuccucugcugaccgaugagaugaucgcccaguacacaucugcccugcuggccggcacaaucacaagcggcuggacauuuggagcuggcgccgcucugcagauccccuuugcuaugcagauggccuaccgguucaacggcaucggagugacccagaaugugcuguacgagaaccagaagcugaucgccaaccaguucaacagcgccaucggcaagauccaggacagccugagcagcacagcaagcgcccugggaaagcugcaggacguggucaaccagaaugcccaggcacugaacacccuggucaagcagcuguccuccaacuucggcgccaucagcucugugcugaacgauauccugagcagacuggacaaggucgaggccgaggugcagaucgacagacugaucacaggcagacugcagagccuccagacauacgugacccagcagcugaucagagccgccgagauuagagccucugccaaucuggccgccaccaagaugucugagugugugcugggccagagcaagagaguggacuuuugcggcaagggcuaccaccugaugagcuucccucagucugccccucacggcgugguguuucugcacgugacauaugugcccgcucaagagaagaauuucaccaccgcuccagccaucugccacgacggcaaagcccacuuuccuagagaaggcguguucguguccaacggcacccauugguucgugacacagcggaacuucuacgagccccagaucaucaccaccgacaacaccuucgugucuggcaacugcgacguugugaucggcauugugaacaauaccguguacgacccucugcagcccgagcuggacagcuucaaagaggaacuggacaaguacuuuaagaaccacacaagccccgacguggaccugggcgauaucagcggaaucaaugccagcgucgugaacauccagaaagagaucgaccggcugaacgagguggccaagaaucugaacgagagccugaucgaccugcaagaacuggggaaguacgagcaguacaucaaguggcccugguacaucuggcugggcuuuaucgccggacugauugccaucgugauggucacaaucaugcuguguugcaugaccagcugcuguagcugccugaagggcuguuguagcuguggcagcugcugcaaguucgacgaggacgauucugagcccgugcugaagggcgugaaacugcacuacaccugaggacuaguguccaccugucccuccugggcugcuggauugucucguuuuccugccaaauaaacaggaucagcgcuuuacagaucucaaaggcucuuuucagagccaccaaaaaaaaaaaaaaaaaaaaaaaaaaaaaaaaaaaaaaaaaaaaaaaaaaaaaaaaaaaaaaaaaaaaaaaaaaaaaaaaaaaaaaaaaaaaaaaaaaaaa

SEQ ID NO: 23924 - RNA, 4129 nt, Artificial Sequence
  SARS-CoV-2/Wuhan/WIV05/2019__EPI_ISL_402128 spike protein mRNA gc mod (1-1273)(N439K_D614G)
aggagacccgugacccggaaguuguacggcuacgcgacuuucccucccacaaacccucgcgcccuuccuuuccuacuugggcccggcagaaagcuuaccauguucguguuucuggugcugcugccccugguguccagccagugugugaaccugaccaccagaacacagcugccuccagccuacaccaacagcuucaccagaggcguguacuaccccgacaagguguucagauccagcgugcugcacucuacccaggaccuguuccugccuuucuucagcaacgugaccugguuccacgccauccacguguccggcaccaauggcaccaagagauucgacaaccccgugcugcccuucaacgacgggguguacuuugccagcaccgagaaguccaacaucaucagaggcuggaucuucggcaccacacuggacagcaagacccagagccugcugaucgugaacaacgccaccaacguggucaucaaagugugcgaguuccaguucugcaacgaccccuuccugggcgucuacuaccacaagaacaacaagagcuggauggaaagcgaguuccggguguacagcagcgccaacaacugcaccuucgaguacgugucccagccuuuccugauggaccuggaaggcaagcagggcaacuucaagaaccugcgcgaguucguguucaagaacaucgacggcuacuucaaaaucuacagcaagcacaccccuaucaaccucgugcgggaucugccucagggcuucucugcucuggaaccccugguggaucugcccaucggcaucaacaucacccgguuucagacacugcuggcccugcacagaagcuaccugacaccuggcgauagcagcagcggauggacagcuggugccgccgcuuacuaugugggcuaccugcagccuagaaccuuccugcugaaguacaacgagaacggcaccaucaccgacgccguggauugugcucuggauccucugagcgagacaaagugcacccugaaguccuucaccguggaaaagggcaucuaccagaccagcaacuuccgggugcagcccaccgaauccaucgugcgguuccccaauaucaccaaucugugccccuucggcgagguguucaaugccaccagauucgccucuguguacgccuggaaccggaagcggaucagcaauugcguggccgacuacuccgugcuguacaacuccgccagcuucagcaccuucaagugcuacggcguguccccuaccaagcugaacgaccugugcuucacaaacguguacgccgacagcuucgugauccggggagaugaagugcggcagauugccccuggacagacaggcaagaucgccgacuacaacuacaagcugcccgacgacuucaccggcugugugauugccuggaacagcaagaaccuggacuccaaagucggcggcaacuacaauuaccuguaccggcuguuccggaaguccaaucugaagcccuucgagcgggacaucagcaccgaaaucuaucaggccggcagcaccccuugcaacggcguggaaggcuucaacugcuacuucccacugcaguccuacggcuuucagcccacaaauggcgugggcuaucagcccuacagagugguggugcugagcuucgaacugcugcaugcuccugccacagugugcggcccuaagaaaagcaccaaucucgugaagaacaaaugcgugaacuucaacuucaacggccugaccggcaccggcgugcugacagagagcaacaagaaguuccugccauuccagcaguuuggccgggauaucgccgauaccacagacgccguuagagauccccagacacuggaaauccuggacaucaccccaugcagcuucggcggagugucugugaucaccccuggcaccaacaccagcaaucagguggcagugcuguaccagggcgugaacuguaccgaagugcccguggccauucacgccgaucagcugacaccuacauggcggguguacuccaccggcagcaauguguuucagaccagagccggcugucugaucggagccgagcacgugaacaauagcuacgagugcgacauccccaucggcgcuggcaucugugccagcuaccagacacagacaaacagccccagacgggcuagaagcguggccagccagagcaucauugccuacacaaugucucugggcgccgagaacagcguggccuacuccaacaacucuaucgcuauccccaccaacuucaccaucagcgugaccaccgagauccugccuguguccaugaccaagaccagcguggacugcaccauguacaucugcggcgauuccaccgagugcuccaaccugcugcugcaguacggcagcuucugcacccagcugaauagagcccugacagggaucgccguggaacaggacaagaacacccaagagguguucgcccaagugaagcaaaucuacaagaccccuccuaucaaggacuucggcggcuucaauuucagccagauucugcccgauccuagcaagcccagcaagcggagcuucaucgaggaccugcuguucaacaaagugacacuggccgacgccggcuucaucaagcaguauggcgauugucugggcgacauugccgccagggaucugauuugcgcccagaaguuuaacggacugacagugcugccuccucugcugaccgaugagaugaucgcccaguacacaucugcccugcuggccggcacaaucacaagcggcuggacauuuggagcuggcgccgcucugcagauccccuuugcuaugcagauggccuaccgguucaacggcaucggagugacccagaaugugcuguacgagaaccagaagcugaucgccaaccaguucaacagcgccaucggcaagauccaggacagccugagcagcacagcaagcgcccugggaaagcugcaggacguggucaaccagaaugcccaggcacugaacacccuggucaagcagcuguccuccaacuucggcgccaucagcucugugcugaacgauauccugagcagacuggacaaggucgaggccgaggugcagaucgacagacugaucacaggcagacugcagagccuccagacauacgugacccagcagcugaucagagccgccgagauuagagccucugccaaucuggccgccaccaagaugucugagugugugcugggccagagcaagagaguggacuuuugcggcaagggcuaccaccugaugagcuucccucagucugccccucacggcgugguguuucugcacgugacauaugugcccgcucaagagaagaauuucaccaccgcuccagccaucugccacgacggcaaagcccacuuuccuagagaaggcguguucguguccaacggcacccauugguucgugacacagcggaacuucuacgagccccagaucaucaccaccgacaacaccuucgugucuggcaacugcgacguugugaucggcauugugaacaauaccguguacgacccucugcagcccgagcuggacagcuucaaagaggaacuggacaaguacuuuaagaaccacacaagccccgacguggaccugggcgauaucagcggaaucaaugccagcgucgugaacauccagaaagagaucgaccggcugaacgagguggccaagaaucugaacgagagccugaucgaccugcaagaacuggggaaguacgagcaguacaucaaguggcccugguacaucuggcugggcuuuaucgccggacugauugccaucgugauggucacaaucaugcuguguugcaugaccagcugcuguagcugccugaagggcuguuguagcuguggcagcugcugcaaguucgacgaggacgauucugagcccgugcugaagggcgugaaacugcacuacaccugaggacuaguguccaccugucccuccugggcugcuggauugucucguuuuccugccaaauaaacaggaucagcgcuuuacagaucucaaaggcucuuuucagagccaccaaaaaaaaaaaaaaaaaaaaaaaaaaaaaaaaaaaaaaaaaaaaaaaaaaaaaaaaaaaaaaaaaaaaaaaaaaaaaaaaaaaaaaaaaaaaaaaaaaaaa

SEQ ID NO: 23925 - RNA, 4129 nt, Artificial Sequence
  SARS-CoV-2/Wuhan/WIV05/2019__EPI_ISL_402128 spike protein mRNA gc mod (1-1273)(S477N_D614G)
aggagacccgugacccggaaguuguacggcuacgcgacuuucccucccacaaacccucgcgcccuuccuuuccuacuugggcccggcagaaagcuuaccauguucguguuucuggugcugcugccccugguguccagccagugugugaaccugaccaccagaacacagcugccuccagccuacaccaacagcuucaccagaggcguguacuaccccgacaagguguucagauccagcgugcugcacucuacccaggaccuguuccugccuuucuucagcaacgugaccugguuccacgccauccacguguccggcaccaauggcaccaagagauucgacaaccccgugcugcccuucaacgacgggguguacuuugccagcaccgagaaguccaacaucaucagaggcuggaucuucggcaccacacuggacagcaagacccagagccugcugaucgugaacaacgccaccaacguggucaucaaagugugcgaguuccaguucugcaacgaccccuuccugggcgucuacuaccacaagaacaacaagagcuggauggaaagcgaguuccggguguacagcagcgccaacaacugcaccuucgaguacgugucccagccuuuccugauggaccuggaaggcaagcagggcaacuucaagaaccugcgcgaguucguguucaagaacaucgacggcuacuucaaaaucuacagcaagcacaccccuaucaaccucgugcgggaucugccucagggcuucucugcucuggaaccccugguggaucugcccaucggcaucaacaucacccgguuucagacacugcuggcccugcacagaagcuaccugacaccuggcgauagcagcagcggauggacagcuggugccgccgcuuacuaugugggcuaccugcagccuagaaccuuccugcugaaguacaacgagaacggcaccaucaccgacgccguggauugugcucuggauccucugagcgagacaaagugcacccugaaguccuucaccguggaaaagggcaucuaccagaccagcaacuuccgggugcagcccaccgaauccaucgugcgguuccccaauaucaccaaucugugccccuucggcgagguguucaaugccaccagauucgccucuguguacgccuggaaccggaagcggaucagcaauugcguggccgacuacuccgugcuguacaacuccgccagcuucagcaccuucaagugcuacggcguguccccuaccaagcugaacgaccugugcuucacaaacguguacgccgacagcuucgugauccggggagaugaagugcggcagauugccccuggacagacaggcaagaucgccgacuacaacuacaagcugcccgacgacuucaccggcugugugauugccuggaacagcaacaaccuggacuccaaagucggcggcaacuacaauuaccuguaccggcuguuccggaaguccaaucugaagcccuucgagcgggacaucagcaccgaaaucuaucaggccggcaacaccccuugcaacggcguggaaggcuucaacugcuacuucccacugcaguccuacggcuuucagcccacaaauggcgugggcuaucagcccuacagagugguggugcugagcuucgaacugcugcaugcuccugccacagugugcggcccuaagaaaagcaccaaucucgugaagaacaaaugcgugaacuucaacuucaacggccugaccggcaccggcgugcugacagagagcaacaagaaguuccugccauuccagcaguuuggccgggauaucgccgauaccacagacgccguuagagauccccagacacuggaaauccuggacaucaccccaugcagcuucggcggagugucugugaucaccccuggcaccaacaccagcaaucagguggcagugcuguaccagggcgugaacuguaccgaagugcccguggccauucacgccgaucagcugacaccuacauggcggguguacuccaccggcagcaauguguuucagaccagagccggcugucugaucggagccgagcacgugaacaauagcuacgagugcgacauccccaucggcgcuggcaucugugccagcuaccagacacagacaaacagccccagacgggcuagaagcguggccagccagagcaucauugccuacacaaugucucugggcgccgagaacagcguggccuacuccaacaacucuaucgcuauccccaccaacuucaccaucagcgugaccaccgagauccugccuguguccaugaccaagaccagcguggacugcaccauguacaucugcggcgauuccaccgagugcuccaaccugcugcugcaguacggcagcuucugcacccagcugaauagagcccugacagggaucgccguggaacaggacaagaacacccaagagguguucgcccaagugaagcaaaucuacaagaccccuccuaucaaggacuucggcggcuucaauuucagccagauucugcccgauccuagcaagcccagcaagcggagcuucaucgaggaccugcuguucaacaaagugacacuggccgacgccggcuucaucaagcaguauggcgauugucugggcgacauugccgccagggaucugauuugcgcccagaaguuuaacggacugacagugcugccuccucugcugaccgaugagaugaucgcccaguacacaucugcccugcuggccggcacaaucacaagcggcuggacauuuggagcuggcgccgcucugcagauccccuuugcuaugcagauggccuaccgguucaacggcaucggagugacccagaaugugcuguacgagaaccagaagcugaucgccaaccaguucaacagcgccaucggcaagauccaggacagccugagcagcacagcaagcgcccugggaaagcugcaggacguggucaaccagaaugcccaggcacugaacacccuggucaagcagcuguccuccaacuucggcgccaucagcucugugcugaacgauauccugagcagacuggacaaggucgaggccgaggugcagaucgacagacugaucacaggcagacugcagagccuccagacauacgugacccagcagcugaucagagccgccgagauuagagccucugccaaucuggccgccaccaagaugucugagugugugcugggccagagcaagagaguggacuuuugcggcaagggcuaccaccugaugagcuucccucagucugccccucacggcgugguguuucugcacgugacauaugugcccgcucaagagaagaauuucaccaccgcuccagccaucugccacgacggcaaagcccacuuuccuagagaaggcguguucguguccaacggcacccauugguucgugacacagcggaacuucuacgagccccagaucaucaccaccgacaacaccuucgugucuggcaacugcgacguugugaucggcauugugaacaauaccguguacgacccucugcagcccgagcuggacagcuucaaagaggaacuggacaaguacuuuaagaaccacacaagccccgacguggaccugggcgauaucagcggaaucaaugccagcgucgugaacauccagaaagagaucgaccggcugaacgagguggccaagaaucugaacgagagccugaucgaccugcaagaacuggggaaguacgagcaguacaucaaguggcccugguacaucuggcugggcuuuaucgccggacugauugccaucgugauggucacaaucaugcuguguugcaugaccagcugcuguagcugccugaagggcuguuguagcuguggcagcugcugcaaguucgacgaggacgauucugagcccgugcugaagggcgugaaacugcacuacaccugaggacuaguguccaccugucccuccugggcugcuggauugucucguuuuccugccaaauaaacaggaucagcgcuuuacagaucucaaaggcucuuuucagagccaccaaaaaaaaaaaaaaaaaaaaaaaaaaaaaaaaaaaaaaaaaaaaaaaaaaaaaaaaaaaaaaaaaaaaaaaaaaaaaaaaaaaaaaaaaaaaaaaaaaaaa

SEQ ID NO: 23926 - RNA, 4129 nt, Artificial Sequence
  SARS-CoV-2/Wuhan/WIV05/2019__EPI_ISL_402128 spike protein mRNA gc mod (1-1273)(N501Y_D614G)
aggagacccgugacccggaaguuguacggcuacgcgacuuucccucccacaaacccucgcgcccuuccuuuccuacuugggcccggcagaaagcuuaccauguucguguuucuggugcugcugccccugguguccagccagugugugaaccugaccaccagaacacagcugccuccagccuacaccaacagcuucaccagaggcguguacuaccccgacaagguguucagauccagcgugcugcacucuacccaggaccuguuccugccuuucuucagcaacgugaccugguuccacgccauccacguguccggcaccaauggcaccaagagauucgacaaccccgugcugcccuucaacgacgggguguacuuugccagcaccgagaaguccaacaucaucagaggcuggaucuucggcaccacacuggacagcaagacccagagccugcugaucgugaacaacgccaccaacguggucaucaaagugugcgaguuccaguucugcaacgaccccuuccugggcgucuacuaccacaagaacaacaagagcuggauggaaagcgaguuccggguguacagcagcgccaacaacugcaccuucgaguacgugucccagccuuuccugauggaccuggaaggcaagcagggcaacuucaagaaccugcgcgaguucguguucaagaacaucgacggcuacuucaaaaucuacagcaagcacaccccuaucaaccucgugcgggaucugccucagggcuucucugcucuggaaccccugguggaucugcccaucggcaucaacaucacccgguuucagacacugcuggcccugcacagaagcuaccugacaccuggcgauagcagcagcggauggacagcuggugccgccgcuuacuaugugggcuaccugcagccuagaaccuuccugcugaaguacaacgagaacggcaccaucaccgacgccguggauugugcucuggauccucugagcgagacaaagugcacccugaaguccuucaccguggaaaagggcaucuaccagaccagcaacuuccgggugcagcccaccgaauccaucgugcgguuccccaauaucaccaaucugugccccuucggcgagguguucaaugccaccagauucgccucuguguacgccuggaaccggaagcggaucagcaauugcguggccgacuacuccgugcuguacaacuccgccagcuucagcaccuucaagugcuacggcguguccccuaccaagcugaacgaccugugcuucacaaacguguacgccgacagcuucgugauccggggagaugaagugcggcagauugccccuggacagacaggcaagaucgccgacuacaacuacaagcugcccgacgacuucaccggcugugugauugccuggaacagcaacaaccuggacuccaaagucggcggcaacuacaauuaccuguaccggcuguuccggaaguccaaucugaagcccuucgagcgggacaucagcaccgaaaucuaucaggccggcagcaccccuugcaacggcguggaaggcuucaacugcuacuucccacugcaguccuacggcuuucagcccacauacggcgugggcuaucagcccuacagagugguggugcugagcuucgaacugcugcaugcuccugccacagugugcggcccuaagaaaagcaccaaucucgugaagaacaaaugcgugaacuucaacuucaacggccugaccggcaccggcgugcugacagagagcaacaagaaguuccugccauuccagcaguuuggccgggauaucgccgauaccacagacgccguuagagauccccagacacuggaaauccuggacaucaccccaugcagcuucggcggagugucugugaucaccccuggcaccaacaccagcaaucagguggcagugcuguaccagggcgugaacuguaccgaagugcccguggccauucacgccgaucagcugacaccuacauggcggguguacuccaccggcagcaauguguuucagaccagagccggcugucugaucggagccgagcacgugaacaauagcuacgagugcgacauccccaucggcgcuggcaucugugccagcuaccagacacagacaaacagccccagacgggcuagaagcguggccagccagagcaucauugccuacacaaugucucugggcgccgagaacagcguggccuacuccaacaacucuaucgcuauccccaccaacuucaccaucagcgugaccaccgagauccugccuguguccaugaccaagaccagcguggacugcaccauguacaucugcggcgauuccaccgagugcuccaaccugcugcugcaguacggcagcuucugcacccagcugaauagagcccugacagggaucgccguggaacaggacaagaacacccaagagguguucgcccaagugaagcaaaucuacaagaccccuccuaucaaggacuucggcggcuucaauuucagccagauucugcccgauccuagcaagcccagcaagcggagcuucaucgaggaccugcuguucaacaaagugacacuggccgacgccggcuucaucaagcaguauggcgauugucugggcgacauugccgccagggaucugauuugcgcccagaaguuuaacggacugacagugcugccuccucugcugaccgaugagaugaucgcccaguacacaucugcccugcuggccggcacaaucacaagcggcuggacauuuggagcuggcgccgcucugcagauccccuuugcuaugcagauggccuaccgguucaacggcaucggagugacccagaaugugcuguacgagaaccagaagcugaucgccaaccaguucaacagcgccaucggcaagauccaggacagccugagcagcacagcaagcgcccugggaaagcugcaggacguggucaaccagaaugcccaggcacugaacacccuggucaagcagcuguccuccaacuucggcgccaucagcucugugcugaacgauauccugagcagacuggacaaggucgaggccgaggugcagaucgacagacugaucacaggcagacugcagagccuccagacauacgugacccagcagcugaucagagccgccgagauuagagccucugccaaucuggccgccaccaagaugucugagugugugcugggccagagcaagagaguggacuuuugcggcaagggcuaccaccugaugagcuucccucagucugccccucacggcgugguguuucugcacgugacauaugugcccgcucaagagaagaauuucaccaccgcuccagccaucugccacgacggcaaagcccacuuuccuagagaaggcguguucguguccaacggcacccauugguucgugacacagcggaacuucuacgagccccagaucaucaccaccgacaacaccuucgugucuggcaacugcgacguugugaucggcauugugaacaauaccguguacgacccucugcagcccgagcuggacagcuucaaagaggaacuggacaaguacuuuaagaaccacacaagccccgacguggaccugggcgauaucagcggaaucaaugccagcgucgugaacauccagaaagagaucgaccggcugaacgagguggccaagaaucugaacgagagccugaucgaccugcaagaacuggggaaguacgagcaguacaucaaguggcccugguacaucuggcugggcuuuaucgccggacugauugccaucgugauggucacaaucaugcuguguugcaugaccagcugcuguagcugccugaagggcuguuguagcuguggcagcugcugcaaguucgacgaggacgauucugagcccgugcugaagggcgugaaacugcacuacaccugaggacuaguguccaccugucccuccugggcugcuggauugucucguuuuccugccaaauaaacaggaucagcgcuuuacagaucucaaaggcucuuuucagagccaccaaaaaaaaaaaaaaaaaaaaaaaaaaaaaaaaaaaaaaaaaaaaaaaaaaaaaaaaaaaaaaaaaaaaaaaaaaaaaaaaaaaaaaaaaaaaaaaaaaaaa

SEQ ID NO: 23927 - RNA, 4123 nt, Artificial Sequence
  SARS-CoV-2/Wuhan/WIV05/2019__EPI_ISL_402128 spike protein mRNA gc mod (1-1273)(H69del_V70del_D614G)
aggagacccgugacccggaaguuguacggcuacgcgacuuucccucccacaaacccucgcgcccuuccuuuccuacuugggcccggcagaaagcuuaccauguucguguuucuggugcugcugccccugguguccagccagugugugaaccugaccaccagaacacagcugccuccagccuacaccaacagcuucaccagaggcguguacuaccccgacaagguguucagauccagcgugcugcacucuacccaggaccuguuccugccuuucuucagcaacgugaccugguuccacgccaucuccggcaccaauggcaccaagagauucgacaaccccgugcugcccuucaacgacgggguguacuuugccagcaccgagaaguccaacaucaucagaggcuggaucuucggcaccacacuggacagcaagacccagagccugcugaucgugaacaacgccaccaacguggucaucaaagugugcgaguuccaguucugcaacgaccccuuccugggcgucuacuaccacaagaacaacaagagcuggauggaaagcgaguuccggguguacagcagcgccaacaacugcaccuucgaguacgugucccagccuuuccugauggaccuggaaggcaagcagggcaacuucaagaaccugcgcgaguucguguucaagaacaucgacggcuacuucaaaaucuacagcaagcacaccccuaucaaccucgugcgggaucugccucagggcuucucugcucuggaaccccugguggaucugcccaucggcaucaacaucacccgguuucagacacugcuggcccugcacagaagcuaccugacaccuggcgauagcagcagcggauggacagcuggugccgccgcuuacuaugugggcuaccugcagccuagaaccuuccugcugaaguacaacgagaacggcaccaucaccgacgccguggauugugcucuggauccucugagcgagacaaagugcacccugaaguccuucaccguggaaaagggcaucuaccagaccagcaacuuccgggugcagcccaccgaauccaucgugcgguuccccaauaucaccaaucugugccccuucggcgagguguucaaugccaccagauucgccucuguguacgccuggaaccggaagcggaucagcaauugcguggccgacuacuccgugcuguacaacuccgccagcuucagcaccuucaagugcuacggcguguccccuaccaagcugaacgaccugugcuucacaaacguguacgccgacagcuucgugauccggggagaugaagugcggcagauugccccuggacagacaggcaagaucgccgacuacaacuacaagcugcccgacgacuucaccggcugugugauugccuggaacagcaacaaccuggacuccaaagucggcggcaacuacaauuaccuguaccggcuguuccggaaguccaaucugaagcccuucgagcgggacaucagcaccgaaaucuaucaggccggcagcaccccuugcaacggcguggaaggcuucaacugcuacuucccacugcaguccuacggcuuucagcccacaaauggcgugggcuaucagcccuacagagugguggugcugagcuucgaacugcugcaugcuccugccacagugugcggcccuaagaaaagcaccaaucucgugaagaacaaaugcgugaacuucaacuucaacggccugaccggcaccggcgugcugacagagagcaacaagaaguuccugccauuccagcaguuuggccgggauaucgccgauaccacagacgccguuagagauccccagacacuggaaauccuggacaucaccccaugcagcuucggcggagugucugugaucaccccuggcaccaacaccagcaaucagguggcagugcuguaccagggcgugaacuguaccgaagugcccguggccauucacgccgaucagcugacaccuacauggcggguguacuccaccggcagcaauguguuucagaccagagccggcugucugaucggagccgagcacgugaacaauagcuacgagugcgacauccccaucggcgcuggcaucugugccagcuaccagacacagacaaacagccccagacgggcuagaagcguggccagccagagcaucauugccuacacaaugucucugggcgccgagaacagcguggccuacuccaacaacucuaucgcuauccccaccaacuucaccaucagcgugaccaccgagauccugccuguguccaugaccaagaccagcguggacugcaccauguacaucugcggcgauuccaccgagugcuccaaccugcugcugcaguacggcagcuucugcacccagcugaauagagcccugacagggaucgccguggaacaggacaagaacacccaagagguguucgcccaagugaagcaaaucuacaagaccccuccuaucaaggacuucggcggcuucaauuucagccagauucugcccgauccuagcaagcccagcaagcggagcuucaucgaggaccugcuguucaacaaagugacacuggccgacgccggcuucaucaagcaguauggcgauugucugggcgacauugccgccagggaucugauuugcgcccagaaguuuaacggacugacagugcugccuccucugcugaccgaugagaugaucgcccaguacacaucugcccugcuggccggcacaaucacaagcggcuggacauuuggagcuggcgccgcucugcagauccccuuugcuaugcagauggccuaccgguucaacggcaucggagugacccagaaugugcuguacgagaaccagaagcugaucgccaaccaguucaacagcgccaucggcaagauccaggacagccugagcagcacagcaagcgcccugggaaagcugcaggacguggucaaccagaaugcccaggcacugaacacccuggucaagcagcuguccuccaacuucggcgccaucagcucugugcugaacgauauccugagcagacuggacaaggucgaggccgaggugcagaucgacagacugaucacaggcagacugcagagccuccagacauacgugacccagcagcugaucagagccgccgagauuagagccucugccaaucuggccgccaccaagaugucugagugugugcugggccagagcaagagaguggacuuuugcggcaagggcuaccaccugaugagcuucccucagucugccccucacggcgugguguuucugcacgugacauaugugcccgcucaagagaagaauuucaccaccgcuccagccaucugccacgacggcaaagcccacuuuccuagagaaggcguguucguguccaacggcacccauugguucgugacacagcggaacuucuacgagccccagaucaucaccaccgacaacaccuucgugucuggcaacugcgacguugugaucggcauugugaacaauaccguguacgacccucugcagcccgagcuggacagcuucaaagaggaacuggacaaguacuuuaagaaccacacaagccccgacguggaccugggcgauaucagcggaaucaaugccagcgucgugaacauccagaaagagaucgaccggcugaacgagguggccaagaaucugaacgagagccugaucgaccugcaagaacuggggaaguacgagcaguacaucaaguggcccugguacaucuggcugggcuuuaucgccggacugauugccaucgugauggucacaaucaugcuguguugcaugaccagcugcuguagcugccugaagggcuguuguagcuguggcagcugcugcaaguucgacgaggacgauucugagcccgugcugaagggcgugaaacugcacuacaccugaggacuaguguccaccugucccuccugggcugcuggauugucucguuuuccugccaaauaaacaggaucagcgcuuuacagaucucaaaggcucuuuucagagccaccaaaaaaaaaaaaaaaaaaaaaaaaaaaaaaaaaaaaaaaaaaaaaaaaaaaaaaaaaaaaaaaaaaaaaaaaaaaaaaaaaaaaaaaaaaaaaaaaaaaaa

SEQ ID NO: 23928 - RNA, 4129 nt, Artificial Sequence
  SARS-CoV-2/Wuhan/WIV05/2019__EPI_ISL_402128 spike protein mRNA gc mod (1-1273)(Y453F_D614G)
aggagacccgugacccggaaguuguacggcuacgcgacuuucccucccacaaacccucgcgcccuuccuuuccuacuugggcccggcagaaagcuuaccauguucguguuucuggugcugcugccccugguguccagccagugugugaaccugaccaccagaacacagcugccuccagccuacaccaacagcuucaccagaggcguguacuaccccgacaagguguucagauccagcgugcugcacucuacccaggaccuguuccugccuuucuucagcaacgugaccugguuccacgccauccacguguccggcaccaauggcaccaagagauucgacaaccccgugcugcccuucaacgacgggguguacuuugccagcaccgagaaguccaacaucaucagaggcuggaucuucggcaccacacuggacagcaagacccagagccugcugaucgugaacaacgccaccaacguggucaucaaagugugcgaguuccaguucugcaacgaccccuuccugggcgucuacuaccacaagaacaacaagagcuggauggaaagcgaguuccggguguacagcagcgccaacaacugcaccuucgaguacgugucccagccuuuccugauggaccuggaaggcaagcagggcaacuucaagaaccugcgcgaguucguguucaagaacaucgacggcuacuucaaaaucuacagcaagcacaccccuaucaaccucgugcgggaucugccucagggcuucucugcucuggaaccccugguggaucugcccaucggcaucaacaucacccgguuucagacacugcuggcccugcacagaagcuaccugacaccuggcgauagcagcagcggauggacagcuggugccgccgcuuacuaugugggcuaccugcagccuagaaccuuccugcugaaguacaacgagaacggcaccaucaccgacgccguggauugugcucuggauccucugagcgagacaaagugcacccugaaguccuucaccguggaaaagggcaucuaccagaccagcaacuuccgggugcagcccaccgaauccaucgugcgguuccccaauaucaccaaucugugccccuucggcgagguguucaaugccaccagauucgccucuguguacgccuggaaccggaagcggaucagcaauugcguggccgacuacuccgugcuguacaacuccgccagcuucagcaccuucaagugcuacggcguguccccuaccaagcugaacgaccugugcuucacaaacguguacgccgacagcuucgugauccggggagaugaagugcggcagauugccccuggacagacaggcaagaucgccgacuacaacuacaagcugcccgacgacuucaccggcugugugauugccuggaacagcaacaaccuggacuccaaagucggcggcaacuacaauuaccuguuccggcuguuccggaaguccaaucugaagcccuucgagcgggacaucagcaccgaaaucuaucaggccggcagcaccccuugcaacggcguggaaggcuucaacugcuacuucccacugcaguccuacggcuuucagcccacaaauggcgugggcuaucagcccuacagagugguggugcugagcuucgaacugcugcaugcuccugccacagugugcggcccuaagaaaagcaccaaucucgugaagaacaaaugcgugaacuucaacuucaacggccugaccggcaccggcgugcugacagagagcaacaagaaguuccugccauuccagcaguuuggccgggauaucgccgauaccacagacgccguuagagauccccagacacuggaaauccuggacaucaccccaugcagcuucggcggagugucugugaucaccccuggcaccaacaccagcaaucagguggcagugcuguaccagggcgugaacuguaccgaagugcccguggccauucacgccgaucagcugacaccuacauggcggguguacuccaccggcagcaauguguuucagaccagagccggcugucugaucggagccgagcacgugaacaauagcuacgagugcgacauccccaucggcgcuggcaucugugccagcuaccagacacagacaaacagccccagacgggcuagaagcguggccagccagagcaucauugccuacacaaugucucugggcgccgagaacagcguggccuacuccaacaacucuaucgcuauccccaccaacuucaccaucagcgugaccaccgagauccugccuguguccaugaccaagaccagcguggacugcaccauguacaucugcggcgauuccaccgagugcuccaaccugcugcugcaguacggcagcuucugcacccagcugaauagagcccugacagggaucgccguggaacaggacaagaacacccaagagguguucgcccaagugaagcaaaucuacaagaccccuccuaucaaggacuucggcggcuucaauuucagccagauucugcccgauccuagcaagcccagcaagcggagcuucaucgaggaccugcuguucaacaaagugacacuggccgacgccggcuucaucaagcaguauggcgauugucugggcgacauugccgccagggaucugauuugcgcccagaaguuuaacggacugacagugcugccuccucugcugaccgaugagaugaucgcccaguacacaucugcccugcuggccggcacaaucacaagcggcuggacauuuggagcuggcgccgcucugcagauccccuuugcuaugcagauggccuaccgguucaacggcaucggagugacccagaaugugcuguacgagaaccagaagcugaucgccaaccaguucaacagcgccaucggcaagauccaggacagccugagcagcacagcaagcgcccugggaaagcugcaggacguggucaaccagaaugcccaggcacugaacacccuggucaagcagcuguccuccaacuucggcgccaucagcucugugcugaacgauauccugagcagacuggacaaggucgaggccgaggugcagaucgacagacugaucacaggcagacugcagagccuccagacauacgugacccagcagcugaucagagccgccgagauuagagccucugccaaucuggccgccaccaagaugucugagugugugcugggccagagcaagagaguggacuuuugcggcaagggcuaccaccugaugagcuucccucagucugccccucacggcgugguguuucugcacgugacauaugugcccgcucaagagaagaauuucaccaccgcuccagccaucugccacgacggcaaagcccacuuuccuagagaaggcguguucguguccaacggcacccauugguucgugacacagcggaacuucuacgagccccagaucaucaccaccgacaacaccuucgugucuggcaacugcgacguugugaucggcauugugaacaauaccguguacgacccucugcagcccgagcuggacagcuucaaagaggaacuggacaaguacuuuaagaaccacacaagccccgacguggaccugggcgauaucagcggaaucaaugccagcgucgugaacauccagaaagagaucgaccggcugaacgagguggccaagaaucugaacgagagccugaucgaccugcaagaacuggggaaguacgagcaguacaucaaguggcccugguacaucuggcugggcuuuaucgccggacugauugccaucgugauggucacaaucaugcuguguugcaugaccagcugcuguagcugccugaagggcuguuguagcuguggcagcugcugcaaguucgacgaggacgauucugagcccgugcugaagggcgugaaacugcacuacaccugaggacuaguguccaccugucccuccugggcugcuggauugucucguuuuccugccaaauaaacaggaucagcgcuuuacagaucucaaaggcucuuuucagagccaccaaaaaaaaaaaaaaaaaaaaaaaaaaaaaaaaaaaaaaaaaaaaaaaaaaaaaaaaaaaaaaaaaaaaaaaaaaaaaaaaaaaaaaaaaaaaaaaaaaaaa

SEQ ID NO: 23929 - RNA, 4129 nt, Artificial Sequence
  SARS-CoV-2/Wuhan/WIV05/2019__EPI_ISL_402128 spike protein mRNA gc mod (1-1273)(D614G_I692V)
aggagacccgugacccggaaguuguacggcuacgcgacuuucccucccacaaacccucgcgcccuuccuuuccuacuugggcccggcagaaagcuuaccauguucguguuucuggugcugcugccccugguguccagccagugugugaaccugaccaccagaacacagcugccuccagccuacaccaacagcuucaccagaggcguguacuaccccgacaagguguucagauccagcgugcugcacucuacccaggaccuguuccugccuuucuucagcaacgugaccugguuccacgccauccacguguccggcaccaauggcaccaagagauucgacaaccccgugcugcccuucaacgacgggguguacuuugccagcaccgagaaguccaacaucaucagaggcuggaucuucggcaccacacuggacagcaagacccagagccugcugaucgugaacaacgccaccaacguggucaucaaagugugcgaguuccaguucugcaacgaccccuuccugggcgucuacuaccacaagaacaacaagagcuggauggaaagcgaguuccggguguacagcagcgccaacaacugcaccuucgaguacgugucccagccuuuccugauggaccuggaaggcaagcagggcaacuucaagaaccugcgcgaguucguguucaagaacaucgacggcuacuucaaaaucuacagcaagcacaccccuaucaaccucgugcgggaucugccucagggcuucucugcucuggaaccccugguggaucugcccaucggcaucaacaucacccgguuucagacacugcuggcccugcacagaagcuaccugacaccuggcgauagcagcagcggauggacagcuggugccgccgcuuacuaugugggcuaccugcagccuagaaccuuccugcugaaguacaacgagaacggcaccaucaccgacgccguggauugugcucuggauccucugagcgagacaaagugcacccugaaguccuucaccguggaaaagggcaucuaccagaccagcaacuuccgggugcagcccaccgaauccaucgugcgguuccccaauaucaccaaucugugccccuucggcgagguguucaaugccaccagauucgccucuguguacgccuggaaccggaagcggaucagcaauugcguggccgacuacuccgugcuguacaacuccgccagcuucagcaccuucaagugcuacggcguguccccuaccaagcugaacgaccugugcuucacaaacguguacgccgacagcuucgugauccggggagaugaagugcggcagauugccccuggacagacaggcaagaucgccgacuacaacuacaagcugcccgacgacuucaccggcugugugauugccuggaacagcaacaaccuggacuccaaagucggcggcaacuacaauuaccuguaccggcuguuccggaaguccaaucugaagcccuucgagcgggacaucagcaccgaaaucuaucaggccggcagcaccccuugcaacggcguggaaggcuucaacugcuacuucccacugcaguccuacggcuuucagcccacaaauggcgugggcuaucagcccuacagagugguggugcugagcuucgaacugcugcaugcuccugccacagugugcggcccuaagaaaagcaccaaucucgugaagaacaaaugcgugaacuucaacuucaacggccugaccggcaccggcgugcugacagagagcaacaagaaguuccugccauuccagcaguuuggccgggauaucgccgauaccacagacgccguuagagauccccagacacuggaaauccuggacaucaccccaugcagcuucggcggagugucugugaucaccccuggcaccaacaccagcaaucagguggcagugcuguaccagggcgugaacuguaccgaagugcccguggccauucacgccgaucagcugacaccuacauggcggguguacuccaccggcagcaauguguuucagaccagagccggcugucugaucggagccgagcacgugaacaauagcuacgagugcgacauccccaucggcgcuggcaucugugccagcuaccagacacagacaaacagccccagacgggcuagaagcguggccagccagagcgugauugccuacacaaugucucugggcgccgagaacagcguggccuacuccaacaacucuaucgcuauccccaccaacuucaccaucagcgugaccaccgagauccugccuguguccaugaccaagaccagcguggacugcaccauguacaucugcggcgauuccaccgagugcuccaaccugcugcugcaguacggcagcuucugcacccagcugaauagagcccugacagggaucgccguggaacaggacaagaacacccaagagguguucgcccaagugaagcaaaucuacaagaccccuccuaucaaggacuucggcggcuucaauuucagccagauucugcccgauccuagcaagcccagcaagcggagcuucaucgaggaccugcuguucaacaaagugacacuggccgacgccggcuucaucaagcaguauggcgauugucugggcgacauugccgccagggaucugauuugcgcccagaaguuuaacggacugacagugcugccuccucugcugaccgaugagaugaucgcccaguacacaucugcccugcuggccggcacaaucacaagcggcuggacauuuggagcuggcgccgcucugcagauccccuuugcuaugcagauggccuaccgguucaacggcaucggagugacccagaaugugcuguacgagaaccagaagcugaucgccaaccaguucaacagcgccaucggcaagauccaggacagccugagcagcacagcaagcgcccugggaaagcugcaggacguggucaaccagaaugcccaggcacugaacacccuggucaagcagcuguccuccaacuucggcgccaucagcucugugcugaacgauauccugagcagacuggacaaggucgaggccgaggugcagaucgacagacugaucacaggcagacugcagagccuccagacauacgugacccagcagcugaucagagccgccgagauuagagccucugccaaucuggccgccaccaagaugucugagugugugcugggccagagcaagagaguggacuuuugcggcaagggcuaccaccugaugagcuucccucagucugccccucacggcgugguguuucugcacgugacauaugugcccgcucaagagaagaauuucaccaccgcuccagccaucugccacgacggcaaagcccacuuuccuagagaaggcguguucguguccaacggcacccauugguucgugacacagcggaacuucuacgagccccagaucaucaccaccgacaacaccuucgugucuggcaacugcgacguugugaucggcauugugaacaauaccguguacgacccucugcagcccgagcuggacagcuucaaagaggaacuggacaaguacuuuaagaaccacacaagccccgacguggaccugggcgauaucagcggaaucaaugccagcgucgugaacauccagaaagagaucgaccggcugaacgagguggccaagaaucugaacgagagccugaucgaccugcaagaacuggggaaguacgagcaguacaucaaguggcccugguacaucuggcugggcuuuaucgccggacugauugccaucgugauggucacaaucaugcuguguugcaugaccagcugcuguagcugccugaagggcuguuguagcuguggcagcugcugcaaguucgacgaggacgauucugagcccgugcugaagggcgugaaacugcacuacaccugaggacuaguguccaccugucccuccugggcugcuggauugucucguuuuccugccaaauaaacaggaucagcgcuuuacagaucucaaaggcucuuuucagagccaccaaaaaaaaaaaaaaaaaaaaaaaaaaaaaaaaaaaaaaaaaaaaaaaaaaaaaaaaaaaaaaaaaaaaaaaaaaaaaaaaaaaaaaaaaaaaaaaaaaaaa

SEQ ID NO: 23930 - RNA, 4129 nt, Artificial Sequence
  SARS-CoV-2/Wuhan/WIV05/2019__EPI_ISL_402128 spike protein mRNA gc mod (1-1273)(D614G_M1229I)
aggagacccgugacccggaaguuguacggcuacgcgacuuucccucccacaaacccucgcgcccuuccuuuccuacuugggcccggcagaaagcuuaccauguucguguuucuggugcugcugccccugguguccagccagugugugaaccugaccaccagaacacagcugccuccagccuacaccaacagcuucaccagaggcguguacuaccccgacaagguguucagauccagcgugcugcacucuacccaggaccuguuccugccuuucuucagcaacgugaccugguuccacgccauccacguguccggcaccaauggcaccaagagauucgacaaccccgugcugcccuucaacgacgggguguacuuugccagcaccgagaaguccaacaucaucagaggcuggaucuucggcaccacacuggacagcaagacccagagccugcugaucgugaacaacgccaccaacguggucaucaaagugugcgaguuccaguucugcaacgaccccuuccugggcgucuacuaccacaagaacaacaagagcuggauggaaagcgaguuccggguguacagcagcgccaacaacugcaccuucgaguacgugucccagccuuuccugauggaccuggaaggcaagcagggcaacuucaagaaccugcgcgaguucguguucaagaacaucgacggcuacuucaaaaucuacagcaagcacaccccuaucaaccucgugcgggaucugccucagggcuucucugcucuggaaccccugguggaucugcccaucggcaucaacaucacccgguuucagacacugcuggcccugcacagaagcuaccugacaccuggcgauagcagcagcggauggacagcuggugccgccgcuuacuaugugggcuaccugcagccuagaaccuuccugcugaaguacaacgagaacggcaccaucaccgacgccguggauugugcucuggauccucugagcgagacaaagugcacccugaaguccuucaccguggaaaagggcaucuaccagaccagcaacuuccgggugcagcccaccgaauccaucgugcgguuccccaauaucaccaaucugugccccuucggcgagguguucaaugccaccagauucgccucuguguacgccuggaaccggaagcggaucagcaauugcguggccgacuacuccgugcuguacaacuccgccagcuucagcaccuucaagugcuacggcguguccccuaccaagcugaacgaccugugcuucacaaacguguacgccgacagcuucgugauccggggagaugaagugcggcagauugccccuggacagacaggcaagaucgccgacuacaacuacaagcugcccgacgacuucaccggcugugugauugccuggaacagcaacaaccuggacuccaaagucggcggcaacuacaauuaccuguaccggcuguuccggaaguccaaucugaagcccuucgagcgggacaucagcaccgaaaucuaucaggccggcagcaccccuugcaacggcguggaaggcuucaacugcuacuucccacugcaguccuacggcuuucagcccacaaauggcgugggcuaucagcccuacagagugguggugcugagcuucgaacugcugcaugcuccugccacagugugcggcccuaagaaaagcaccaaucucgugaagaacaaaugcgugaacuucaacuucaacggccugaccggcaccggcgugcugacagagagcaacaagaaguuccugccauuccagcaguuuggccgggauaucgccgauaccacagacgccguuagagauccccagacacuggaaauccuggacaucaccccaugcagcuucggcggagugucugugaucaccccuggcaccaacaccagcaaucagguggcagugcuguaccagggcgugaacuguaccgaagugcccguggccauucacgccgaucagcugacaccuacauggcggguguacuccaccggcagcaauguguuucagaccagagccggcugucugaucggagccgagcacgugaacaauagcuacgagugcgacauccccaucggcgcuggcaucugugccagcuaccagacacagacaaacagccccagacgggcuagaagcguggccagccagagcaucauugccuacacaaugucucugggcgccgagaacagcguggccuacuccaacaacucuaucgcuauccccaccaacuucaccaucagcgugaccaccgagauccugccuguguccaugaccaagaccagcguggacugcaccauguacaucugcggcgauuccaccgagugcuccaaccugcugcugcaguacggcagcuucugcacccagcugaauagagcccugacagggaucgccguggaacaggacaagaacacccaagagguguucgcccaagugaagcaaaucuacaagaccccuccuaucaaggacuucggcggcuucaauuucagccagauucugcccgauccuagcaagcccagcaagcggagcuucaucgaggaccugcuguucaacaaagugacacuggccgacgccggcuucaucaagcaguauggcgauugucugggcgacauugccgccagggaucugauuugcgcccagaaguuuaacggacugacagugcugccuccucugcugaccgaugagaugaucgcccaguacacaucugcccugcuggccggcacaaucacaagcggcuggacauuuggagcuggcgccgcucugcagauccccuuugcuaugcagauggccuaccgguucaacggcaucggagugacccagaaugugcuguacgagaaccagaagcugaucgccaaccaguucaacagcgccaucggcaagauccaggacagccugagcagcacagcaagcgcccugggaaagcugcaggacguggucaaccagaaugcccaggcacugaacacccuggucaagcagcuguccuccaacuucggcgccaucagcucugugcugaacgauauccugagcagacuggacaaggucgaggccgaggugcagaucgacagacugaucacaggcagacugcagagccuccagacauacgugacccagcagcugaucagagccgccgagauuagagccucugccaaucuggccgccaccaagaugucugagugugugcugggccagagcaagagaguggacuuuugcggcaagggcuaccaccugaugagcuucccucagucugccccucacggcgugguguuucugcacgugacauaugugcccgcucaagagaagaauuucaccaccgcuccagccaucugccacgacggcaaagcccacuuuccuagagaaggcguguucguguccaacggcacccauugguucgugacacagcggaacuucuacgagccccagaucaucaccaccgacaacaccuucgugucuggcaacugcgacguugugaucggcauugugaacaauaccguguacgacccucugcagcccgagcuggacagcuucaaagaggaacuggacaaguacuuuaagaaccacacaagccccgacguggaccugggcgauaucagcggaaucaaugccagcgucgugaacauccagaaagagaucgaccggcugaacgagguggccaagaaucugaacgagagccugaucgaccugcaagaacuggggaaguacgagcaguacaucaaguggcccugguacaucuggcugggcuuuaucgccggacugauugccaucgugaucgucacaaucaugcuguguugcaugaccagcugcuguagcugccugaagggcuguuguagcuguggcagcugcugcaaguucgacgaggacgauucugagcccgugcugaagggcgugaaacugcacuacaccugaggacuaguguccaccugucccuccugggcugcuggauugucucguuuuccugccaaauaaacaggaucagcgcuuuacagaucucaaaggcucuuuucagagccaccaaaaaaaaaaaaaaaaaaaaaaaaaaaaaaaaaaaaaaaaaaaaaaaaaaaaaaaaaaaaaaaaaaaaaaaaaaaaaaaaaaaaaaaaaaaaaaaaaaaaa

SEQ ID NO: 23931 - RNA, 4123 nt, Artificial Sequence
  SARS-CoV-2/Wuhan/WIV05/2019__EPI_ISL_402128 spike protein mRNA gc mod (1-1273)(H69del_V70del_A222V_Y453F_S477N_D614G_I692V)
aggagacccgugacccggaaguuguacggcuacgcgacuuucccucccacaaacccucgcgcccuuccuuuccuacuugggcccggcagaaagcuuaccauguucguguuucuggugcugcugccccugguguccagccagugugugaaccugaccaccagaacacagcugccuccagccuacaccaacagcuucaccagaggcguguacuaccccgacaagguguucagauccagcgugcugcacucuacccaggaccuguuccugccuuucuucagcaacgugaccugguuccacgccaucuccggcaccaauggcaccaagagauucgacaaccccgugcugcccuucaacgacgggguguacuuugccagcaccgagaaguccaacaucaucagaggcuggaucuucggcaccacacuggacagcaagacccagagccugcugaucgugaacaacgccaccaacguggucaucaaagugugcgaguuccaguucugcaacgaccccuuccugggcgucuacuaccacaagaacaacaagagcuggauggaaagcgaguuccggguguacagcagcgccaacaacugcaccuucgaguacgugucccagccuuuccugauggaccuggaaggcaagcagggcaacuucaagaaccugcgcgaguucguguucaagaacaucgacggcuacuucaaaaucuacagcaagcacaccccuaucaaccucgugcgggaucugccucagggcuucucugugcuggaaccccugguggaucugcccaucggcaucaacaucacccgguuucagacacugcuggcccugcacagaagcuaccugacaccuggcgauagcagcagcggauggacagcuggugccgccgcuuacuaugugggcuaccugcagccuagaaccuuccugcugaaguacaacgagaacggcaccaucaccgacgccguggauugugcucuggauccucugagcgagacaaagugcacccugaaguccuucaccguggaaaagggcaucuaccagaccagcaacuuccgggugcagcccaccgaauccaucgugcgguuccccaauaucaccaaucugugccccuucggcgagguguucaaugccaccagauucgccucuguguacgccuggaaccggaagcggaucagcaauugcguggccgacuacuccgugcuguacaacuccgccagcuucagcaccuucaagugcuacggcguguccccuaccaagcugaacgaccugugcuucacaaacguguacgccgacagcuucgugauccggggagaugaagugcggcagauugccccuggacagacaggcaagaucgccgacuacaacuacaagcugcccgacgacuucaccggcugugugauugccuggaacagcaacaaccuggacuccaaagucggcggcaacuacaauuaccuguuccggcuguuccggaaguccaaucugaagcccuucgagcgggacaucagcaccgaaaucuaucaggccggcaacaccccuugcaacggcguggaaggcuucaacugcuacuucccacugcaguccuacggcuuucagcccacaaauggcgugggcuaucagcccuacagagugguggugcugagcuucgaacugcugcaugcuccugccacagugugcggcccuaagaaaagcaccaaucucgugaagaacaaaugcgugaacuucaacuucaacggccugaccggcaccggcgugcugacagagagcaacaagaaguuccugccauuccagcaguuuggccgggauaucgccgauaccacagacgccguuagagauccccagacacuggaaauccuggacaucaccccaugcagcuucggcggagugucugugaucaccccuggcaccaacaccagcaaucagguggcagugcuguaccagggcgugaacuguaccgaagugcccguggccauucacgccgaucagcugacaccuacauggcggguguacuccaccggcagcaauguguuucagaccagagccggcugucugaucggagccgagcacgugaacaauagcuacgagugcgacauccccaucggcgcuggcaucugugccagcuaccagacacagacaaacagccccagacgggcuagaagcguggccagccagagcgugauugccuacacaaugucucugggcgccgagaacagcguggccuacuccaacaacucuaucgcuauccccaccaacuucaccaucagcgugaccaccgagauccugccuguguccaugaccaagaccagcguggacugcaccauguacaucugcggcgauuccaccgagugcuccaaccugcugcugcaguacggcagcuucugcacccagcugaauagagcccugacagggaucgccguggaacaggacaagaacacccaagagguguucgcccaagugaagcaaaucuacaagaccccuccuaucaaggacuucggcggcuucaauuucagccagauucugcccgauccuagcaagcccagcaagcggagcuucaucgaggaccugcuguucaacaaagugacacuggccgacgccggcuucaucaagcaguauggcgauugucugggcgacauugccgccagggaucugauuugcgcccagaaguuuaacggacugacagugcugccuccucugcugaccgaugagaugaucgcccaguacacaucugcccugcuggccggcacaaucacaagcggcuggacauuuggagcuggcgccgcucugcagauccccuuugcuaugcagauggccuaccgguucaacggcaucggagugacccagaaugugcuguacgagaaccagaagcugaucgccaaccaguucaacagcgccaucggcaagauccaggacagccugagcagcacagcaagcgcccugggaaagcugcaggacguggucaaccagaaugcccaggcacugaacacccuggucaagcagcuguccuccaacuucggcgccaucagcucugugcugaacgauauccugagcagacuggacaaggucgaggccgaggugcagaucgacagacugaucacaggcagacugcagagccuccagacauacgugacccagcagcugaucagagccgccgagauuagagccucugccaaucuggccgccaccaagaugucugagugugugcugggccagagcaagagaguggacuuuugcggcaagggcuaccaccugaugagcuucccucagucugccccucacggcgugguguuucugcacgugacauaugugcccgcucaagagaagaauuucaccaccgcuccagccaucugccacgacggcaaagcccacuuuccuagagaaggcguguucguguccaacggcacccauugguucgugacacagcggaacuucuacgagccccagaucaucaccaccgacaacaccuucgugucuggcaacugcgacguugugaucggcauugugaacaauaccguguacgacccucugcagcccgagcuggacagcuucaaagaggaacuggacaaguacuuuaagaaccacacaagccccgacguggaccugggcgauaucagcggaaucaaugccagcgucgugaacauccagaaagagaucgaccggcugaacgagguggccaagaaucugaacgagagccugaucgaccugcaagaacuggggaaguacgagcaguacaucaaguggcccugguacaucuggcugggcuuuaucgccggacugauugccaucgugauggucacaaucaugcuguguugcaugaccagcugcuguagcugccugaagggcuguuguagcuguggcagcugcugcaaguucgacgaggacgauucugagcccgugcugaagggcgugaaacugcacuacaccugaggacuaguguccaccugucccuccugggcugcuggauugucucguuuuccugccaaauaaacaggaucagcgcuuuacagaucucaaaggcucuuuucagagccaccaaaaaaaaaaaaaaaaaaaaaaaaaaaaaaaaaaaaaaaaaaaaaaaaaaaaaaaaaaaaaaaaaaaaaaaaaaaaaaaaaaaaaaaaaaaaaaaaaaaaa

SEQ ID NO: 23932 - RNA, 4123 nt, Artificial Sequence
  SARS-CoV-2/Wuhan/WIV05/2019__EPI_ISL_402128 spike protein mRNA gc mod (1-1273)(H69del_V70del_Y453F_D614G_I692V_M1229I)
aggagacccgugacccggaaguuguacggcuacgcgacuuucccucccacaaacccucgcgcccuuccuuuccuacuugggcccggcagaaagcuuaccauguucguguuucuggugcugcugccccugguguccagccagugugugaaccugaccaccagaacacagcugccuccagccuacaccaacagcuucaccagaggcguguacuaccccgacaagguguucagauccagcgugcugcacucuacccaggaccuguuccugccuuucuucagcaacgugaccugguuccacgccaucuccggcaccaauggcaccaagagauucgacaaccccgugcugcccuucaacgacgggguguacuuugccagcaccgagaaguccaacaucaucagaggcuggaucuucggcaccacacuggacagcaagacccagagccugcugaucgugaacaacgccaccaacguggucaucaaagugugcgaguuccaguucugcaacgaccccuuccugggcgucuacuaccacaagaacaacaagagcuggauggaaagcgaguuccggguguacagcagcgccaacaacugcaccuucgaguacgugucccagccuuuccugauggaccuggaaggcaagcagggcaacuucaagaaccugcgcgaguucguguucaagaacaucgacggcuacuucaaaaucuacagcaagcacaccccuaucaaccucgugcgggaucugccucagggcuucucugcucuggaaccccugguggaucugcccaucggcaucaacaucacccgguuucagacacugcuggcccugcacagaagcuaccugacaccuggcgauagcagcagcggauggacagcuggugccgccgcuuacuaugugggcuaccugcagccuagaaccuuccugcugaaguacaacgagaacggcaccaucaccgacgccguggauugugcucuggauccucugagcgagacaaagugcacccugaaguccuucaccguggaaaagggcaucuaccagaccagcaacuuccgggugcagcccaccgaauccaucgugcgguuccccaauaucaccaaucugugccccuucggcgagguguucaaugccaccagauucgccucuguguacgccuggaaccggaagcggaucagcaauugcguggccgacuacuccgugcuguacaacuccgccagcuucagcaccuucaagugcuacggcguguccccuaccaagcugaacgaccugugcuucacaaacguguacgccgacagcuucgugauccggggagaugaagugcggcagauugccccuggacagacaggcaagaucgccgacuacaacuacaagcugcccgacgacuucaccggcugugugauugccuggaacagcaacaaccuggacuccaaagucggcggcaacuacaauuaccuguuccggcuguuccggaaguccaaucugaagcccuucgagcgggacaucagcaccgaaaucuaucaggccggcagcaccccuugcaacggcguggaaggcuucaacugcuacuucccacugcaguccuacggcuuucagcccacaaauggcgugggcuaucagcccuacagagugguggugcugagcuucgaacugcugcaugcuccugccacagugugcggcccuaagaaaagcaccaaucucgugaagaacaaaugcgugaacuucaacuucaacggccugaccggcaccggcgugcugacagagagcaacaagaaguuccugccauuccagcaguuuggccgggauaucgccgauaccacagacgccguuagagauccccagacacuggaaauccuggacaucaccccaugcagcuucggcggagugucugugaucaccccuggcaccaacaccagcaaucagguggcagugcuguaccagggcgugaacuguaccgaagugcccguggccauucacgccgaucagcugacaccuacauggcggguguacuccaccggcagcaauguguuucagaccagagccggcugucugaucggagccgagcacgugaacaauagcuacgagugcgacauccccaucggcgcuggcaucugugccagcuaccagacacagacaaacagccccagacgggcuagaagcguggccagccagagcgugauugccuacacaaugucucugggcgccgagaacagcguggccuacuccaacaacucuaucgcuauccccaccaacuucaccaucagcgugaccaccgagauccugccuguguccaugaccaagaccagcguggacugcaccauguacaucugcggcgauuccaccgagugcuccaaccugcugcugcaguacggcagcuucugcacccagcugaauagagcccugacagggaucgccguggaacaggacaagaacacccaagagguguucgcccaagugaagcaaaucuacaagaccccuccuaucaaggacuucggcggcuucaauuucagccagauucugcccgauccuagcaagcccagcaagcggagcuucaucgaggaccugcuguucaacaaagugacacuggccgacgccggcuucaucaagcaguauggcgauugucugggcgacauugccgccagggaucugauuugcgcccagaaguuuaacggacugacagugcugccuccucugcugaccgaugagaugaucgcccaguacacaucugcccugcuggccggcacaaucacaagcggcuggacauuuggagcuggcgccgcucugcagauccccuuugcuaugcagauggccuaccgguucaacggcaucggagugacccagaaugugcuguacgagaaccagaagcugaucgccaaccaguucaacagcgccaucggcaagauccaggacagccugagcagcacagcaagcgcccugggaaagcugcaggacguggucaaccagaaugcccaggcacugaacacccuggucaagcagcuguccuccaacuucggcgccaucagcucugugcugaacgauauccugagcagacuggacaaggucgaggccgaggugcagaucgacagacugaucacaggcagacugcagagccuccagacauacgugacccagcagcugaucagagccgccgagauuagagccucugccaaucuggccgccaccaagaugucugagugugugcugggccagagcaagagaguggacuuuugcggcaagggcuaccaccugaugagcuucccucagucugccccucacggcgugguguuucugcacgugacauaugugcccgcucaagagaagaauuucaccaccgcuccagccaucugccacgacggcaaagcccacuuuccuagagaaggcguguucguguccaacggcacccauugguucgugacacagcggaacuucuacgagccccagaucaucaccaccgacaacaccuucgugucuggcaacugcgacguugugaucggcauugugaacaauaccguguacgacccucugcagcccgagcuggacagcuucaaagaggaacuggacaaguacuuuaagaaccacacaagccccgacguggaccugggcgauaucagcggaaucaaugccagcgucgugaacauccagaaagagaucgaccggcugaacgagguggccaagaaucugaacgagagccugaucgaccugcaagaacuggggaaguacgagcaguacaucaaguggcccugguacaucuggcugggcuuuaucgccggacugauugccaucgugaucgucacaaucaugcuguguugcaugaccagcugcuguagcugccugaagggcuguuguagcuguggcagcugcugcaaguucgacgaggacgauucugagcccgugcugaagggcgugaaacugcacuacaccugaggacuaguguccaccugucccuccugggcugcuggauugucucguuuuccugccaaauaaacaggaucagcgcuuuacagaucucaaaggcucuuuucagagccaccaaaaaaaaaaaaaaaaaaaaaaaaaaaaaaaaaaaaaaaaaaaaaaaaaaaaaaaaaaaaaaaaaaaaaaaaaaaaaaaaaaaaaaaaaaaaaaaaaaaaa

SEQ ID NO: 23933 - RNA, 4120 nt, Artificial Sequence
  SARS-CoV-2/Wuhan/WIV05/2019__EPI_ISL_402128 spike protein mRNA gc mod (1-1273)(H69del_V70del_Y144del_N501Y_A570D_D614G_P681H_T716I_S982 A_D1118H)
aggagacccgugacccggaaguuguacggcuacgcgacuuucccucccacaaacccucgcgcccuuccuuuccuacuugggcccggcagaaagcuuaccauguucguguuucuggugcugcugccccugguguccagccagugugugaaccugaccaccagaacacagcugccuccagccuacaccaacagcuucaccagaggcguguacuaccccgacaagguguucagauccagcgugcugcacucuacccaggaccuguuccugccuuucuucagcaacgugaccugguuccacgccaucuccggcaccaauggcaccaagagauucgacaaccccgugcugcccuucaacgacgggguguacuuugccagcaccgagaaguccaacaucaucagaggcuggaucuucggcaccacacuggacagcaagacccagagccugcugaucgugaacaacgccaccaacguggucaucaaagugugcgaguuccaguucugcaacgaccccuuccugggcgucuaccacaagaacaacaagagcuggauggaaagcgaguuccggguguacagcagcgccaacaacugcaccuucgaguacgugucccagccuuuccugauggaccuggaaggcaagcagggcaacuucaagaaccugcgcgaguucguguucaagaacaucgacggcuacuucaaaaucuacagcaagcacaccccuaucaaccucgugcgggaucugccucagggcuucucugcucuggaaccccugguggaucugcccaucggcaucaacaucacccgguuucagacacugcuggcccugcacagaagcuaccugacaccuggcgauagcagcagcggauggacagcuggugccgccgcuuacuaugugggcuaccugcagccuagaaccuuccugcugaaguacaacgagaacggcaccaucaccgacgccguggauugugcucuggauccucugagcgagacaaagugcacccugaaguccuucaccguggaaaagggcaucuaccagaccagcaacuuccgggugcagcccaccgaauccaucgugcgguuccccaauaucaccaaucugugccccuucggcgagguguucaaugccaccagauucgccucuguguacgccuggaaccggaagcggaucagcaauugcguggccgacuacuccgugcuguacaacuccgccagcuucagcaccuucaagugcuacggcguguccccuaccaagcugaacgaccugugcuucacaaacguguacgccgacagcuucgugauccggggagaugaagugcggcagauugccccuggacagacaggcaagaucgccgacuacaacuacaagcugcccgacgacuucaccggcugugugauugccuggaacagcaacaaccuggacuccaaagucggcggcaacuacaauuaccuguaccggcuguuccggaaguccaaucugaagcccuucgagcgggacaucagcaccgaaaucuaucaggccggcagcaccccuugcaacggcguggaaggcuucaacugcuacuucccacugcaguccuacggcuuucagcccacauacggcgugggcuaucagcccuacagagugguggugcugagcuucgaacugcugcaugcuccugccacagugugcggcccuaagaaaagcaccaaucucgugaagaacaaaugcgugaacuucaacuucaacggccugaccggcaccggcgugcugacagagagcaacaagaaguuccugccauuccagcaguuuggccgggauaucgacgauaccacagacgccguuagagauccccagacacuggaaauccuggacaucaccccaugcagcuucggcggagugucugugaucaccccuggcaccaacaccagcaaucagguggcagugcuguaccagggcgugaacuguaccgaagugcccguggccauucacgccgaucagcugacaccuacauggcggguguacuccaccggcagcaauguguuucagaccagagccggcugucugaucggagccgagcacgugaacaauagcuacgagugcgacauccccaucggcgcuggcaucugugccagcuaccagacacagacaaacagccacagacgggcuagaagcguggccagccagagcaucauugccuacacaaugucucugggcgccgagaacagcguggccuacuccaacaacucuaucgcuauccccaucaacuucaccaucagcgugaccaccgagauccugccuguguccaugaccaagaccagcguggacugcaccauguacaucugcggcgauuccaccgagugcuccaaccugcugcugcaguacggcagcuucugcacccagcugaauagagcccugacagggaucgccguggaacaggacaagaacacccaagagguguucgcccaagugaagcaaaucuacaagaccccuccuaucaaggacuucggcggcuucaauuucagccagauucugcccgauccuagcaagcccagcaagcggagcuucaucgaggaccugcuguucaacaaagugacacuggccgacgccggcuucaucaagcaguauggcgauugucugggcgacauugccgccagggaucugauuugcgcccagaaguuuaacggacugacagugcugccuccucugcugaccgaugagaugaucgcccaguacacaucugcccugcuggccggcacaaucacaagcggcuggacauuuggagcuggcgccgcucugcagauccccuuugcuaugcagauggccuaccgguucaacggcaucggagugacccagaaugugcuguacgagaaccagaagcugaucgccaaccaguucaacagcgccaucggcaagauccaggacagccugagcagcacagcaagcgcccugggaaagcugcaggacguggucaaccagaaugcccaggcacugaacacccuggucaagcagcuguccuccaacuucggcgccaucagcucugugcugaacgauauccuggccagacuggacaaggucgaggccgaggugcagaucgacagacugaucacaggcagacugcagagccuccagacauacgugacccagcagcugaucagagccgccgagauuagagccucugccaaucuggccgccaccaagaugucugagugugugcugggccagagcaagagaguggacuuuugcggcaagggcuaccaccugaugagcuucccucagucugccccucacggcgugguguuucugcacgugacauaugugcccgcucaagagaagaauuucaccaccgcuccagccaucugccacgacggcaaagcccacuuuccuagagaaggcguguucguguccaacggcacccauugguucgugacacagcggaacuucuacgagccccagaucaucaccacccacaacaccuucgugucuggcaacugcgacguugugaucggcauugugaacaauaccguguacgacccucugcagcccgagcuggacagcuucaaagaggaacuggacaaguacuuuaagaaccacacaagccccgacguggaccugggcgauaucagcggaaucaaugccagcgucgugaacauccagaaagagaucgaccggcugaacgagguggccaagaaucugaacgagagccugaucgaccugcaagaacuggggaaguacgagcaguacaucaaguggcccugguacaucuggcugggcuuuaucgccggacugauugccaucgugauggucacaaucaugcuguguugcaugaccagcugcuguagcugccugaagggcuguuguagcuguggcagcugcugcaaguucgacgaggacgauucugagcccgugcugaagggcgugaaacugcacuacaccugaggacuaguguccaccugucccuccugggcugcuggauugucucguuuuccugccaaauaaacaggaucagcgcuuuacagaucucaaaggcucuuuucagagccaccaaaaaaaaaaaaaaaaaaaaaaaaaaaaaaaaaaaaaaaaaaaaaaaaaaaaaaaaaaaaaaaaaaaaaaaaaaaaaaaaaaaaaaaaaaaaaaaaaaaaa

SEQ ID NO: 23934 - RNA, 4129 nt, Artificial Sequence
  SARS-CoV-2/Wuhan/WIV05/2019__EPI_ISL_402128 spike protein mRNA gc mod (1-1273)(K417N_E484K_N501Y_D614G)
aggagacccgugacccggaaguuguacggcuacgcgacuuucccucccacaaacccucgcgcccuuccuuuccuacuugggcccggcagaaagcuuaccauguucguguuucuggugcugcugccccugguguccagccagugugugaaccugaccaccagaacacagcugccuccagccuacaccaacagcuucaccagaggcguguacuaccccgacaagguguucagauccagcgugcugcacucuacccaggaccuguuccugccuuucuucagcaacgugaccugguuccacgccauccacguguccggcaccaauggcaccaagagauucgacaaccccgugcugcccuucaacgacgggguguacuuugccagcaccgagaaguccaacaucaucagaggcuggaucuucggcaccacacuggacagcaagacccagagccugcugaucgugaacaacgccaccaacguggucaucaaagugugcgaguuccaguucugcaacgaccccuuccugggcgucuacuaccacaagaacaacaagagcuggauggaaagcgaguuccggguguacagcagcgccaacaacugcaccuucgaguacgugucccagccuuuccugauggaccuggaaggcaagcagggcaacuucaagaaccugcgcgaguucguguucaagaacaucgacggcuacuucaaaaucuacagcaagcacaccccuaucaaccucgugcgggaucugccucagggcuucucugcucuggaaccccugguggaucugcccaucggcaucaacaucacccgguuucagacacugcuggcccugcacagaagcuaccugacaccuggcgauagcagcagcggauggacagcuggugccgccgcuuacuaugugggcuaccugcagccuagaaccuuccugcugaaguacaacgagaacggcaccaucaccgacgccguggauugugcucuggauccucugagcgagacaaagugcacccugaaguccuucaccguggaaaagggcaucuaccagaccagcaacuuccgggugcagcccaccgaauccaucgugcgguuccccaauaucaccaaucugugccccuucggcgagguguucaaugccaccagauucgccucuguguacgccuggaaccggaagcggaucagcaauugcguggccgacuacuccgugcuguacaacuccgccagcuucagcaccuucaagugcuacggcguguccccuaccaagcugaacgaccugugcuucacaaacguguacgccgacagcuucgugauccggggagaugaagugcggcagauugccccuggacagacaggcaacaucgccgacuacaacuacaagcugcccgacgacuucaccggcugugugauugccuggaacagcaacaaccuggacuccaaagucggcggcaacuacaauuaccuguaccggcuguuccggaaguccaaucugaagcccuucgagcgggacaucagcaccgaaaucuaucaggccggcagcaccccuugcaacggcgugaagggcuucaacugcuacuucccacugcaguccuacggcuuucagcccacauacggcgugggcuaucagcccuacagagugguggugcugagcuucgaacugcugcaugcuccugccacagugugcggcccuaagaaaagcaccaaucucgugaagaacaaaugcgugaacuucaacuucaacggccugaccggcaccggcgugcugacagagagcaacaagaaguuccugccauuccagcaguuuggccgggauaucgccgauaccacagacgccguuagagauccccagacacuggaaauccuggacaucaccccaugcagcuucggcggagugucugugaucaccccuggcaccaacaccagcaaucagguggcagugcuguaccagggcgugaacuguaccgaagugcccguggccauucacgccgaucagcugacaccuacauggcggguguacuccaccggcagcaauguguuucagaccagagccggcugucugaucggagccgagcacgugaacaauagcuacgagugcgacauccccaucggcgcuggcaucugugccagcuaccagacacagacaaacagccccagacgggcuagaagcguggccagccagagcaucauugccuacacaaugucucugggcgccgagaacagcguggccuacuccaacaacucuaucgcuauccccaccaacuucaccaucagcgugaccaccgagauccugccuguguccaugaccaagaccagcguggacugcaccauguacaucugcggcgauuccaccgagugcuccaaccugcugcugcaguacggcagcuucugcacccagcugaauagagcccugacagggaucgccguggaacaggacaagaacacccaagagguguucgcccaagugaagcaaaucuacaagaccccuccuaucaaggacuucggcggcuucaauuucagccagauucugcccgauccuagcaagcccagcaagcggagcuucaucgaggaccugcuguucaacaaagugacacuggccgacgccggcuucaucaagcaguauggcgauugucugggcgacauugccgccagggaucugauuugcgcccagaaguuuaacggacugacagugcugccuccucugcugaccgaugagaugaucgcccaguacacaucugcccugcuggccggcacaaucacaagcggcuggacauuuggagcuggcgccgcucugcagauccccuuugcuaugcagauggccuaccgguucaacggcaucggagugacccagaaugugcuguacgagaaccagaagcugaucgccaaccaguucaacagcgccaucggcaagauccaggacagccugagcagcacagcaagcgcccugggaaagcugcaggacguggucaaccagaaugcccaggcacugaacacccuggucaagcagcuguccuccaacuucggcgccaucagcucugugcugaacgauauccugagcagacuggacaaggucgaggccgaggugcagaucgacagacugaucacaggcagacugcagagccuccagacauacgugacccagcagcugaucagagccgccgagauuagagccucugccaaucuggccgccaccaagaugucugagugugugcugggccagagcaagagaguggacuuuugcggcaagggcuaccaccugaugagcuucccucagucugccccucacggcgugguguuucugcacgugacauaugugcccgcucaagagaagaauuucaccaccgcuccagccaucugccacgacggcaaagcccacuuuccuagagaaggcguguucguguccaacggcacccauugguucgugacacagcggaacuucuacgagccccagaucaucaccaccgacaacaccuucgugucuggcaacugcgacguugugaucggcauugugaacaauaccguguacgacccucugcagcccgagcuggacagcuucaaagaggaacuggacaaguacuuuaagaaccacacaagccccgacguggaccugggcgauaucagcggaaucaaugccagcgucgugaacauccagaaagagaucgaccggcugaacgagguggccaagaaucugaacgagagccugaucgaccugcaagaacuggggaaguacgagcaguacaucaaguggcccugguacaucuggcugggcuuuaucgccggacugauugccaucgugauggucacaaucaugcuguguugcaugaccagcugcuguagcugccugaagggcuguuguagcuguggcagcugcugcaaguucgacgaggacgauucugagcccgugcugaagggcgugaaacugcacuacaccugaggacuaguguccaccugucccuccugggcugcuggauugucucguuuuccugccaaauaaacaggaucagcgcuuuacagaucucaaaggcucuuuucagagccaccaaaaaaaaaaaaaaaaaaaaaaaaaaaaaaaaaaaaaaaaaaaaaaaaaaaaaaaaaaaaaaaaaaaaaaaaaaaaaaaaaaaaaaaaaaaaaaaaaaaaa

SEQ ID NO: 23935 - RNA, 4120 nt, Artificial Sequence
  SARS-CoV-2/Wuhan/WIV05/2019__EPI_ISL_402128 spike protein mRNA gc mod (1-1273)(L18F_D80A_D215G_L242del_A243del_L244del_R246I_K417N_E484 K_N501Y_D614G_A701V)
aggagacccgugacccggaaguuguacggcuacgcgacuuucccucccacaaacccucgcgcccuuccuuuccuacuugggcccggcagaaagcuuaccauguucguguuucuggugcugcugccccugguguccagccagugugugaacuucaccaccagaacacagcugccuccagccuacaccaacagcuucaccagaggcguguacuaccccgacaagguguucagauccagcgugcugcacucuacccaggaccuguuccugccuuucuucagcaacgugaccugguuccacgccauccacguguccggcaccaauggcaccaagagauucgccaaccccgugcugcccuucaacgacgggguguacuuugccagcaccgagaaguccaacaucaucagaggcuggaucuucggcaccacacuggacagcaagacccagagccugcugaucgugaacaacgccaccaacguggucaucaaagugugcgaguuccaguucugcaacgaccccuuccugggcgucuacuaccacaagaacaacaagagcuggauggaaagcgaguuccggguguacagcagcgccaacaacugcaccuucgaguacgugucccagccuuuccugauggaccuggaaggcaagcagggcaacuucaagaaccugcgcgaguucguguucaagaacaucgacggcuacuucaaaaucuacagcaagcacaccccuaucaaccucgugcggggccugccucagggcuucucugcucuggaaccccugguggaucugcccaucggcaucaacaucacccgguuucagacacugcacaucagcuaccugacaccuggcgauagcagcagcggauggacagcuggugccgccgcuuacuaugugggcuaccugcagccuagaaccuuccugcugaaguacaacgagaacggcaccaucaccgacgccguggauugugcucuggauccucugagcgagacaaagugcacccugaaguccuucaccguggaaaagggcaucuaccagaccagcaacuuccgggugcagcccaccgaauccaucgugcgguuccccaauaucaccaaucugugccccuucggcgagguguucaaugccaccagauucgccucuguguacgccuggaaccggaagcggaucagcaauugcguggccgacuacuccgugcuguacaacuccgccagcuucagcaccuucaagugcuacggcguguccccuaccaagcugaacgaccugugcuucacaaacguguacgccgacagcuucgugauccggggagaugaagugcggcagauugccccuggacagacaggcaacaucgccgacuacaacuacaagcugcccgacgacuucaccggcugugugauugccuggaacagcaacaaccuggacuccaaagucggcggcaacuacaauuaccuguaccggcuguuccggaaguccaaucugaagcccuucgagcgggacaucagcaccgaaaucuaucaggccggcagcaccccuugcaacggcgugaagggcuucaacugcuacuucccacugcaguccuacggcuuucagcccacauacggcgugggcuaucagcccuacagagugguggugcugagcuucgaacugcugcaugcuccugccacagugugcggcccuaagaaaagcaccaaucucgugaagaacaaaugcgugaacuucaacuucaacggccugaccggcaccggcgugcugacagagagcaacaagaaguuccugccauuccagcaguuuggccgggauaucgccgauaccacagacgccguuagagauccccagacacuggaaauccuggacaucaccccaugcagcuucggcggagugucugugaucaccccuggcaccaacaccagcaaucagguggcagugcuguaccagggcgugaacuguaccgaagugcccguggccauucacgccgaucagcugacaccuacauggcggguguacuccaccggcagcaauguguuucagaccagagccggcugucugaucggagccgagcacgugaacaauagcuacgagugcgacauccccaucggcgcuggcaucugugccagcuaccagacacagacaaacagccccagacgggcuagaagcguggccagccagagcaucauugccuacacaaugucucugggcguggagaacagcguggccuacuccaacaacucuaucgcuauccccaccaacuucaccaucagcgugaccaccgagauccugccuguguccaugaccaagaccagcguggacugcaccauguacaucugcggcgauuccaccgagugcuccaaccugcugcugcaguacggcagcuucugcacccagcugaauagagcccugacagggaucgccguggaacaggacaagaacacccaagagguguucgcccaagugaagcaaaucuacaagaccccuccuaucaaggacuucggcggcuucaauuucagccagauucugcccgauccuagcaagcccagcaagcggagcuucaucgaggaccugcuguucaacaaagugacacuggccgacgccggcuucaucaagcaguauggcgauugucugggcgacauugccgccagggaucugauuugcgcccagaaguuuaacggacugacagugcugccuccucugcugaccgaugagaugaucgcccaguacacaucugcccugcuggccggcacaaucacaagcggcuggacauuuggagcuggcgccgcucugcagauccccuuugcuaugcagauggccuaccgguucaacggcaucggagugacccagaaugugcuguacgagaaccagaagcugaucgccaaccaguucaacagcgccaucggcaagauccaggacagccugagcagcacagcaagcgcccugggaaagcugcaggacguggucaaccagaaugcccaggcacugaacacccuggucaagcagcuguccuccaacuucggcgccaucagcucugugcugaacgauauccugagcagacuggacaaggucgaggccgaggugcagaucgacagacugaucacaggcagacugcagagccuccagacauacgugacccagcagcugaucagagccgccgagauuagagccucugccaaucuggccgccaccaagaugucugagugugugcugggccagagcaagagaguggacuuuugcggcaagggcuaccaccugaugagcuucccucagucugccccucacggcgugguguuucugcacgugacauaugugcccgcucaagagaagaauuucaccaccgcuccagccaucugccacgacggcaaagcccacuuuccuagagaaggcguguucguguccaacggcacccauugguucgugacacagcggaacuucuacgagccccagaucaucaccaccgacaacaccuucgugucuggcaacugcgacguugugaucggcauugugaacaauaccguguacgacccucugcagcccgagcuggacagcuucaaagaggaacuggacaaguacuuuaagaaccacacaagccccgacguggaccugggcgauaucagcggaaucaaugccagcgucgugaacauccagaaagagaucgaccggcugaacgagguggccaagaaucugaacgagagccugaucgaccugcaagaacuggggaaguacgagcaguacaucaaguggcccugguacaucuggcugggcuuuaucgccggacugauugccaucgugauggucacaaucaugcuguguugcaugaccagcugcuguagcugccugaagggcuguuguagcuguggcagcugcugcaaguucgacgaggacgauucugagcccgugcugaagggcgugaaacugcacuacaccugaggacuaguguccaccugucccuccugggcugcuggauugucucguuuuccugccaaauaaacaggaucagcgcuuuacagaucucaaaggcucuuuucagagccaccaaaaaaaaaaaaaaaaaaaaaaaaaaaaaaaaaaaaaaaaaaaaaaaaaaaaaaaaaaaaaaaaaaaaaaaaaaaaaaaaaaaaaaaaaaaaaaaaaaaaa

SEQ ID NO: 23936 - RNA, 4129 nt, Artificial Sequence
  SARS-CoV-2/Wuhan/WIV05/2019__EPI_ISL_402128 spike protein mRNA gc mod (1-1273)(E484K_D614G)
aggagacccgugacccggaaguuguacggcuacgcgacuuucccucccacaaacccucgcgcccuuccuuuccuacuugggcccggcagaaagcuuaccauguucguguuucuggugcugcugccccugguguccagccagugugugaaccugaccaccagaacacagcugccuccagccuacaccaacagcuucaccagaggcguguacuaccccgacaagguguucagauccagcgugcugcacucuacccaggaccuguuccugccuuucuucagcaacgugaccugguuccacgccauccacguguccggcaccaauggcaccaagagauucgacaaccccgugcugcccuucaacgacgggguguacuuugccagcaccgagaaguccaacaucaucagaggcuggaucuucggcaccacacuggacagcaagacccagagccugcugaucgugaacaacgccaccaacguggucaucaaagugugcgaguuccaguucugcaacgaccccuuccugggcgucuacuaccacaagaacaacaagagcuggauggaaagcgaguuccggguguacagcagcgccaacaacugcaccuucgaguacgugucccagccuuuccugauggaccuggaaggcaagcagggcaacuucaagaaccugcgcgaguucguguucaagaacaucgacggcuacuucaaaaucuacagcaagcacaccccuaucaaccucgugcgggaucugccucagggcuucucugcucuggaaccccugguggaucugcccaucggcaucaacaucacccgguuucagacacugcuggcccugcacagaagcuaccugacaccuggcgauagcagcagcggauggacagcuggugccgccgcuuacuaugugggcuaccugcagccuagaaccuuccugcugaaguacaacgagaacggcaccaucaccgacgccguggauugugcucuggauccucugagcgagacaaagugcacccugaaguccuucaccguggaaaagggcaucuaccagaccagcaacuuccgggugcagcccaccgaauccaucgugcgguuccccaauaucaccaaucugugccccuucggcgagguguucaaugccaccagauucgccucuguguacgccuggaaccggaagcggaucagcaauugcguggccgacuacuccgugcuguacaacuccgccagcuucagcaccuucaagugcuacggcguguccccuaccaagcugaacgaccugugcuucacaaacguguacgccgacagcuucgugauccggggagaugaagugcggcagauugccccuggacagacaggcaagaucgccgacuacaacuacaagcugcccgacgacuucaccggcugugugauugccuggaacagcaacaaccuggacuccaaagucggcggcaacuacaauuaccuguaccggcuguuccggaaguccaaucugaagcccuucgagcgggacaucagcaccgaaaucuaucaggccggcagcaccccuugcaacggcgugaagggcuucaacugcuacuucccacugcaguccuacggcuuucagcccacaaauggcgugggcuaucagcccuacagagugguggugcugagcuucgaacugcugcaugcuccugccacagugugcggcccuaagaaaagcaccaaucucgugaagaacaaaugcgugaacuucaacuucaacggccugaccggcaccggcgugcugacagagagcaacaagaaguuccugccauuccagcaguuuggccgggauaucgccgauaccacagacgccguuagagauccccagacacuggaaauccuggacaucaccccaugcagcuucggcggagugucugugaucaccccuggcaccaacaccagcaaucagguggcagugcuguaccagggcgugaacuguaccgaagugcccguggccauucacgccgaucagcugacaccuacauggcggguguacuccaccggcagcaauguguuucagaccagagccggcugucugaucggagccgagcacgugaacaauagcuacgagugcgacauccccaucggcgcuggcaucugugccagcuaccagacacagacaaacagccccagacgggcuagaagcguggccagccagagcaucauugccuacacaaugucucugggcgccgagaacagcguggccuacuccaacaacucuaucgcuauccccaccaacuucaccaucagcgugaccaccgagauccugccuguguccaugaccaagaccagcguggacugcaccauguacaucugcggcgauuccaccgagugcuccaaccugcugcugcaguacggcagcuucugcacccagcugaauagagcccugacagggaucgccguggaacaggacaagaacacccaagagguguucgcccaagugaagcaaaucuacaagaccccuccuaucaaggacuucggcggcuucaauuucagccagauucugcccgauccuagcaagcccagcaagcggagcuucaucgaggaccugcuguucaacaaagugacacuggccgacgccggcuucaucaagcaguauggcgauugucugggcgacauugccgccagggaucugauuugcgcccagaaguuuaacggacugacagugcugccuccucugcugaccgaugagaugaucgcccaguacacaucugcccugcuggccggcacaaucacaagcggcuggacauuuggagcuggcgccgcucugcagauccccuuugcuaugcagauggccuaccgguucaacggcaucggagugacccagaaugugcuguacgagaaccagaagcugaucgccaaccaguucaacagcgccaucggcaagauccaggacagccugagcagcacagcaagcgcccugggaaagcugcaggacguggucaaccagaaugcccaggcacugaacacccuggucaagcagcuguccuccaacuucggcgccaucagcucugugcugaacgauauccugagcagacuggacaaggucgaggccgaggugcagaucgacagacugaucacaggcagacugcagagccuccagacauacgugacccagcagcugaucagagccgccgagauuagagccucugccaaucuggccgccaccaagaugucugagugugugcugggccagagcaagagaguggacuuuugcggcaagggcuaccaccugaugagcuucccucagucugccccucacggcgugguguuucugcacgugacauaugugcccgcucaagagaagaauuucaccaccgcuccagccaucugccacgacggcaaagcccacuuuccuagagaaggcguguucguguccaacggcacccauugguucgugacacagcggaacuucuacgagccccagaucaucaccaccgacaacaccuucgugucuggcaacugcgacguugugaucggcauugugaacaauaccguguacgacccucugcagcccgagcuggacagcuucaaagaggaacuggacaaguacuuuaagaaccacacaagccccgacguggaccugggcgauaucagcggaaucaaugccagcgucgugaacauccagaaagagaucgaccggcugaacgagguggccaagaaucugaacgagagccugaucgaccugcaagaacuggggaaguacgagcaguacaucaaguggcccugguacaucuggcugggcuuuaucgccggacugauugccaucgugauggucacaaucaugcuguguugcaugaccagcugcuguagcugccugaagggcuguuguagcuguggcagcugcugcaaguucgacgaggacgauucugagcccgugcugaagggcgugaaacugcacuacaccugaggacuaguguccaccugucccuccugggcugcuggauugucucguuuuccugccaaauaaacaggaucagcgcuuuacagaucucaaaggcucuuuucagagccaccaaaaaaaaaaaaaaaaaaaaaaaaaaaaaaaaaaaaaaaaaaaaaaaaaaaaaaaaaaaaaaaaaaaaaaaaaaaaaaaaaaaaaaaaaaaaaaaaaaaaa

SEQ ID NO: 23937 - RNA, 4129 nt, Artificial Sequence
  SARS-CoV-2/Wuhan/WIV05/2019__EPI_ISL_402128 spike protein mRNA gc mod (1-1273)(L18F_T20N_P26S_D138Y_R190S_K417T_E484K_N501Y_D614G_H655Y _T1027I)
aggagacccgugacccggaaguuguacggcuacgcgacuuucccucccacaaacccucgcgcccuuccuuuccuacuugggcccggcagaaagcuuaccauguucguguuucuggugcugcugccccugguguccagccagugugugaacuucaccaacagaacacagcugccuagcgccuacaccaacagcuucaccagaggcguguacuaccccgacaagguguucagauccagcgugcugcacucuacccaggaccuguuccugccuuucuucagcaacgugaccugguuccacgccauccacguguccggcaccaauggcaccaagagauucgacaaccccgugcugcccuucaacgacgggguguacuuugccagcaccgagaaguccaacaucaucagaggcuggaucuucggcaccacacuggacagcaagacccagagccugcugaucgugaacaacgccaccaacguggucaucaaagugugcgaguuccaguucugcaacuaccccuuccugggcgucuacuaccacaagaacaacaagagcuggauggaaagcgaguuccggguguacagcagcgccaacaacugcaccuucgaguacgugucccagccuuuccugauggaccuggaaggcaagcagggcaacuucaagaaccugagcgaguucguguucaagaacaucgacggcuacuucaaaaucuacagcaagcacaccccuaucaaccucgugcgggaucugccucagggcuucucugcucuggaaccccugguggaucugcccaucggcaucaacaucacccgguuucagacacugcuggcccugcacagaagcuaccugacaccuggcgauagcagcagcggauggacagcuggugccgccgcuuacuaugugggcuaccugcagccuagaaccuuccugcugaaguacaacgagaacggcaccaucaccgacgccguggauugugcucuggauccucugagcgagacaaagugcacccugaaguccuucaccguggaaaagggcaucuaccagaccagcaacuuccgggugcagcccaccgaauccaucgugcgguuccccaauaucaccaaucugugccccuucggcgagguguucaaugccaccagauucgccucuguguacgccuggaaccggaagcggaucagcaauugcguggccgacuacuccgugcuguacaacuccgccagcuucagcaccuucaagugcuacggcguguccccuaccaagcugaacgaccugugcuucacaaacguguacgccgacagcuucgugauccggggagaugaagugcggcagauugccccuggacagacaggcaccaucgccgacuacaacuacaagcugcccgacgacuucaccggcugugugauugccuggaacagcaacaaccuggacuccaaagucggcggcaacuacaauuaccuguaccggcuguuccggaaguccaaucugaagcccuucgagcgggacaucagcaccgaaaucuaucaggccggcagcaccccuugcaacggcgugaagggcuucaacugcuacuucccacugcaguccuacggcuuucagcccacauacggcgugggcuaucagcccuacagagugguggugcugagcuucgaacugcugcaugcuccugccacagugugcggcccuaagaaaagcaccaaucucgugaagaacaaaugcgugaacuucaacuucaacggccugaccggcaccggcgugcugacagagagcaacaagaaguuccugccauuccagcaguuuggccgggauaucgccgauaccacagacgccguuagagauccccagacacuggaaauccuggacaucaccccaugcagcuucggcggagugucugugaucaccccuggcaccaacaccagcaaucagguggcagugcuguaccagggcgugaacuguaccgaagugcccguggccauucacgccgaucagcugacaccuacauggcggguguacuccaccggcagcaauguguuucagaccagagccggcugucugaucggagccgaguacgugaacaauagcuacgagugcgacauccccaucggcgcuggcaucugugccagcuaccagacacagacaaacagccccagacgggcuagaagcguggccagccagagcaucauugccuacacaaugucucugggcgccgagaacagcguggccuacuccaacaacucuaucgcuauccccaccaacuucaccaucagcgugaccaccgagauccugccuguguccaugaccaagaccagcguggacugcaccauguacaucugcggcgauuccaccgagugcuccaaccugcugcugcaguacggcagcuucugcacccagcugaauagagcccugacagggaucgccguggaacaggacaagaacacccaagagguguucgcccaagugaagcaaaucuacaagaccccuccuaucaaggacuucggcggcuucaauuucagccagauucugcccgauccuagcaagcccagcaagcggagcuucaucgaggaccugcuguucaacaaagugacacuggccgacgccggcuucaucaagcaguauggcgauugucugggcgacauugccgccagggaucugauuugcgcccagaaguuuaacggacugacagugcugccuccucugcugaccgaugagaugaucgcccaguacacaucugcccugcuggccggcacaaucacaagcggcuggacauuuggagcuggcgccgcucugcagauccccuuugcuaugcagauggccuaccgguucaacggcaucggagugacccagaaugugcuguacgagaaccagaagcugaucgccaaccaguucaacagcgccaucggcaagauccaggacagccugagcagcacagcaagcgcccugggaaagcugcaggacguggucaaccagaaugcccaggcacugaacacccuggucaagcagcuguccuccaacuucggcgccaucagcucugugcugaacgauauccugagcagacuggacaaggucgaggccgaggugcagaucgacagacugaucacaggcagacugcagagccuccagacauacgugacccagcagcugaucagagccgccgagauuagagccucugccaaucuggccgccaucaagaugucugagugugugcugggccagagcaagagaguggacuuuugcggcaagggcuaccaccugaugagcuucccucagucugccccucacggcgugguguuucugcacgugacauaugugcccgcucaagagaagaauuucaccaccgcuccagccaucugccacgacggcaaagcccacuuuccuagagaaggcguguucguguccaacggcacccauugguucgugacacagcggaacuucuacgagccccagaucaucaccaccgacaacaccuucgugucuggcaacugcgacguugugaucggcauugugaacaauaccguguacgacccucugcagcccgagcuggacagcuucaaagaggaacuggacaaguacuuuaagaaccacacaagccccgacguggaccugggcgauaucagcggaaucaaugccagcgucgugaacauccagaaagagaucgaccggcugaacgagguggccaagaaucugaacgagagccugaucgaccugcaagaacuggggaaguacgagcaguacaucaaguggcccugguacaucuggcugggcuuuaucgccggacugauugccaucgugauggucacaaucaugcuguguugcaugaccagcugcuguagcugccugaagggcuguuguagcuguggcagcugcugcaaguucgacgaggacgauucugagcccgugcugaagggcgugaaacugcacuacaccugaggacuaguguccaccugucccuccugggcugcuggauugucucguuuuccugccaaauaaacaggaucagcgcuuuacagaucucaaaggcucuuuucagagccaccaaaaaaaaaaaaaaaaaaaaaaaaaaaaaaaaaaaaaaaaaaaaaaaaaaaaaaaaaaaaaaaaaaaaaaaaaaaaaaaaaaaaaaaaaaaaaaaaaaaaa

SEQ ID NO: 23938 - RNA, 4129 nt, Artificial Sequence
  SARS-CoV-2/Wuhan/WIV05/2019__EPI_ISL_402128 spike protein mRNA gc mod (1-1273)(S13I_W152C_L452R_D614G)
aggagacccgugacccggaaguuguacggcuacgcgacuuucccucccacaaacccucgcgcccuuccuuuccuacuugggcccggcagaaagcuuaccauguucguguuucuggugcugcugccccugguguccauccagugugugaaccugaccaccagaacacagcugccuccagccuacaccaacagcuucaccagaggcguguacuaccccgacaagguguucagauccagcgugcugcacucuacccaggaccuguuccugccuuucuucagcaacgugaccugguuccacgccauccacguguccggcaccaauggcaccaagagauucgacaaccccgugcugcccuucaacgacgggguguacuuugccagcaccgagaaguccaacaucaucagaggcuggaucuucggcaccacacuggacagcaagacccagagccugcugaucgugaacaacgccaccaacguggucaucaaagugugcgaguuccaguucugcaacgaccccuuccugggcgucuacuaccacaagaacaacaagagcugcauggaaagcgaguuccggguguacagcagcgccaacaacugcaccuucgaguacgugucccagccuuuccugauggaccuggaaggcaagcagggcaacuucaagaaccugcgcgaguucguguucaagaacaucgacggcuacuucaaaaucuacagcaagcacaccccuaucaaccucgugcgggaucugccucagggcuucucugcucuggaaccccugguggaucugcccaucggcaucaacaucacccgguuucagacacugcuggcccugcacagaagcuaccugacaccuggcgauagcagcagcggauggacagcuggugccgccgcuuacuaugugggcuaccugcagccuagaaccuuccugcugaaguacaacgagaacggcaccaucaccgacgccguggauugugcucuggauccucugagcgagacaaagugcacccugaaguccuucaccguggaaaagggcaucuaccagaccagcaacuuccgggugcagcccaccgaauccaucgugcgguuccccaauaucaccaaucugugccccuucggcgagguguucaaugccaccagauucgccucuguguacgccuggaaccggaagcggaucagcaauugcguggccgacuacuccgugcuguacaacuccgccagcuucagcaccuucaagugcuacggcguguccccuaccaagcugaacgaccugugcuucacaaacguguacgccgacagcuucgugauccggggagaugaagugcggcagauugccccuggacagacaggcaagaucgccgacuacaacuacaagcugcccgacgacuucaccggcugugugauugccuggaacagcaacaaccuggacuccaaagucggcggcaacuacaauuaccgcuaccggcuguuccggaaguccaaucugaagcccuucgagcgggacaucagcaccgaaaucuaucaggccggcagcaccccuugcaacggcguggaaggcuucaacugcuacuucccacugcaguccuacggcuuucagcccacaaauggcgugggcuaucagcccuacagagugguggugcugagcuucgaacugcugcaugcuccugccacagugugcggcccuaagaaaagcaccaaucucgugaagaacaaaugcgugaacuucaacuucaacggccugaccggcaccggcgugcugacagagagcaacaagaaguuccugccauuccagcaguuuggccgggauaucgccgauaccacagacgccguuagagauccccagacacuggaaauccuggacaucaccccaugcagcuucggcggagugucugugaucaccccuggcaccaacaccagcaaucagguggcagugcuguaccagggcgugaacuguaccgaagugcccguggccauucacgccgaucagcugacaccuacauggcggguguacuccaccggcagcaauguguuucagaccagagccggcugucugaucggagccgagcacgugaacaauagcuacgagugcgacauccccaucggcgcuggcaucugugccagcuaccagacacagacaaacagccccagacgggcuagaagcguggccagccagagcaucauugccuacacaaugucucugggcgccgagaacagcguggccuacuccaacaacucuaucgcuauccccaccaacuucaccaucagcgugaccaccgagauccugccuguguccaugaccaagaccagcguggacugcaccauguacaucugcggcgauuccaccgagugcuccaaccugcugcugcaguacggcagcuucugcacccagcugaauagagcccugacagggaucgccguggaacaggacaagaacacccaagagguguucgcccaagugaagcaaaucuacaagaccccuccuaucaaggacuucggcggcuucaauuucagccagauucugcccgauccuagcaagcccagcaagcggagcuucaucgaggaccugcuguucaacaaagugacacuggccgacgccggcuucaucaagcaguauggcgauugucugggcgacauugccgccagggaucugauuugcgcccagaaguuuaacggacugacagugcugccuccucugcugaccgaugagaugaucgcccaguacacaucugcccugcuggccggcacaaucacaagcggcuggacauuuggagcuggcgccgcucugcagauccccuuugcuaugcagauggccuaccgguucaacggcaucggagugacccagaaugugcuguacgagaaccagaagcugaucgccaaccaguucaacagcgccaucggcaagauccaggacagccugagcagcacagcaagcgcccugggaaagcugcaggacguggucaaccagaaugcccaggcacugaacacccuggucaagcagcuguccuccaacuucggcgccaucagcucugugcugaacgauauccugagcagacuggacaaggucgaggccgaggugcagaucgacagacugaucacaggcagacugcagagccuccagacauacgugacccagcagcugaucagagccgccgagauuagagccucugccaaucuggccgccaccaagaugucugagugugugcugggccagagcaagagaguggacuuuugcggcaagggcuaccaccugaugagcuucccucagucugccccucacggcgugguguuucugcacgugacauaugugcccgcucaagagaagaauuucaccaccgcuccagccaucugccacgacggcaaagcccacuuuccuagagaaggcguguucguguccaacggcacccauugguucgugacacagcggaacuucuacgagccccagaucaucaccaccgacaacaccuucgugucuggcaacugcgacguugugaucggcauugugaacaauaccguguacgacccucugcagcccgagcuggacagcuucaaagaggaacuggacaaguacuuuaagaaccacacaagccccgacguggaccugggcgauaucagcggaaucaaugccagcgucgugaacauccagaaagagaucgaccggcugaacgagguggccaagaaucugaacgagagccugaucgaccugcaagaacuggggaaguacgagcaguacaucaaguggcccugguacaucuggcugggcuuuaucgccggacugauugccaucgugauggucacaaucaugcuguguugcaugaccagcugcuguagcugccugaagggcuguuguagcuguggcagcugcugcaaguucgacgaggacgauucugagcccgugcugaagggcgugaaacugcacuacaccugaggacuaguguccaccugucccuccugggcugcuggauugucucguuuuccugccaaauaaacaggaucagcgcuuuacagaucucaaaggcucuuuucagagccaccaaaaaaaaaaaaaaaaaaaaaaaaaaaaaaaaaaaaaaaaaaaaaaaaaaaaaaaaaaaaaaaaaaaaaaaaaaaaaaaaaaaaaaaaaaaaaaaaaaaaa

SEQ ID NO: 23939 - RNA, 4129 nt, Artificial Sequence
  SARS-CoV-2/Wuhan/WIV05/2019__EPI_ISL_402128 spike protein mRNA gc mod (1-1273)
aggagacccgugacccggaaguuguacggcuacgcgacuuucccucccacaaacccucgcgcccuuccuuuccuacuugggcccggcagaaagcuuaccauguucguguuccuggugcugcugccucugguguccagccagugugugaaccugaccaccagaacacagcugccuccagccuacaccaacagcuuuaccagaggcguguacuaccccgacaagguguucagauccagcgugcugcacucuacccaggaccuguuccugccuuucuucagcaacgugaccugguuccacgccauccacguguccggcaccaauggcaccaagagauucgacaaccccgugcugcccuucaacgacgggguguacuuugccagcaccgagaaguccaacaucaucagaggcuggaucuucggcaccacacuggacagcaagacccagagccugcugaucgugaacaacgccaccaacguggucaucaaagugugcgaguuccaguucugcaacgaccccuuccugggcgucuacuaccacaagaacaacaagagcuggauggaaagcgaguuccggguguacagcagcgccaacaacugcaccuucgaguacgugucccagccuuuccugauggaccuggaaggcaagcagggcaacuucaagaaccugcgcgaguucguguuuaagaacaucgacggcuacuucaagaucuacagcaagcacaccccuaucaaccucgugcgggaucugccucagggcuucucugcucuggaaccccugguggaucugcccaucggcaucaacaucacccgguuucagacacugcuggcccugcacagaagcuaccugacaccuggcgauagcagcagcggauggacagcuggugccgccgcuuacuaugugggcuaccugcagccuagaaccuuccugcugaaguacaacgagaacggcaccaucaccgacgccguggauugugcucuggauccucugagcgagacaaagugcacccugaaguccuucaccguggaaaagggcaucuaccagaccagcaacuuccgggugcagcccaccgaauccaucgugcgguuccccaauaucaccaaucugugccccuucggcgagguguucaaugccaccagauucgccucuguguacgccuggaaccggaagcggaucagcaauugcguggccgacuacuccgugcuguacaacuccgccagcuucagcaccuucaagugcuacggcguguccccuaccaagcugaacgaccugugcuucacaaacguguacgccgacagcuucgugauccggggagaugaagugcggcagauugccccuggacagacaggcaagaucgccgacuacaacuacaagcugcccgacgacuucaccggcugugugauugccuggaacagcaacaaccuggacuccaaagucggcggcaacuacaauuaccuguaccggcuguuccggaaguccaaucugaagcccuucgagcgggacaucuccaccgagaucuaucaggccggcagcaccccuuguaacggcguggaaggcuucaacugcuacuucccacugcaguccuacggcuuucagcccacaaauggcgugggcuaucagcccuacagagugguggugcugagcuucgaacugcugcaugccccugccacagugugcggcccuaagaaaagcaccaaucucgugaagaacaaaugcgugaacuucaacuucaacggccugaccggcaccggcgugcugacagagagcaacaagaaguuccugccauuccagcaguuuggccgggauaucgccgauaccacagacgccguuagagauccccagacacuggaaauccuggacaucaccccuugcagcuucggcggagugucugugaucaccccuggcaccaacaccagcaaucagguggcagugcuguaccaggacgugaacuguaccgaagugcccguggccauucacgccgaucagcugacaccuacauggcggguguacuccaccggcagcaauguguuucagaccagagccggcugucugaucggagccgagcacgugaacaauagcuacgagugcgacauccccaucggcgcuggaaucugcgccagcuaccagacacagacaaacagcccucggagagccagaagcguggccagccagagcaucauugccuacacaaugucucugggcgccgagaacagcguggccuacuccaacaacucuaucgcuauccccaccaacuucaccaucagcgugaccacagagauccugccuguguccaugaccaagaccagcguggacugcaccauguacaucugcggcgauuccaccgagugcuccaaccugcugcugcaguacggcagcuucugcacccagcugaauagagcccugacagggaucgccguggaacaggacaagaacacccaagagguguucgcccaagugaagcagaucuacaagaccccuccuaucaaggacuucggcggcuucaauuucagccagauucugcccgauccuagcaagcccagcaagcggagcuucaucgaggaccugcuguucaacaaagugacacuggccgacgccggcuucaucaagcaguauggcgauugucugggcgacauugccgccagggaucugauuugcgcccagaaguuuaacggacugacagugcugccuccucugcugaccgaugagaugaucgcccaguacacaucugcccugcuggccggcacaaucacaagcggcuggacauuuggagcaggcgccgcucugcagauccccuuugcuaugcagauggccuaccgguucaacggcaucggagugacccagaaugugcuguacgagaaccagaagcugaucgccaaccaguucaacagcgccaucggcaagauccaggacagccugagcagcacagcaagcgcccugggaaagcugcaggacguggucaaccagaaugcccaggcacugaacacccuggucaagcagcuguccuccaacuucggcgccaucagcucugugcugaacgauauccugagcagacuggacaaggucgaggccgaggugcagaucgacagacugaucacaggcagacugcagagccuccagacauacgugacccagcagcugaucagagccgccgagauuagagccucugccaaucuggccgccaccaagaugucugagugugugcugggccagagcaagagaguggacuuuugcggcaagggcuaccaccugaugagcuucccucagucugccccucacggcgugguguuucugcacgugacauaugugcccgcucaagagaagaauuucaccaccgcuccagccaucugccacgacggcaaagcccacuuuccuagagaaggcguguucguguccaacggcacccauugguucgugacacagcggaacuucuacgagccccagaucaucaccaccgacaacaccuucgugucuggcaacugcgacgucgugaucggcauugugaacaauaccguguacgacccucugcagcccgagcuggacagcuucaaagaggaacuggacaaguacuuuaagaaccacacaagccccgacguggaccugggcgauaucagcggaaucaaugccagcgucgugaacauccagaaagagaucgaccggcugaacgagguggccaagaaucugaacgagagccugaucgaccugcaagaacuggggaaguacgagcaguacaucaaguggcccugguacaucuggcugggcuuuaucgccggacugauugccaucgugauggucacaaucaugcuguguugcaugaccagcugcuguagcugccugaagggcuguuguagcuguggcagcugcugcaaguucgacgaggacgauucugagcccgugcugaagggcgugaaacugcacuacacaugaggacuaguguccaccugucccuccugggcugcuggauugucucguuuuccugccaaauaaacaggaucagcgcuuuacagaucucaaaggcucuuuucagagccaccaaaaaaaaaaaaaaaaaaaaaaaaaaaaaaaaaaaaaaaaaaaaaaaaaaaaaaaaaaaaaaaaaaaaaaaaaaaaaaaaaaaaaaaaaaaaaaaaaaaaa

SEQ ID NO: 23940 - RNA, 4129 nt, Artificial Sequence
  SARS-CoV-2/Wuhan/WIV05/2019__EPI_ISL_402128 spike protein mRNA gc mod (1-1273)(D614G)
aggagacccgugacccggaaguuguacggcuacgcgacuuucccucccacaaacccucgcgcccuuccuuuccuacuugggcccggcagaaagcuuaccauguucguguuccuggugcugcugccucugguguccagccagugugugaaccugaccaccagaacacagcugccuccagccuacaccaacagcuuuaccagaggcguguacuaccccgacaagguguucagauccagcgugcugcacucuacccaggaccuguuccugccuuucuucagcaacgugaccugguuccacgccauccacguguccggcaccaauggcaccaagagauucgacaaccccgugcugcccuucaacgacgggguguacuuugccagcaccgagaaguccaacaucaucagaggcuggaucuucggcaccacacuggacagcaagacccagagccugcugaucgugaacaacgccaccaacguggucaucaaagugugcgaguuccaguucugcaacgaccccuuccugggcgucuacuaccacaagaacaacaagagcuggauggaaagcgaguuccggguguacagcagcgccaacaacugcaccuucgaguacgugucccagccuuuccugauggaccuggaaggcaagcagggcaacuucaagaaccugcgcgaguucguguuuaagaacaucgacggcuacuucaagaucuacagcaagcacaccccuaucaaccucgugcgggaucugccucagggcuucucugcucuggaaccccugguggaucugcccaucggcaucaacaucacccgguuucagacacugcuggcccugcacagaagcuaccugacaccuggcgauagcagcagcggauggacagcuggugccgccgcuuacuaugugggcuaccugcagccuagaaccuuccugcugaaguacaacgagaacggcaccaucaccgacgccguggauugugcucuggauccucugagcgagacaaagugcacccugaaguccuucaccguggaaaagggcaucuaccagaccagcaacuuccgggugcagcccaccgaauccaucgugcgguuccccaauaucaccaaucugugccccuucggcgagguguucaaugccaccagauucgccucuguguacgccuggaaccggaagcggaucagcaauugcguggccgacuacuccgugcuguacaacuccgccagcuucagcaccuucaagugcuacggcguguccccuaccaagcugaacgaccugugcuucacaaacguguacgccgacagcuucgugauccggggagaugaagugcggcagauugccccuggacagacaggcaagaucgccgacuacaacuacaagcugcccgacgacuucaccggcugugugauugccuggaacagcaacaaccuggacuccaaagucggcggcaacuacaauuaccuguaccggcuguuccggaaguccaaucugaagcccuucgagcgggacaucuccaccgagaucuaucaggccggcagcaccccuuguaacggcguggaaggcuucaacugcuacuucccacugcaguccuacggcuuucagcccacaaauggcgugggcuaucagcccuacagagugguggugcugagcuucgaacugcugcaugccccugccacagugugcggcccuaagaaaagcaccaaucucgugaagaacaaaugcgugaacuucaacuucaacggccugaccggcaccggcgugcugacagagagcaacaagaaguuccugccauuccagcaguuuggccgggauaucgccgauaccacagacgccguuagagauccccagacacuggaaauccuggacaucaccccuugcagcuucggcggagugucugugaucaccccuggcaccaacaccagcaaucagguggcagugcuguaccagggcgugaacuguaccgaagugcccguggccauucacgccgaucagcugacaccuacauggcggguguacuccaccggcagcaauguguuucagaccagagccggcugucugaucggagccgagcacgugaacaauagcuacgagugcgacauccccaucggcgcuggaaucugcgccagcuaccagacacagacaaacagcccucggagagccagaagcguggccagccagagcaucauugccuacacaaugucucugggcgccgagaacagcguggccuacuccaacaacucuaucgcuauccccaccaacuucaccaucagcgugaccacagagauccugccuguguccaugaccaagaccagcguggacugcaccauguacaucugcggcgauuccaccgagugcuccaaccugcugcugcaguacggcagcuucugcacccagcugaauagagcccugacagggaucgccguggaacaggacaagaacacccaagagguguucgcccaagugaagcagaucuacaagaccccuccuaucaaggacuucggcggcuucaauuucagccagauucugcccgauccuagcaagcccagcaagcggagcuucaucgaggaccugcuguucaacaaagugacacuggccgacgccggcuucaucaagcaguauggcgauugucugggcgacauugccgccagggaucugauuugcgcccagaaguuuaacggacugacagugcugccuccucugcugaccgaugagaugaucgcccaguacacaucugcccugcuggccggcacaaucacaagcggcuggacauuuggagcaggcgccgcucugcagauccccuuugcuaugcagauggccuaccgguucaacggcaucggagugacccagaaugugcuguacgagaaccagaagcugaucgccaaccaguucaacagcgccaucggcaagauccaggacagccugagcagcacagcaagcgcccugggaaagcugcaggacguggucaaccagaaugcccaggcacugaacacccuggucaagcagcuguccuccaacuucggcgccaucagcucugugcugaacgauauccugagcagacuggacaaggucgaggccgaggugcagaucgacagacugaucacaggcagacugcagagccuccagacauacgugacccagcagcugaucagagccgccgagauuagagccucugccaaucuggccgccaccaagaugucugagugugugcugggccagagcaagagaguggacuuuugcggcaagggcuaccaccugaugagcuucccucagucugccccucacggcgugguguuucugcacgugacauaugugcccgcucaagagaagaauuucaccaccgcuccagccaucugccacgacggcaaagcccacuuuccuagagaaggcguguucguguccaacggcacccauugguucgugacacagcggaacuucuacgagccccagaucaucaccaccgacaacaccuucgugucuggcaacugcgacgucgugaucggcauugugaacaauaccguguacgacccucugcagcccgagcuggacagcuucaaagaggaacuggacaaguacuuuaagaaccacacaagccccgacguggaccugggcgauaucagcggaaucaaugccagcgucgugaacauccagaaagagaucgaccggcugaacgagguggccaagaaucugaacgagagccugaucgaccugcaagaacuggggaaguacgagcaguacaucaaguggcccugguacaucuggcugggcuuuaucgccggacugauugccaucgugauggucacaaucaugcuguguugcaugaccagcugcuguagcugccugaagggcuguuguagcuguggcagcugcugcaaguucgacgaggacgauucugagcccgugcugaagggcgugaaacugcacuacacaugaggacuaguguccaccugucccuccugggcugcuggauugucucguuuuccugccaaauaaacaggaucagcgcuuuacagaucucaaaggcucuuuucagagccaccaaaaaaaaaaaaaaaaaaaaaaaaaaaaaaaaaaaaaaaaaaaaaaaaaaaaaaaaaaaaaaaaaaaaaaaaaaaaaaaaaaaaaaaaaaaaaaaaaaaaa

SEQ ID NO: 23941 - RNA, 4129 nt, Artificial Sequence
  SARS-CoV-2/Wuhan/WIV05/2019__EPI_ISL_402128 spike protein mRNA gc mod (1-1273)(A222V_D614G)
aggagacccgugacccggaaguuguacggcuacgcgacuuucccucccacaaacccucgcgcccuuccuuuccuacuugggcccggcagaaagcuuaccauguucguguuccuggugcugcugccucugguguccagccagugugugaaccugaccaccagaacacagcugccuccagccuacaccaacagcuuuaccagaggcguguacuaccccgacaagguguucagauccagcgugcugcacucuacccaggaccuguuccugccuuucuucagcaacgugaccugguuccacgccauccacguguccggcaccaauggcaccaagagauucgacaaccccgugcugcccuucaacgacgggguguacuuugccagcaccgagaaguccaacaucaucagaggcuggaucuucggcaccacacuggacagcaagacccagagccugcugaucgugaacaacgccaccaacguggucaucaaagugugcgaguuccaguucugcaacgaccccuuccugggcgucuacuaccacaagaacaacaagagcuggauggaaagcgaguuccggguguacagcagcgccaacaacugcaccuucgaguacgugucccagccuuuccugauggaccuggaaggcaagcagggcaacuucaagaaccugcgcgaguucguguuuaagaacaucgacggcuacuucaagaucuacagcaagcacaccccuaucaaccucgugcgggaucugccucagggcuucucugugcuggaaccccugguggaucugcccaucggcaucaacaucacccgguuucagacacugcuggcccugcacagaagcuaccugacaccuggcgauagcagcagcggauggacagcuggugccgccgcuuacuaugugggcuaccugcagccuagaaccuuccugcugaaguacaacgagaacggcaccaucaccgacgccguggauugugcucuggauccucugagcgagacaaagugcacccugaaguccuucaccguggaaaagggcaucuaccagaccagcaacuuccgggugcagcccaccgaauccaucgugcgguuccccaauaucaccaaucugugccccuucggcgagguguucaaugccaccagauucgccucuguguacgccuggaaccggaagcggaucagcaauugcguggccgacuacuccgugcuguacaacuccgccagcuucagcaccuucaagugcuacggcguguccccuaccaagcugaacgaccugugcuucacaaacguguacgccgacagcuucgugauccggggagaugaagugcggcagauugccccuggacagacaggcaagaucgccgacuacaacuacaagcugcccgacgacuucaccggcugugugauugccuggaacagcaacaaccuggacuccaaagucggcggcaacuacaauuaccuguaccggcuguuccggaaguccaaucugaagcccuucgagcgggacaucuccaccgagaucuaucaggccggcagcaccccuuguaacggcguggaaggcuucaacugcuacuucccacugcaguccuacggcuuucagcccacaaauggcgugggcuaucagcccuacagagugguggugcugagcuucgaacugcugcaugccccugccacagugugcggcccuaagaaaagcaccaaucucgugaagaacaaaugcgugaacuucaacuucaacggccugaccggcaccggcgugcugacagagagcaacaagaaguuccugccauuccagcaguuuggccgggauaucgccgauaccacagacgccguuagagauccccagacacuggaaauccuggacaucaccccuugcagcuucggcggagugucugugaucaccccuggcaccaacaccagcaaucagguggcagugcuguaccagggcgugaacuguaccgaagugcccguggccauucacgccgaucagcugacaccuacauggcggguguacuccaccggcagcaauguguuucagaccagagccggcugucugaucggagccgagcacgugaacaauagcuacgagugcgacauccccaucggcgcuggaaucugcgccagcuaccagacacagacaaacagcccucggagagccagaagcguggccagccagagcaucauugccuacacaaugucucugggcgccgagaacagcguggccuacuccaacaacucuaucgcuauccccaccaacuucaccaucagcgugaccacagagauccugccuguguccaugaccaagaccagcguggacugcaccauguacaucugcggcgauuccaccgagugcuccaaccugcugcugcaguacggcagcuucugcacccagcugaauagagcccugacagggaucgccguggaacaggacaagaacacccaagagguguucgcccaagugaagcagaucuacaagaccccuccuaucaaggacuucggcggcuucaauuucagccagauucugcccgauccuagcaagcccagcaagcggagcuucaucgaggaccugcuguucaacaaagugacacuggccgacgccggcuucaucaagcaguauggcgauugucugggcgacauugccgccagggaucugauuugcgcccagaaguuuaacggacugacagugcugccuccucugcugaccgaugagaugaucgcccaguacacaucugcccugcuggccggcacaaucacaagcggcuggacauuuggagcaggcgccgcucugcagauccccuuugcuaugcagauggccuaccgguucaacggcaucggagugacccagaaugugcuguacgagaaccagaagcugaucgccaaccaguucaacagcgccaucggcaagauccaggacagccugagcagcacagcaagcgcccugggaaagcugcaggacguggucaaccagaaugcccaggcacugaacacccuggucaagcagcuguccuccaacuucggcgccaucagcucugugcugaacgauauccugagcagacuggacaaggucgaggccgaggugcagaucgacagacugaucacaggcagacugcagagccuccagacauacgugacccagcagcugaucagagccgccgagauuagagccucugccaaucuggccgccaccaagaugucugagugugugcugggccagagcaagagaguggacuuuugcggcaagggcuaccaccugaugagcuucccucagucugccccucacggcgugguguuucugcacgugacauaugugcccgcucaagagaagaauuucaccaccgcuccagccaucugccacgacggcaaagcccacuuuccuagagaaggcguguucguguccaacggcacccauugguucgugacacagcggaacuucuacgagccccagaucaucaccaccgacaacaccuucgugucuggcaacugcgacgucgugaucggcauugugaacaauaccguguacgacccucugcagcccgagcuggacagcuucaaagaggaacuggacaaguacuuuaagaaccacacaagccccgacguggaccugggcgauaucagcggaaucaaugccagcgucgugaacauccagaaagagaucgaccggcugaacgagguggccaagaaucugaacgagagccugaucgaccugcaagaacuggggaaguacgagcaguacaucaaguggcccugguacaucuggcugggcuuuaucgccggacugauugccaucgugauggucacaaucaugcuguguugcaugaccagcugcuguagcugccugaagggcuguuguagcuguggcagcugcugcaaguucgacgaggacgauucugagcccgugcugaagggcgugaaacugcacuacacaugaggacuaguguccaccugucccuccugggcugcuggauugucucguuuuccugccaaauaaacaggaucagcgcuuuacagaucucaaaggcucuuuucagagccaccaaaaaaaaaaaaaaaaaaaaaaaaaaaaaaaaaaaaaaaaaaaaaaaaaaaaaaaaaaaaaaaaaaaaaaaaaaaaaaaaaaaaaaaaaaaaaaaaaaaaa

SEQ ID NO: 23942 - RNA, 4129 nt, Artificial Sequence
  SARS-CoV-2/Wuhan/WIV05/2019__EPI_ISL_402128 spike protein mRNA gc mod (1-1273)(N439K_D614G)
aggagacccgugacccggaaguuguacggcuacgcgacuuucccucccacaaacccucgcgcccuuccuuuccuacuugggcccggcagaaagcuuaccauguucguguuccuggugcugcugccucugguguccagccagugugugaaccugaccaccagaacacagcugccuccagccuacaccaacagcuuuaccagaggcguguacuaccccgacaagguguucagauccagcgugcugcacucuacccaggaccuguuccugccuuucuucagcaacgugaccugguuccacgccauccacguguccggcaccaauggcaccaagagauucgacaaccccgugcugcccuucaacgacgggguguacuuugccagcaccgagaaguccaacaucaucagaggcuggaucuucggcaccacacuggacagcaagacccagagccugcugaucgugaacaacgccaccaacguggucaucaaagugugcgaguuccaguucugcaacgaccccuuccugggcgucuacuaccacaagaacaacaagagcuggauggaaagcgaguuccggguguacagcagcgccaacaacugcaccuucgaguacgugucccagccuuuccugauggaccuggaaggcaagcagggcaacuucaagaaccugcgcgaguucguguuuaagaacaucgacggcuacuucaagaucuacagcaagcacaccccuaucaaccucgugcgggaucugccucagggcuucucugcucuggaaccccugguggaucugcccaucggcaucaacaucacccgguuucagacacugcuggcccugcacagaagcuaccugacaccuggcgauagcagcagcggauggacagcuggugccgccgcuuacuaugugggcuaccugcagccuagaaccuuccugcugaaguacaacgagaacggcaccaucaccgacgccguggauugugcucuggauccucugagcgagacaaagugcacccugaaguccuucaccguggaaaagggcaucuaccagaccagcaacuuccgggugcagcccaccgaauccaucgugcgguuccccaauaucaccaaucugugccccuucggcgagguguucaaugccaccagauucgccucuguguacgccuggaaccggaagcggaucagcaauugcguggccgacuacuccgugcuguacaacuccgccagcuucagcaccuucaagugcuacggcguguccccuaccaagcugaacgaccugugcuucacaaacguguacgccgacagcuucgugauccggggagaugaagugcggcagauugccccuggacagacaggcaagaucgccgacuacaacuacaagcugcccgacgacuucaccggcugugugauugccuggaacagcaagaaccuggacuccaaagucggcggcaacuacaauuaccuguaccggcuguuccggaaguccaaucugaagcccuucgagcgggacaucuccaccgagaucuaucaggccggcagcaccccuuguaacggcguggaaggcuucaacugcuacuucccacugcaguccuacggcuuucagcccacaaauggcgugggcuaucagcccuacagagugguggugcugagcuucgaacugcugcaugccccugccacagugugcggcccuaagaaaagcaccaaucucgugaagaacaaaugcgugaacuucaacuucaacggccugaccggcaccggcgugcugacagagagcaacaagaaguuccugccauuccagcaguuuggccgggauaucgccgauaccacagacgccguuagagauccccagacacuggaaauccuggacaucaccccuugcagcuucggcggagugucugugaucaccccuggcaccaacaccagcaaucagguggcagugcuguaccagggcgugaacuguaccgaagugcccguggccauucacgccgaucagcugacaccuacauggcggguguacuccaccggcagcaauguguuucagaccagagccggcugucugaucggagccgagcacgugaacaauagcuacgagugcgacauccccaucggcgcuggaaucugcgccagcuaccagacacagacaaacagcccucggagagccagaagcguggccagccagagcaucauugccuacacaaugucucugggcgccgagaacagcguggccuacuccaacaacucuaucgcuauccccaccaacuucaccaucagcgugaccacagagauccugccuguguccaugaccaagaccagcguggacugcaccauguacaucugcggcgauuccaccgagugcuccaaccugcugcugcaguacggcagcuucugcacccagcugaauagagcccugacagggaucgccguggaacaggacaagaacacccaagagguguucgcccaagugaagcagaucuacaagaccccuccuaucaaggacuucggcggcuucaauuucagccagauucugcccgauccuagcaagcccagcaagcggagcuucaucgaggaccugcuguucaacaaagugacacuggccgacgccggcuucaucaagcaguauggcgauugucugggcgacauugccgccagggaucugauuugcgcccagaaguuuaacggacugacagugcugccuccucugcugaccgaugagaugaucgcccaguacacaucugcccugcuggccggcacaaucacaagcggcuggacauuuggagcaggcgccgcucugcagauccccuuugcuaugcagauggccuaccgguucaacggcaucggagugacccagaaugugcuguacgagaaccagaagcugaucgccaaccaguucaacagcgccaucggcaagauccaggacagccugagcagcacagcaagcgcccugggaaagcugcaggacguggucaaccagaaugcccaggcacugaacacccuggucaagcagcuguccuccaacuucggcgccaucagcucugugcugaacgauauccugagcagacuggacaaggucgaggccgaggugcagaucgacagacugaucacaggcagacugcagagccuccagacauacgugacccagcagcugaucagagccgccgagauuagagccucugccaaucuggccgccaccaagaugucugagugugugcugggccagagcaagagaguggacuuuugcggcaagggcuaccaccugaugagcuucccucagucugccccucacggcgugguguuucugcacgugacauaugugcccgcucaagagaagaauuucaccaccgcuccagccaucugccacgacggcaaagcccacuuuccuagagaaggcguguucguguccaacggcacccauugguucgugacacagcggaacuucuacgagccccagaucaucaccaccgacaacaccuucgugucuggcaacugcgacgucgugaucggcauugugaacaauaccguguacgacccucugcagcccgagcuggacagcuucaaagaggaacuggacaaguacuuuaagaaccacacaagccccgacguggaccugggcgauaucagcggaaucaaugccagcgucgugaacauccagaaagagaucgaccggcugaacgagguggccaagaaucugaacgagagccugaucgaccugcaagaacuggggaaguacgagcaguacaucaaguggcccugguacaucuggcugggcuuuaucgccggacugauugccaucgugauggucacaaucaugcuguguugcaugaccagcugcuguagcugccugaagggcuguuguagcuguggcagcugcugcaaguucgacgaggacgauucugagcccgugcugaagggcgugaaacugcacuacacaugaggacuaguguccaccugucccuccugggcugcuggauugucucguuuuccugccaaauaaacaggaucagcgcuuuacagaucucaaaggcucuuuucagagccaccaaaaaaaaaaaaaaaaaaaaaaaaaaaaaaaaaaaaaaaaaaaaaaaaaaaaaaaaaaaaaaaaaaaaaaaaaaaaaaaaaaaaaaaaaaaaaaaaaaaaa

SEQ ID NO: 23943 - RNA, 4129 nt, Artificial Sequence
  SARS-CoV-2/Wuhan/WIV05/2019__EPI_ISL_402128 spike protein mRNA gc mod (1-1273)(S477N_D614G)
aggagacccgugacccggaaguuguacggcuacgcgacuuucccucccacaaacccucgcgcccuuccuuuccuacuugggcccggcagaaagcuuaccauguucguguuccuggugcugcugccucugguguccagccagugugugaaccugaccaccagaacacagcugccuccagccuacaccaacagcuuuaccagaggcguguacuaccccgacaagguguucagauccagcgugcugcacucuacccaggaccuguuccugccuuucuucagcaacgugaccugguuccacgccauccacguguccggcaccaauggcaccaagagauucgacaaccccgugcugcccuucaacgacgggguguacuuugccagcaccgagaaguccaacaucaucagaggcuggaucuucggcaccacacuggacagcaagacccagagccugcugaucgugaacaacgccaccaacguggucaucaaagugugcgaguuccaguucugcaacgaccccuuccugggcgucuacuaccacaagaacaacaagagcuggauggaaagcgaguuccggguguacagcagcgccaacaacugcaccuucgaguacgugucccagccuuuccugauggaccuggaaggcaagcagggcaacuucaagaaccugcgcgaguucguguuuaagaacaucgacggcuacuucaagaucuacagcaagcacaccccuaucaaccucgugcgggaucugccucagggcuucucugcucuggaaccccugguggaucugcccaucggcaucaacaucacccgguuucagacacugcuggcccugcacagaagcuaccugacaccuggcgauagcagcagcggauggacagcuggugccgccgcuuacuaugugggcuaccugcagccuagaaccuuccugcugaaguacaacgagaacggcaccaucaccgacgccguggauugugcucuggauccucugagcgagacaaagugcacccugaaguccuucaccguggaaaagggcaucuaccagaccagcaacuuccgggugcagcccaccgaauccaucgugcgguuccccaauaucaccaaucugugccccuucggcgagguguucaaugccaccagauucgccucuguguacgccuggaaccggaagcggaucagcaauugcguggccgacuacuccgugcuguacaacuccgccagcuucagcaccuucaagugcuacggcguguccccuaccaagcugaacgaccugugcuucacaaacguguacgccgacagcuucgugauccggggagaugaagugcggcagauugccccuggacagacaggcaagaucgccgacuacaacuacaagcugcccgacgacuucaccggcugugugauugccuggaacagcaacaaccuggacuccaaagucggcggcaacuacaauuaccuguaccggcuguuccggaaguccaaucugaagcccuucgagcgggacaucuccaccgagaucuaucaggccggcaacaccccuuguaacggcguggaaggcuucaacugcuacuucccacugcaguccuacggcuuucagcccacaaauggcgugggcuaucagcccuacagagugguggugcugagcuucgaacugcugcaugccccugccacagugugcggcccuaagaaaagcaccaaucucgugaagaacaaaugcgugaacuucaacuucaacggccugaccggcaccggcgugcugacagagagcaacaagaaguuccugccauuccagcaguuuggccgggauaucgccgauaccacagacgccguuagagauccccagacacuggaaauccuggacaucaccccuugcagcuucggcggagugucugugaucaccccuggcaccaacaccagcaaucagguggcagugcuguaccagggcgugaacuguaccgaagugcccguggccauucacgccgaucagcugacaccuacauggcggguguacuccaccggcagcaauguguuucagaccagagccggcugucugaucggagccgagcacgugaacaauagcuacgagugcgacauccccaucggcgcuggaaucugcgccagcuaccagacacagacaaacagcccucggagagccagaagcguggccagccagagcaucauugccuacacaaugucucugggcgccgagaacagcguggccuacuccaacaacucuaucgcuauccccaccaacuucaccaucagcgugaccacagagauccugccuguguccaugaccaagaccagcguggacugcaccauguacaucugcggcgauuccaccgagugcuccaaccugcugcugcaguacggcagcuucugcacccagcugaauagagcccugacagggaucgccguggaacaggacaagaacacccaagagguguucgcccaagugaagcagaucuacaagaccccuccuaucaaggacuucggcggcuucaauuucagccagauucugcccgauccuagcaagcccagcaagcggagcuucaucgaggaccugcuguucaacaaagugacacuggccgacgccggcuucaucaagcaguauggcgauugucugggcgacauugccgccagggaucugauuugcgcccagaaguuuaacggacugacagugcugccuccucugcugaccgaugagaugaucgcccaguacacaucugcccugcuggccggcacaaucacaagcggcuggacauuuggagcaggcgccgcucugcagauccccuuugcuaugcagauggccuaccgguucaacggcaucggagugacccagaaugugcuguacgagaaccagaagcugaucgccaaccaguucaacagcgccaucggcaagauccaggacagccugagcagcacagcaagcgcccugggaaagcugcaggacguggucaaccagaaugcccaggcacugaacacccuggucaagcagcuguccuccaacuucggcgccaucagcucugugcugaacgauauccugagcagacuggacaaggucgaggccgaggugcagaucgacagacugaucacaggcagacugcagagccuccagacauacgugacccagcagcugaucagagccgccgagauuagagccucugccaaucuggccgccaccaagaugucugagugugugcugggccagagcaagagaguggacuuuugcggcaagggcuaccaccugaugagcuucccucagucugccccucacggcgugguguuucugcacgugacauaugugcccgcucaagagaagaauuucaccaccgcuccagccaucugccacgacggcaaagcccacuuuccuagagaaggcguguucguguccaacggcacccauugguucgugacacagcggaacuucuacgagccccagaucaucaccaccgacaacaccuucgugucuggcaacugcgacgucgugaucggcauugugaacaauaccguguacgacccucugcagcccgagcuggacagcuucaaagaggaacuggacaaguacuuuaagaaccacacaagccccgacguggaccugggcgauaucagcggaaucaaugccagcgucgugaacauccagaaagagaucgaccggcugaacgagguggccaagaaucugaacgagagccugaucgaccugcaagaacuggggaaguacgagcaguacaucaaguggcccugguacaucuggcugggcuuuaucgccggacugauugccaucgugauggucacaaucaugcuguguugcaugaccagcugcuguagcugccugaagggcuguuguagcuguggcagcugcugcaaguucgacgaggacgauucugagcccgugcugaagggcgugaaacugcacuacacaugaggacuaguguccaccugucccuccugggcugcuggauugucucguuuuccugccaaauaaacaggaucagcgcuuuacagaucucaaaggcucuuuucagagccaccaaaaaaaaaaaaaaaaaaaaaaaaaaaaaaaaaaaaaaaaaaaaaaaaaaaaaaaaaaaaaaaaaaaaaaaaaaaaaaaaaaaaaaaaaaaaaaaaaaaaa

SEQ ID NO: 23944 - RNA, 4129 nt, Artificial Sequence
  SARS-CoV-2/Wuhan/WIV05/2019__EPI_ISL_402128 spike protein mRNA gc mod (1-1273)(N501Y_D614G)
aggagacccgugacccggaaguuguacggcuacgcgacuuucccucccacaaacccucgcgcccuuccuuuccuacuugggcccggcagaaagcuuaccauguucguguuccuggugcugcugccucugguguccagccagugugugaaccugaccaccagaacacagcugccuccagccuacaccaacagcuuuaccagaggcguguacuaccccgacaagguguucagauccagcgugcugcacucuacccaggaccuguuccugccuuucuucagcaacgugaccugguuccacgccauccacguguccggcaccaauggcaccaagagauucgacaaccccgugcugcccuucaacgacgggguguacuuugccagcaccgagaaguccaacaucaucagaggcuggaucuucggcaccacacuggacagcaagacccagagccugcugaucgugaacaacgccaccaacguggucaucaaagugugcgaguuccaguucugcaacgaccccuuccugggcgucuacuaccacaagaacaacaagagcuggauggaaagcgaguuccggguguacagcagcgccaacaacugcaccuucgaguacgugucccagccuuuccugauggaccuggaaggcaagcagggcaacuucaagaaccugcgcgaguucguguuuaagaacaucgacggcuacuucaagaucuacagcaagcacaccccuaucaaccucgugcgggaucugccucagggcuucucugcucuggaaccccugguggaucugcccaucggcaucaacaucacccgguuucagacacugcuggcccugcacagaagcuaccugacaccuggcgauagcagcagcggauggacagcuggugccgccgcuuacuaugugggcuaccugcagccuagaaccuuccugcugaaguacaacgagaacggcaccaucaccgacgccguggauugugcucuggauccucugagcgagacaaagugcacccugaaguccuucaccguggaaaagggcaucuaccagaccagcaacuuccgggugcagcccaccgaauccaucgugcgguuccccaauaucaccaaucugugccccuucggcgagguguucaaugccaccagauucgccucuguguacgccuggaaccggaagcggaucagcaauugcguggccgacuacuccgugcuguacaacuccgccagcuucagcaccuucaagugcuacggcguguccccuaccaagcugaacgaccugugcuucacaaacguguacgccgacagcuucgugauccggggagaugaagugcggcagauugccccuggacagacaggcaagaucgccgacuacaacuacaagcugcccgacgacuucaccggcugugugauugccuggaacagcaacaaccuggacuccaaagucggcggcaacuacaauuaccuguaccggcuguuccggaaguccaaucugaagcccuucgagcgggacaucuccaccgagaucuaucaggccggcagcaccccuuguaacggcguggaaggcuucaacugcuacuucccacugcaguccuacggcuuucagcccacauacggcgugggcuaucagcccuacagagugguggugcugagcuucgaacugcugcaugccccugccacagugugcggcccuaagaaaagcaccaaucucgugaagaacaaaugcgugaacuucaacuucaacggccugaccggcaccggcgugcugacagagagcaacaagaaguuccugccauuccagcaguuuggccgggauaucgccgauaccacagacgccguuagagauccccagacacuggaaauccuggacaucaccccuugcagcuucggcggagugucugugaucaccccuggcaccaacaccagcaaucagguggcagugcuguaccagggcgugaacuguaccgaagugcccguggccauucacgccgaucagcugacaccuacauggcggguguacuccaccggcagcaauguguuucagaccagagccggcugucugaucggagccgagcacgugaacaauagcuacgagugcgacauccccaucggcgcuggaaucugcgccagcuaccagacacagacaaacagcccucggagagccagaagcguggccagccagagcaucauugccuacacaaugucucugggcgccgagaacagcguggccuacuccaacaacucuaucgcuauccccaccaacuucaccaucagcgugaccacagagauccugccuguguccaugaccaagaccagcguggacugcaccauguacaucugcggcgauuccaccgagugcuccaaccugcugcugcaguacggcagcuucugcacccagcugaauagagcccugacagggaucgccguggaacaggacaagaacacccaagagguguucgcccaagugaagcagaucuacaagaccccuccuaucaaggacuucggcggcuucaauuucagccagauucugcccgauccuagcaagcccagcaagcggagcuucaucgaggaccugcuguucaacaaagugacacuggccgacgccggcuucaucaagcaguauggcgauugucugggcgacauugccgccagggaucugauuugcgcccagaaguuuaacggacugacagugcugccuccucugcugaccgaugagaugaucgcccaguacacaucugcccugcuggccggcacaaucacaagcggcuggacauuuggagcaggcgccgcucugcagauccccuuugcuaugcagauggccuaccgguucaacggcaucggagugacccagaaugugcuguacgagaaccagaagcugaucgccaaccaguucaacagcgccaucggcaagauccaggacagccugagcagcacagcaagcgcccugggaaagcugcaggacguggucaaccagaaugcccaggcacugaacacccuggucaagcagcuguccuccaacuucggcgccaucagcucugugcugaacgauauccugagcagacuggacaaggucgaggccgaggugcagaucgacagacugaucacaggcagacugcagagccuccagacauacgugacccagcagcugaucagagccgccgagauuagagccucugccaaucuggccgccaccaagaugucugagugugugcugggccagagcaagagaguggacuuuugcggcaagggcuaccaccugaugagcuucccucagucugccccucacggcgugguguuucugcacgugacauaugugcccgcucaagagaagaauuucaccaccgcuccagccaucugccacgacggcaaagcccacuuuccuagagaaggcguguucguguccaacggcacccauugguucgugacacagcggaacuucuacgagccccagaucaucaccaccgacaacaccuucgugucuggcaacugcgacgucgugaucggcauugugaacaauaccguguacgacccucugcagcccgagcuggacagcuucaaagaggaacuggacaaguacuuuaagaaccacacaagccccgacguggaccugggcgauaucagcggaaucaaugccagcgucgugaacauccagaaagagaucgaccggcugaacgagguggccaagaaucugaacgagagccugaucgaccugcaagaacuggggaaguacgagcaguacaucaaguggcccugguacaucuggcugggcuuuaucgccggacugauugccaucgugauggucacaaucaugcuguguugcaugaccagcugcuguagcugccugaagggcuguuguagcuguggcagcugcugcaaguucgacgaggacgauucugagcccgugcugaagggcgugaaacugcacuacacaugaggacuaguguccaccugucccuccugggcugcuggauugucucguuuuccugccaaauaaacaggaucagcgcuuuacagaucucaaaggcucuuuucagagccaccaaaaaaaaaaaaaaaaaaaaaaaaaaaaaaaaaaaaaaaaaaaaaaaaaaaaaaaaaaaaaaaaaaaaaaaaaaaaaaaaaaaaaaaaaaaaaaaaaaaaa

SEQ ID NO: 23945 - RNA, 4123 nt, Artificial Sequence
  SARS-CoV-2/Wuhan/WIV05/2019__EPI_ISL_402128 spike protein mRNA gc mod (1-1273)(H69del_V70del_D614G)
aggagacccgugacccggaaguuguacggcuacgcgacuuucccucccacaaacccucgcgcccuuccuuuccuacuugggcccggcagaaagcuuaccauguucguguuccuggugcugcugccucugguguccagccagugugugaaccugaccaccagaacacagcugccuccagccuacaccaacagcuuuaccagaggcguguacuaccccgacaagguguucagauccagcgugcugcacucuacccaggaccuguuccugccuuucuucagcaacgugaccugguuccacgccaucuccggcaccaauggcaccaagagauucgacaaccccgugcugcccuucaacgacgggguguacuuugccagcaccgagaaguccaacaucaucagaggcuggaucuucggcaccacacuggacagcaagacccagagccugcugaucgugaacaacgccaccaacguggucaucaaagugugcgaguuccaguucugcaacgaccccuuccugggcgucuacuaccacaagaacaacaagagcuggauggaaagcgaguuccggguguacagcagcgccaacaacugcaccuucgaguacgugucccagccuuuccugauggaccuggaaggcaagcagggcaacuucaagaaccugcgcgaguucguguuuaagaacaucgacggcuacuucaagaucuacagcaagcacaccccuaucaaccucgugcgggaucugccucagggcuucucugcucuggaaccccugguggaucugcccaucggcaucaacaucacccgguuucagacacugcuggcccugcacagaagcuaccugacaccuggcgauagcagcagcggauggacagcuggugccgccgcuuacuaugugggcuaccugcagccuagaaccuuccugcugaaguacaacgagaacggcaccaucaccgacgccguggauugugcucuggauccucugagcgagacaaagugcacccugaaguccuucaccguggaaaagggcaucuaccagaccagcaacuuccgggugcagcccaccgaauccaucgugcgguuccccaauaucaccaaucugugccccuucggcgagguguucaaugccaccagauucgccucuguguacgccuggaaccggaagcggaucagcaauugcguggccgacuacuccgugcuguacaacuccgccagcuucagcaccuucaagugcuacggcguguccccuaccaagcugaacgaccugugcuucacaaacguguacgccgacagcuucgugauccggggagaugaagugcggcagauugccccuggacagacaggcaagaucgccgacuacaacuacaagcugcccgacgacuucaccggcugugugauugccuggaacagcaacaaccuggacuccaaagucggcggcaacuacaauuaccuguaccggcuguuccggaaguccaaucugaagcccuucgagcgggacaucuccaccgagaucuaucaggccggcagcaccccuuguaacggcguggaaggcuucaacugcuacuucccacugcaguccuacggcuuucagcccacaaauggcgugggcuaucagcccuacagagugguggugcugagcuucgaacugcugcaugccccugccacagugugcggcccuaagaaaagcaccaaucucgugaagaacaaaugcgugaacuucaacuucaacggccugaccggcaccggcgugcugacagagagcaacaagaaguuccugccauuccagcaguuuggccgggauaucgccgauaccacagacgccguuagagauccccagacacuggaaauccuggacaucaccccuugcagcuucggcggagugucugugaucaccccuggcaccaacaccagcaaucagguggcagugcuguaccagggcgugaacuguaccgaagugcccguggccauucacgccgaucagcugacaccuacauggcggguguacuccaccggcagcaauguguuucagaccagagccggcugucugaucggagccgagcacgugaacaauagcuacgagugcgacauccccaucggcgcuggaaucugcgccagcuaccagacacagacaaacagcccucggagagccagaagcguggccagccagagcaucauugccuacacaaugucucugggcgccgagaacagcguggccuacuccaacaacucuaucgcuauccccaccaacuucaccaucagcgugaccacagagauccugccuguguccaugaccaagaccagcguggacugcaccauguacaucugcggcgauuccaccgagugcuccaaccugcugcugcaguacggcagcuucugcacccagcugaauagagcccugacagggaucgccguggaacaggacaagaacacccaagagguguucgcccaagugaagcagaucuacaagaccccuccuaucaaggacuucggcggcuucaauuucagccagauucugcccgauccuagcaagcccagcaagcggagcuucaucgaggaccugcuguucaacaaagugacacuggccgacgccggcuucaucaagcaguauggcgauugucugggcgacauugccgccagggaucugauuugcgcccagaaguuuaacggacugacagugcugccuccucugcugaccgaugagaugaucgcccaguacacaucugcccugcuggccggcacaaucacaagcggcuggacauuuggagcaggcgccgcucugcagauccccuuugcuaugcagauggccuaccgguucaacggcaucggagugacccagaaugugcuguacgagaaccagaagcugaucgccaaccaguucaacagcgccaucggcaagauccaggacagccugagcagcacagcaagcgcccugggaaagcugcaggacguggucaaccagaaugcccaggcacugaacacccuggucaagcagcuguccuccaacuucggcgccaucagcucugugcugaacgauauccugagcagacuggacaaggucgaggccgaggugcagaucgacagacugaucacaggcagacugcagagccuccagacauacgugacccagcagcugaucagagccgccgagauuagagccucugccaaucuggccgccaccaagaugucugagugugugcugggccagagcaagagaguggacuuuugcggcaagggcuaccaccugaugagcuucccucagucugccccucacggcgugguguuucugcacgugacauaugugcccgcucaagagaagaauuucaccaccgcuccagccaucugccacgacggcaaagcccacuuuccuagagaaggcguguucguguccaacggcacccauugguucgugacacagcggaacuucuacgagccccagaucaucaccaccgacaacaccuucgugucuggcaacugcgacgucgugaucggcauugugaacaauaccguguacgacccucugcagcccgagcuggacagcuucaaagaggaacuggacaaguacuuuaagaaccacacaagccccgacguggaccugggcgauaucagcggaaucaaugccagcgucgugaacauccagaaagagaucgaccggcugaacgagguggccaagaaucugaacgagagccugaucgaccugcaagaacuggggaaguacgagcaguacaucaaguggcccugguacaucuggcugggcuuuaucgccggacugauugccaucgugauggucacaaucaugcuguguugcaugaccagcugcuguagcugccugaagggcuguuguagcuguggcagcugcugcaaguucgacgaggacgauucugagcccgugcugaagggcgugaaacugcacuacacaugaggacuaguguccaccugucccuccugggcugcuggauugucucguuuuccugccaaauaaacaggaucagcgcuuuacagaucucaaaggcucuuuucagagccaccaaaaaaaaaaaaaaaaaaaaaaaaaaaaaaaaaaaaaaaaaaaaaaaaaaaaaaaaaaaaaaaaaaaaaaaaaaaaaaaaaaaaaaaaaaaaaaaaaaaaa

SEQ ID NO: 23946 - RNA, 4129 nt, Artificial Sequence
  SARS-CoV-2/Wuhan/WIV05/2019__EPI_ISL_402128 spike protein mRNA gc mod (1-1273)(Y453F_D614G)
aggagacccgugacccggaaguuguacggcuacgcgacuuucccucccacaaacccucgcgcccuuccuuuccuacuugggcccggcagaaagcuuaccauguucguguuccuggugcugcugccucugguguccagccagugugugaaccugaccaccagaacacagcugccuccagccuacaccaacagcuuuaccagaggcguguacuaccccgacaagguguucagauccagcgugcugcacucuacccaggaccuguuccugccuuucuucagcaacgugaccugguuccacgccauccacguguccggcaccaauggcaccaagagauucgacaaccccgugcugcccuucaacgacgggguguacuuugccagcaccgagaaguccaacaucaucagaggcuggaucuucggcaccacacuggacagcaagacccagagccugcugaucgugaacaacgccaccaacguggucaucaaagugugcgaguuccaguucugcaacgaccccuuccugggcgucuacuaccacaagaacaacaagagcuggauggaaagcgaguuccggguguacagcagcgccaacaacugcaccuucgaguacgugucccagccuuuccugauggaccuggaaggcaagcagggcaacuucaagaaccugcgcgaguucguguuuaagaacaucgacggcuacuucaagaucuacagcaagcacaccccuaucaaccucgugcgggaucugccucagggcuucucugcucuggaaccccugguggaucugcccaucggcaucaacaucacccgguuucagacacugcuggcccugcacagaagcuaccugacaccuggcgauagcagcagcggauggacagcuggugccgccgcuuacuaugugggcuaccugcagccuagaaccuuccugcugaaguacaacgagaacggcaccaucaccgacgccguggauugugcucuggauccucugagcgagacaaagugcacccugaaguccuucaccguggaaaagggcaucuaccagaccagcaacuuccgggugcagcccaccgaauccaucgugcgguuccccaauaucaccaaucugugccccuucggcgagguguucaaugccaccagauucgccucuguguacgccuggaaccggaagcggaucagcaauugcguggccgacuacuccgugcuguacaacuccgccagcuucagcaccuucaagugcuacggcguguccccuaccaagcugaacgaccugugcuucacaaacguguacgccgacagcuucgugauccggggagaugaagugcggcagauugccccuggacagacaggcaagaucgccgacuacaacuacaagcugcccgacgacuucaccggcugugugauugccuggaacagcaacaaccuggacuccaaagucggcggcaacuacaauuaccuguuccggcuguuccggaaguccaaucugaagcccuucgagcgggacaucuccaccgagaucuaucaggccggcagcaccccuuguaacggcguggaaggcuucaacugcuacuucccacugcaguccuacggcuuucagcccacaaauggcgugggcuaucagcccuacagagugguggugcugagcuucgaacugcugcaugccccugccacagugugcggcccuaagaaaagcaccaaucucgugaagaacaaaugcgugaacuucaacuucaacggccugaccggcaccggcgugcugacagagagcaacaagaaguuccugccauuccagcaguuuggccgggauaucgccgauaccacagacgccguuagagauccccagacacuggaaauccuggacaucaccccuugcagcuucggcggagugucugugaucaccccuggcaccaacaccagcaaucagguggcagugcuguaccagggcgugaacuguaccgaagugcccguggccauucacgccgaucagcugacaccuacauggcggguguacuccaccggcagcaauguguuucagaccagagccggcugucugaucggagccgagcacgugaacaauagcuacgagugcgacauccccaucggcgcuggaaucugcgccagcuaccagacacagacaaacagcccucggagagccagaagcguggccagccagagcaucauugccuacacaaugucucugggcgccgagaacagcguggccuacuccaacaacucuaucgcuauccccaccaacuucaccaucagcgugaccacagagauccugccuguguccaugaccaagaccagcguggacugcaccauguacaucugcggcgauuccaccgagugcuccaaccugcugcugcaguacggcagcuucugcacccagcugaauagagcccugacagggaucgccguggaacaggacaagaacacccaagagguguucgcccaagugaagcagaucuacaagaccccuccuaucaaggacuucggcggcuucaauuucagccagauucugcccgauccuagcaagcccagcaagcggagcuucaucgaggaccugcuguucaacaaagugacacuggccgacgccggcuucaucaagcaguauggcgauugucugggcgacauugccgccagggaucugauuugcgcccagaaguuuaacggacugacagugcugccuccucugcugaccgaugagaugaucgcccaguacacaucugcccugcuggccggcacaaucacaagcggcuggacauuuggagcaggcgccgcucugcagauccccuuugcuaugcagauggccuaccgguucaacggcaucggagugacccagaaugugcuguacgagaaccagaagcugaucgccaaccaguucaacagcgccaucggcaagauccaggacagccugagcagcacagcaagcgcccugggaaagcugcaggacguggucaaccagaaugcccaggcacugaacacccuggucaagcagcuguccuccaacuucggcgccaucagcucugugcugaacgauauccugagcagacuggacaaggucgaggccgaggugcagaucgacagacugaucacaggcagacugcagagccuccagacauacgugacccagcagcugaucagagccgccgagauuagagccucugccaaucuggccgccaccaagaugucugagugugugcugggccagagcaagagaguggacuuuugcggcaagggcuaccaccugaugagcuucccucagucugccccucacggcgugguguuucugcacgugacauaugugcccgcucaagagaagaauuucaccaccgcuccagccaucugccacgacggcaaagcccacuuuccuagagaaggcguguucguguccaacggcacccauugguucgugacacagcggaacuucuacgagccccagaucaucaccaccgacaacaccuucgugucuggcaacugcgacgucgugaucggcauugugaacaauaccguguacgacccucugcagcccgagcuggacagcuucaaagaggaacuggacaaguacuuuaagaaccacacaagccccgacguggaccugggcgauaucagcggaaucaaugccagcgucgugaacauccagaaagagaucgaccggcugaacgagguggccaagaaucugaacgagagccugaucgaccugcaagaacuggggaaguacgagcaguacaucaaguggcccugguacaucuggcugggcuuuaucgccggacugauugccaucgugauggucacaaucaugcuguguugcaugaccagcugcuguagcugccugaagggcuguuguagcuguggcagcugcugcaaguucgacgaggacgauucugagcccgugcugaagggcgugaaacugcacuacacaugaggacuaguguccaccugucccuccugggcugcuggauugucucguuuuccugccaaauaaacaggaucagcgcuuuacagaucucaaaggcucuuuucagagccaccaaaaaaaaaaaaaaaaaaaaaaaaaaaaaaaaaaaaaaaaaaaaaaaaaaaaaaaaaaaaaaaaaaaaaaaaaaaaaaaaaaaaaaaaaaaaaaaaaaaaa

SEQ ID NO: 23947 - RNA, 4129 nt, Artificial Sequence
  SARS-CoV-2/Wuhan/WIV05/2019__EPI_ISL_402128 spike protein mRNA gc mod (1-1273)(D614G_I692V)
aggagacccgugacccggaaguuguacggcuacgcgacuuucccucccacaaacccucgcgcccuuccuuuccuacuugggcccggcagaaagcuuaccauguucguguuccuggugcugcugccucugguguccagccagugugugaaccugaccaccagaacacagcugccuccagccuacaccaacagcuuuaccagaggcguguacuaccccgacaagguguucagauccagcgugcugcacucuacccaggaccuguuccugccuuucuucagcaacgugaccugguuccacgccauccacguguccggcaccaauggcaccaagagauucgacaaccccgugcugcccuucaacgacgggguguacuuugccagcaccgagaaguccaacaucaucagaggcuggaucuucggcaccacacuggacagcaagacccagagccugcugaucgugaacaacgccaccaacguggucaucaaagugugcgaguuccaguucugcaacgaccccuuccugggcgucuacuaccacaagaacaacaagagcuggauggaaagcgaguuccggguguacagcagcgccaacaacugcaccuucgaguacgugucccagccuuuccugauggaccuggaaggcaagcagggcaacuucaagaaccugcgcgaguucguguuuaagaacaucgacggcuacuucaagaucuacagcaagcacaccccuaucaaccucgugcgggaucugccucagggcuucucugcucuggaaccccugguggaucugcccaucggcaucaacaucacccgguuucagacacugcuggcccugcacagaagcuaccugacaccuggcgauagcagcagcggauggacagcuggugccgccgcuuacuaugugggcuaccugcagccuagaaccuuccugcugaaguacaacgagaacggcaccaucaccgacgccguggauugugcucuggauccucugagcgagacaaagugcacccugaaguccuucaccguggaaaagggcaucuaccagaccagcaacuuccgggugcagcccaccgaauccaucgugcgguuccccaauaucaccaaucugugccccuucggcgagguguucaaugccaccagauucgccucuguguacgccuggaaccggaagcggaucagcaauugcguggccgacuacuccgugcuguacaacuccgccagcuucagcaccuucaagugcuacggcguguccccuaccaagcugaacgaccugugcuucacaaacguguacgccgacagcuucgugauccggggagaugaagugcggcagauugccccuggacagacaggcaagaucgccgacuacaacuacaagcugcccgacgacuucaccggcugugugauugccuggaacagcaacaaccuggacuccaaagucggcggcaacuacaauuaccuguaccggcuguuccggaaguccaaucugaagcccuucgagcgggacaucuccaccgagaucuaucaggccggcagcaccccuuguaacggcguggaaggcuucaacugcuacuucccacugcaguccuacggcuuucagcccacaaauggcgugggcuaucagcccuacagagugguggugcugagcuucgaacugcugcaugccccugccacagugugcggcccuaagaaaagcaccaaucucgugaagaacaaaugcgugaacuucaacuucaacggccugaccggcaccggcgugcugacagagagcaacaagaaguuccugccauuccagcaguuuggccgggauaucgccgauaccacagacgccguuagagauccccagacacuggaaauccuggacaucaccccuugcagcuucggcggagugucugugaucaccccuggcaccaacaccagcaaucagguggcagugcuguaccagggcgugaacuguaccgaagugcccguggccauucacgccgaucagcugacaccuacauggcggguguacuccaccggcagcaauguguuucagaccagagccggcugucugaucggagccgagcacgugaacaauagcuacgagugcgacauccccaucggcgcuggaaucugcgccagcuaccagacacagacaaacagcccucggagagccagaagcguggccagccagagcgugauugccuacacaaugucucugggcgccgagaacagcguggccuacuccaacaacucuaucgcuauccccaccaacuucaccaucagcgugaccacagagauccugccuguguccaugaccaagaccagcguggacugcaccauguacaucugcggcgauuccaccgagugcuccaaccugcugcugcaguacggcagcuucugcacccagcugaauagagcccugacagggaucgccguggaacaggacaagaacacccaagagguguucgcccaagugaagcagaucuacaagaccccuccuaucaaggacuucggcggcuucaauuucagccagauucugcccgauccuagcaagcccagcaagcggagcuucaucgaggaccugcuguucaacaaagugacacuggccgacgccggcuucaucaagcaguauggcgauugucugggcgacauugccgccagggaucugauuugcgcccagaaguuuaacggacugacagugcugccuccucugcugaccgaugagaugaucgcccaguacacaucugcccugcuggccggcacaaucacaagcggcuggacauuuggagcaggcgccgcucugcagauccccuuugcuaugcagauggccuaccgguucaacggcaucggagugacccagaaugugcuguacgagaaccagaagcugaucgccaaccaguucaacagcgccaucggcaagauccaggacagccugagcagcacagcaagcgcccugggaaagcugcaggacguggucaaccagaaugcccaggcacugaacacccuggucaagcagcuguccuccaacuucggcgccaucagcucugugcugaacgauauccugagcagacuggacaaggucgaggccgaggugcagaucgacagacugaucacaggcagacugcagagccuccagacauacgugacccagcagcugaucagagccgccgagauuagagccucugccaaucuggccgccaccaagaugucugagugugugcugggccagagcaagagaguggacuuuugcggcaagggcuaccaccugaugagcuucccucagucugccccucacggcgugguguuucugcacgugacauaugugcccgcucaagagaagaauuucaccaccgcuccagccaucugccacgacggcaaagcccacuuuccuagagaaggcguguucguguccaacggcacccauugguucgugacacagcggaacuucuacgagccccagaucaucaccaccgacaacaccuucgugucuggcaacugcgacgucgugaucggcauugugaacaauaccguguacgacccucugcagcccgagcuggacagcuucaaagaggaacuggacaaguacuuuaagaaccacacaagccccgacguggaccugggcgauaucagcggaaucaaugccagcgucgugaacauccagaaagagaucgaccggcugaacgagguggccaagaaucugaacgagagccugaucgaccugcaagaacuggggaaguacgagcaguacaucaaguggcccugguacaucuggcugggcuuuaucgccggacugauugccaucgugauggucacaaucaugcuguguugcaugaccagcugcuguagcugccugaagggcuguuguagcuguggcagcugcugcaaguucgacgaggacgauucugagcccgugcugaagggcgugaaacugcacuacacaugaggacuaguguccaccugucccuccugggcugcuggauugucucguuuuccugccaaauaaacaggaucagcgcuuuacagaucucaaaggcucuuuucagagccaccaaaaaaaaaaaaaaaaaaaaaaaaaaaaaaaaaaaaaaaaaaaaaaaaaaaaaaaaaaaaaaaaaaaaaaaaaaaaaaaaaaaaaaaaaaaaaaaaaaaaa

SEQ ID NO: 23948 - RNA, 4129 nt, Artificial Sequence
  SARS-CoV-2/Wuhan/WIV05/2019__EPI_ISL_402128 spike protein mRNA gc mod (1-1273)(D614G_M1229I)
aggagacccgugacccggaaguuguacggcuacgcgacuuucccucccacaaacccucgcgcccuuccuuuccuacuugggcccggcagaaagcuuaccauguucguguuccuggugcugcugccucugguguccagccagugugugaaccugaccaccagaacacagcugccuccagccuacaccaacagcuuuaccagaggcguguacuaccccgacaagguguucagauccagcgugcugcacucuacccaggaccuguuccugccuuucuucagcaacgugaccugguuccacgccauccacguguccggcaccaauggcaccaagagauucgacaaccccgugcugcccuucaacgacgggguguacuuugccagcaccgagaaguccaacaucaucagaggcuggaucuucggcaccacacuggacagcaagacccagagccugcugaucgugaacaacgccaccaacguggucaucaaagugugcgaguuccaguucugcaacgaccccuuccugggcgucuacuaccacaagaacaacaagagcuggauggaaagcgaguuccggguguacagcagcgccaacaacugcaccuucgaguacgugucccagccuuuccugauggaccuggaaggcaagcagggcaacuucaagaaccugcgcgaguucguguuuaagaacaucgacggcuacuucaagaucuacagcaagcacaccccuaucaaccucgugcgggaucugccucagggcuucucugcucuggaaccccugguggaucugcccaucggcaucaacaucacccgguuucagacacugcuggcccugcacagaagcuaccugacaccuggcgauagcagcagcggauggacagcuggugccgccgcuuacuaugugggcuaccugcagccuagaaccuuccugcugaaguacaacgagaacggcaccaucaccgacgccguggauugugcucuggauccucugagcgagacaaagugcacccugaaguccuucaccguggaaaagggcaucuaccagaccagcaacuuccgggugcagcccaccgaauccaucgugcgguuccccaauaucaccaaucugugccccuucggcgagguguucaaugccaccagauucgccucuguguacgccuggaaccggaagcggaucagcaauugcguggccgacuacuccgugcuguacaacuccgccagcuucagcaccuucaagugcuacggcguguccccuaccaagcugaacgaccugugcuucacaaacguguacgccgacagcuucgugauccggggagaugaagugcggcagauugccccuggacagacaggcaagaucgccgacuacaacuacaagcugcccgacgacuucaccggcugugugauugccuggaacagcaacaaccuggacuccaaagucggcggcaacuacaauuaccuguaccggcuguuccggaaguccaaucugaagcccuucgagcgggacaucuccaccgagaucuaucaggccggcagcaccccuuguaacggcguggaaggcuucaacugcuacuucccacugcaguccuacggcuuucagcccacaaauggcgugggcuaucagcccuacagagugguggugcugagcuucgaacugcugcaugccccugccacagugugcggcccuaagaaaagcaccaaucucgugaagaacaaaugcgugaacuucaacuucaacggccugaccggcaccggcgugcugacagagagcaacaagaaguuccugccauuccagcaguuuggccgggauaucgccgauaccacagacgccguuagagauccccagacacuggaaauccuggacaucaccccuugcagcuucggcggagugucugugaucaccccuggcaccaacaccagcaaucagguggcagugcuguaccagggcgugaacuguaccgaagugcccguggccauucacgccgaucagcugacaccuacauggcggguguacuccaccggcagcaauguguuucagaccagagccggcugucugaucggagccgagcacgugaacaauagcuacgagugcgacauccccaucggcgcuggaaucugcgccagcuaccagacacagacaaacagcccucggagagccagaagcguggccagccagagcaucauugccuacacaaugucucugggcgccgagaacagcguggccuacuccaacaacucuaucgcuauccccaccaacuucaccaucagcgugaccacagagauccugccuguguccaugaccaagaccagcguggacugcaccauguacaucugcggcgauuccaccgagugcuccaaccugcugcugcaguacggcagcuucugcacccagcugaauagagcccugacagggaucgccguggaacaggacaagaacacccaagagguguucgcccaagugaagcagaucuacaagaccccuccuaucaaggacuucggcggcuucaauuucagccagauucugcccgauccuagcaagcccagcaagcggagcuucaucgaggaccugcuguucaacaaagugacacuggccgacgccggcuucaucaagcaguauggcgauugucugggcgacauugccgccagggaucugauuugcgcccagaaguuuaacggacugacagugcugccuccucugcugaccgaugagaugaucgcccaguacacaucugcccugcuggccggcacaaucacaagcggcuggacauuuggagcaggcgccgcucugcagauccccuuugcuaugcagauggccuaccgguucaacggcaucggagugacccagaaugugcuguacgagaaccagaagcugaucgccaaccaguucaacagcgccaucggcaagauccaggacagccugagcagcacagcaagcgcccugggaaagcugcaggacguggucaaccagaaugcccaggcacugaacacccuggucaagcagcuguccuccaacuucggcgccaucagcucugugcugaacgauauccugagcagacuggacaaggucgaggccgaggugcagaucgacagacugaucacaggcagacugcagagccuccagacauacgugacccagcagcugaucagagccgccgagauuagagccucugccaaucuggccgccaccaagaugucugagugugugcugggccagagcaagagaguggacuuuugcggcaagggcuaccaccugaugagcuucccucagucugccccucacggcgugguguuucugcacgugacauaugugcccgcucaagagaagaauuucaccaccgcuccagccaucugccacgacggcaaagcccacuuuccuagagaaggcguguucguguccaacggcacccauugguucgugacacagcggaacuucuacgagccccagaucaucaccaccgacaacaccuucgugucuggcaacugcgacgucgugaucggcauugugaacaauaccguguacgacccucugcagcccgagcuggacagcuucaaagaggaacuggacaaguacuuuaagaaccacacaagccccgacguggaccugggcgauaucagcggaaucaaugccagcgucgugaacauccagaaagagaucgaccggcugaacgagguggccaagaaucugaacgagagccugaucgaccugcaagaacuggggaaguacgagcaguacaucaaguggcccugguacaucuggcugggcuuuaucgccggacugauugccaucgugaucgucacaaucaugcuguguugcaugaccagcugcuguagcugccugaagggcuguuguagcuguggcagcugcugcaaguucgacgaggacgauucugagcccgugcugaagggcgugaaacugcacuacacaugaggacuaguguccaccugucccuccugggcugcuggauugucucguuuuccugccaaauaaacaggaucagcgcuuuacagaucucaaaggcucuuuucagagccaccaaaaaaaaaaaaaaaaaaaaaaaaaaaaaaaaaaaaaaaaaaaaaaaaaaaaaaaaaaaaaaaaaaaaaaaaaaaaaaaaaaaaaaaaaaaaaaaaaaaaa

SEQ ID NO: 23949 - RNA, 4123 nt, Artificial Sequence
  SARS-CoV-2/Wuhan/WIV05/2019__EPI_ISL_402128 spike protein mRNA gc mod (1-1273)(H69del_V70del_A222V_Y453F_S477N_D614G_I692V)
aggagacccgugacccggaaguuguacggcuacgcgacuuucccucccacaaacccucgcgcccuuccuuuccuacuugggcccggcagaaagcuuaccauguucguguuccuggugcugcugccucugguguccagccagugugugaaccugaccaccagaacacagcugccuccagccuacaccaacagcuuuaccagaggcguguacuaccccgacaagguguucagauccagcgugcugcacucuacccaggaccuguuccugccuuucuucagcaacgugaccugguuccacgccaucuccggcaccaauggcaccaagagauucgacaaccccgugcugcccuucaacgacgggguguacuuugccagcaccgagaaguccaacaucaucagaggcuggaucuucggcaccacacuggacagcaagacccagagccugcugaucgugaacaacgccaccaacguggucaucaaagugugcgaguuccaguucugcaacgaccccuuccugggcgucuacuaccacaagaacaacaagagcuggauggaaagcgaguuccggguguacagcagcgccaacaacugcaccuucgaguacgugucccagccuuuccugauggaccuggaaggcaagcagggcaacuucaagaaccugcgcgaguucguguuuaagaacaucgacggcuacuucaagaucuacagcaagcacaccccuaucaaccucgugcgggaucugccucagggcuucucugugcuggaaccccugguggaucugcccaucggcaucaacaucacccgguuucagacacugcuggcccugcacagaagcuaccugacaccuggcgauagcagcagcggauggacagcuggugccgccgcuuacuaugugggcuaccugcagccuagaaccuuccugcugaaguacaacgagaacggcaccaucaccgacgccguggauugugcucuggauccucugagcgagacaaagugcacccugaaguccuucaccguggaaaagggcaucuaccagaccagcaacuuccgggugcagcccaccgaauccaucgugcgguuccccaauaucaccaaucugugccccuucggcgagguguucaaugccaccagauucgccucuguguacgccuggaaccggaagcggaucagcaauugcguggccgacuacuccgugcuguacaacuccgccagcuucagcaccuucaagugcuacggcguguccccuaccaagcugaacgaccugugcuucacaaacguguacgccgacagcuucgugauccggggagaugaagugcggcagauugccccuggacagacaggcaagaucgccgacuacaacuacaagcugcccgacgacuucaccggcugugugauugccuggaacagcaacaaccuggacuccaaagucggcggcaacuacaauuaccuguuccggcuguuccggaaguccaaucugaagcccuucgagcgggacaucuccaccgagaucuaucaggccggcaacaccccuuguaacggcguggaaggcuucaacugcuacuucccacugcaguccuacggcuuucagcccacaaauggcgugggcuaucagcccuacagagugguggugcugagcuucgaacugcugcaugccccugccacagugugcggcccuaagaaaagcaccaaucucgugaagaacaaaugcgugaacuucaacuucaacggccugaccggcaccggcgugcugacagagagcaacaagaaguuccugccauuccagcaguuuggccgggauaucgccgauaccacagacgccguuagagauccccagacacuggaaauccuggacaucaccccuugcagcuucggcggagugucugugaucaccccuggcaccaacaccagcaaucagguggcagugcuguaccagggcgugaacuguaccgaagugcccguggccauucacgccgaucagcugacaccuacauggcggguguacuccaccggcagcaauguguuucagaccagagccggcugucugaucggagccgagcacgugaacaauagcuacgagugcgacauccccaucggcgcuggaaucugcgccagcuaccagacacagacaaacagcccucggagagccagaagcguggccagccagagcgugauugccuacacaaugucucugggcgccgagaacagcguggccuacuccaacaacucuaucgcuauccccaccaacuucaccaucagcgugaccacagagauccugccuguguccaugaccaagaccagcguggacugcaccauguacaucugcggcgauuccaccgagugcuccaaccugcugcugcaguacggcagcuucugcacccagcugaauagagcccugacagggaucgccguggaacaggacaagaacacccaagagguguucgcccaagugaagcagaucuacaagaccccuccuaucaaggacuucggcggcuucaauuucagccagauucugcccgauccuagcaagcccagcaagcggagcuucaucgaggaccugcuguucaacaaagugacacuggccgacgccggcuucaucaagcaguauggcgauugucugggcgacauugccgccagggaucugauuugcgcccagaaguuuaacggacugacagugcugccuccucugcugaccgaugagaugaucgcccaguacacaucugcccugcuggccggcacaaucacaagcggcuggacauuuggagcaggcgccgcucugcagauccccuuugcuaugcagauggccuaccgguucaacggcaucggagugacccagaaugugcuguacgagaaccagaagcugaucgccaaccaguucaacagcgccaucggcaagauccaggacagccugagcagcacagcaagcgcccugggaaagcugcaggacguggucaaccagaaugcccaggcacugaacacccuggucaagcagcuguccuccaacuucggcgccaucagcucugugcugaacgauauccugagcagacuggacaaggucgaggccgaggugcagaucgacagacugaucacaggcagacugcagagccuccagacauacgugacccagcagcugaucagagccgccgagauuagagccucugccaaucuggccgccaccaagaugucugagugugugcugggccagagcaagagaguggacuuuugcggcaagggcuaccaccugaugagcuucccucagucugccccucacggcgugguguuucugcacgugacauaugugcccgcucaagagaagaauuucaccaccgcuccagccaucugccacgacggcaaagcccacuuuccuagagaaggcguguucguguccaacggcacccauugguucgugacacagcggaacuucuacgagccccagaucaucaccaccgacaacaccuucgugucuggcaacugcgacgucgugaucggcauugugaacaauaccguguacgacccucugcagcccgagcuggacagcuucaaagaggaacuggacaaguacuuuaagaaccacacaagccccgacguggaccugggcgauaucagcggaaucaaugccagcgucgugaacauccagaaagagaucgaccggcugaacgagguggccaagaaucugaacgagagccugaucgaccugcaagaacuggggaaguacgagcaguacaucaaguggcccugguacaucuggcugggcuuuaucgccggacugauugccaucgugauggucacaaucaugcuguguugcaugaccagcugcuguagcugccugaagggcuguuguagcuguggcagcugcugcaaguucgacgaggacgauucugagcccgugcugaagggcgugaaacugcacuacacaugaggacuaguguccaccugucccuccugggcugcuggauugucucguuuuccugccaaauaaacaggaucagcgcuuuacagaucucaaaggcucuuuucagagccaccaaaaaaaaaaaaaaaaaaaaaaaaaaaaaaaaaaaaaaaaaaaaaaaaaaaaaaaaaaaaaaaaaaaaaaaaaaaaaaaaaaaaaaaaaaaaaaaaaaaaa

SEQ ID NO: 23950 - RNA, 4123 nt, Artificial Sequence
  SARS-CoV-2/Wuhan/WIV05/2019__EPI_ISL_402128 spike protein mRNA gc mod (1-1273)(H69del_V70del_Y453F_D614G_I692V_M1229I)
aggagacccgugacccggaaguuguacggcuacgcgacuuucccucccacaaacccucgcgcccuuccuuuccuacuugggcccggcagaaagcuuaccauguucguguuccuggugcugcugccucugguguccagccagugugugaaccugaccaccagaacacagcugccuccagccuacaccaacagcuuuaccagaggcguguacuaccccgacaagguguucagauccagcgugcugcacucuacccaggaccuguuccugccuuucuucagcaacgugaccugguuccacgccaucuccggcaccaauggcaccaagagauucgacaaccccgugcugcccuucaacgacgggguguacuuugccagcaccgagaaguccaacaucaucagaggcuggaucuucggcaccacacuggacagcaagacccagagccugcugaucgugaacaacgccaccaacguggucaucaaagugugcgaguuccaguucugcaacgaccccuuccugggcgucuacuaccacaagaacaacaagagcuggauggaaagcgaguuccggguguacagcagcgccaacaacugcaccuucgaguacgugucccagccuuuccugauggaccuggaaggcaagcagggcaacuucaagaaccugcgcgaguucguguuuaagaacaucgacggcuacuucaagaucuacagcaagcacaccccuaucaaccucgugcgggaucugccucagggcuucucugcucuggaaccccugguggaucugcccaucggcaucaacaucacccgguuucagacacugcuggcccugcacagaagcuaccugacaccuggcgauagcagcagcggauggacagcuggugccgccgcuuacuaugugggcuaccugcagccuagaaccuuccugcugaaguacaacgagaacggcaccaucaccgacgccguggauugugcucuggauccucugagcgagacaaagugcacccugaaguccuucaccguggaaaagggcaucuaccagaccagcaacuuccgggugcagcccaccgaauccaucgugcgguuccccaauaucaccaaucugugccccuucggcgagguguucaaugccaccagauucgccucuguguacgccuggaaccggaagcggaucagcaauugcguggccgacuacuccgugcuguacaacuccgccagcuucagcaccuucaagugcuacggcguguccccuaccaagcugaacgaccugugcuucacaaacguguacgccgacagcuucgugauccggggagaugaagugcggcagauugccccuggacagacaggcaagaucgccgacuacaacuacaagcugcccgacgacuucaccggcugugugauugccuggaacagcaacaaccuggacuccaaagucggcggcaacuacaauuaccuguuccggcuguuccggaaguccaaucugaagcccuucgagcgggacaucuccaccgagaucuaucaggccggcagcaccccuuguaacggcguggaaggcuucaacugcuacuucccacugcaguccuacggcuuucagcccacaaauggcgugggcuaucagcccuacagagugguggugcugagcuucgaacugcugcaugccccugccacagugugcggcccuaagaaaagcaccaaucucgugaagaacaaaugcgugaacuucaacuucaacggccugaccggcaccggcgugcugacagagagcaacaagaaguuccugccauuccagcaguuuggccgggauaucgccgauaccacagacgccguuagagauccccagacacuggaaauccuggacaucaccccuugcagcuucggcggagugucugugaucaccccuggcaccaacaccagcaaucagguggcagugcuguaccagggcgugaacuguaccgaagugcccguggccauucacgccgaucagcugacaccuacauggcggguguacuccaccggcagcaauguguuucagaccagagccggcugucugaucggagccgagcacgugaacaauagcuacgagugcgacauccccaucggcgcuggaaucugcgccagcuaccagacacagacaaacagcccucggagagccagaagcguggccagccagagcgugauugccuacacaaugucucugggcgccgagaacagcguggccuacuccaacaacucuaucgcuauccccaccaacuucaccaucagcgugaccacagagauccugccuguguccaugaccaagaccagcguggacugcaccauguacaucugcggcgauuccaccgagugcuccaaccugcugcugcaguacggcagcuucugcacccagcugaauagagcccugacagggaucgccguggaacaggacaagaacacccaagagguguucgcccaagugaagcagaucuacaagaccccuccuaucaaggacuucggcggcuucaauuucagccagauucugcccgauccuagcaagcccagcaagcggagcuucaucgaggaccugcuguucaacaaagugacacuggccgacgccggcuucaucaagcaguauggcgauugucugggcgacauugccgccagggaucugauuugcgcccagaaguuuaacggacugacagugcugccuccucugcugaccgaugagaugaucgcccaguacacaucugcccugcuggccggcacaaucacaagcggcuggacauuuggagcaggcgccgcucugcagauccccuuugcuaugcagauggccuaccgguucaacggcaucggagugacccagaaugugcuguacgagaaccagaagcugaucgccaaccaguucaacagcgccaucggcaagauccaggacagccugagcagcacagcaagcgcccugggaaagcugcaggacguggucaaccagaaugcccaggcacugaacacccuggucaagcagcuguccuccaacuucggcgccaucagcucugugcugaacgauauccugagcagacuggacaaggucgaggccgaggugcagaucgacagacugaucacaggcagacugcagagccuccagacauacgugacccagcagcugaucagagccgccgagauuagagccucugccaaucuggccgccaccaagaugucugagugugugcugggccagagcaagagaguggacuuuugcggcaagggcuaccaccugaugagcuucccucagucugccccucacggcgugguguuucugcacgugacauaugugcccgcucaagagaagaauuucaccaccgcuccagccaucugccacgacggcaaagcccacuuuccuagagaaggcguguucguguccaacggcacccauugguucgugacacagcggaacuucuacgagccccagaucaucaccaccgacaacaccuucgugucuggcaacugcgacgucgugaucggcauugugaacaauaccguguacgacccucugcagcccgagcuggacagcuucaaagaggaacuggacaaguacuuuaagaaccacacaagccccgacguggaccugggcgauaucagcggaaucaaugccagcgucgugaacauccagaaagagaucgaccggcugaacgagguggccaagaaucugaacgagagccugaucgaccugcaagaacuggggaaguacgagcaguacaucaaguggcccugguacaucuggcugggcuuuaucgccggacugauugccaucgugaucgucacaaucaugcuguguugcaugaccagcugcuguagcugccugaagggcuguuguagcuguggcagcugcugcaaguucgacgaggacgauucugagcccgugcugaagggcgugaaacugcacuacacaugaggacuaguguccaccugucccuccugggcugcuggauugucucguuuuccugccaaauaaacaggaucagcgcuuuacagaucucaaaggcucuuuucagagccaccaaaaaaaaaaaaaaaaaaaaaaaaaaaaaaaaaaaaaaaaaaaaaaaaaaaaaaaaaaaaaaaaaaaaaaaaaaaaaaaaaaaaaaaaaaaaaaaaaaaaa

SEQ ID NO: 23951 - RNA, 4120 nt, Artificial Sequence
  SARS-CoV-2/Wuhan/WIV05/2019__EPI_ISL_402128 spike protein mRNA gc mod (1-1273)(H69del_V70del_Y144del_N501Y_A570D_D614G_P681H_T716I_S982 A_D1118H)
aggagacccgugacccggaaguuguacggcuacgcgacuuucccucccacaaacccucgcgcccuuccuuuccuacuugggcccggcagaaagcuuaccauguucguguuccuggugcugcugccucugguguccagccagugugugaaccugaccaccagaacacagcugccuccagccuacaccaacagcuuuaccagaggcguguacuaccccgacaagguguucagauccagcgugcugcacucuacccaggaccuguuccugccuuucuucagcaacgugaccugguuccacgccaucuccggcaccaauggcaccaagagauucgacaaccccgugcugcccuucaacgacgggguguacuuugccagcaccgagaaguccaacaucaucagaggcuggaucuucggcaccacacuggacagcaagacccagagccugcugaucgugaacaacgccaccaacguggucaucaaagugugcgaguuccaguucugcaacgaccccuuccugggcgucuaccacaagaacaacaagagcuggauggaaagcgaguuccggguguacagcagcgccaacaacugcaccuucgaguacgugucccagccuuuccugauggaccuggaaggcaagcagggcaacuucaagaaccugcgcgaguucguguuuaagaacaucgacggcuacuucaagaucuacagcaagcacaccccuaucaaccucgugcgggaucugccucagggcuucucugcucuggaaccccugguggaucugcccaucggcaucaacaucacccgguuucagacacugcuggcccugcacagaagcuaccugacaccuggcgauagcagcagcggauggacagcuggugccgccgcuuacuaugugggcuaccugcagccuagaaccuuccugcugaaguacaacgagaacggcaccaucaccgacgccguggauugugcucuggauccucugagcgagacaaagugcacccugaaguccuucaccguggaaaagggcaucuaccagaccagcaacuuccgggugcagcccaccgaauccaucgugcgguuccccaauaucaccaaucugugccccuucggcgagguguucaaugccaccagauucgccucuguguacgccuggaaccggaagcggaucagcaauugcguggccgacuacuccgugcuguacaacuccgccagcuucagcaccuucaagugcuacggcguguccccuaccaagcugaacgaccugugcuucacaaacguguacgccgacagcuucgugauccggggagaugaagugcggcagauugccccuggacagacaggcaagaucgccgacuacaacuacaagcugcccgacgacuucaccggcugugugauugccuggaacagcaacaaccuggacuccaaagucggcggcaacuacaauuaccuguaccggcuguuccggaaguccaaucugaagcccuucgagcgggacaucuccaccgagaucuaucaggccggcagcaccccuuguaacggcguggaaggcuucaacugcuacuucccacugcaguccuacggcuuucagcccacauacggcgugggcuaucagcccuacagagugguggugcugagcuucgaacugcugcaugccccugccacagugugcggcccuaagaaaagcaccaaucucgugaagaacaaaugcgugaacuucaacuucaacggccugaccggcaccggcgugcugacagagagcaacaagaaguuccugccauuccagcaguuuggccgggauaucgacgauaccacagacgccguuagagauccccagacacuggaaauccuggacaucaccccuugcagcuucggcggagugucugugaucaccccuggcaccaacaccagcaaucagguggcagugcuguaccagggcgugaacuguaccgaagugcccguggccauucacgccgaucagcugacaccuacauggcggguguacuccaccggcagcaauguguuucagaccagagccggcugucugaucggagccgagcacgugaacaauagcuacgagugcgacauccccaucggcgcuggaaucugcgccagcuaccagacacagacaaacagccaccggagagccagaagcguggccagccagagcaucauugccuacacaaugucucugggcgccgagaacagcguggccuacuccaacaacucuaucgcuauccccaucaacuucaccaucagcgugaccacagagauccugccuguguccaugaccaagaccagcguggacugcaccauguacaucugcggcgauuccaccgagugcuccaaccugcugcugcaguacggcagcuucugcacccagcugaauagagcccugacagggaucgccguggaacaggacaagaacacccaagagguguucgcccaagugaagcagaucuacaagaccccuccuaucaaggacuucggcggcuucaauuucagccagauucugcccgauccuagcaagcccagcaagcggagcuucaucgaggaccugcuguucaacaaagugacacuggccgacgccggcuucaucaagcaguauggcgauugucugggcgacauugccgccagggaucugauuugcgcccagaaguuuaacggacugacagugcugccuccucugcugaccgaugagaugaucgcccaguacacaucugcccugcuggccggcacaaucacaagcggcuggacauuuggagcaggcgccgcucugcagauccccuuugcuaugcagauggccuaccgguucaacggcaucggagugacccagaaugugcuguacgagaaccagaagcugaucgccaaccaguucaacagcgccaucggcaagauccaggacagccugagcagcacagcaagcgcccugggaaagcugcaggacguggucaaccagaaugcccaggcacugaacacccuggucaagcagcuguccuccaacuucggcgccaucagcucugugcugaacgauauccuggccagacuggacaaggucgaggccgaggugcagaucgacagacugaucacaggcagacugcagagccuccagacauacgugacccagcagcugaucagagccgccgagauuagagccucugccaaucuggccgccaccaagaugucugagugugugcugggccagagcaagagaguggacuuuugcggcaagggcuaccaccugaugagcuucccucagucugccccucacggcgugguguuucugcacgugacauaugugcccgcucaagagaagaauuucaccaccgcuccagccaucugccacgacggcaaagcccacuuuccuagagaaggcguguucguguccaacggcacccauugguucgugacacagcggaacuucuacgagccccagaucaucaccacccacaacaccuucgugucuggcaacugcgacgucgugaucggcauugugaacaauaccguguacgacccucugcagcccgagcuggacagcuucaaagaggaacuggacaaguacuuuaagaaccacacaagccccgacguggaccugggcgauaucagcggaaucaaugccagcgucgugaacauccagaaagagaucgaccggcugaacgagguggccaagaaucugaacgagagccugaucgaccugcaagaacuggggaaguacgagcaguacaucaaguggcccugguacaucuggcugggcuuuaucgccggacugauugccaucgugauggucacaaucaugcuguguugcaugaccagcugcuguagcugccugaagggcuguuguagcuguggcagcugcugcaaguucgacgaggacgauucugagcccgugcugaagggcgugaaacugcacuacacaugaggacuaguguccaccugucccuccugggcugcuggauugucucguuuuccugccaaauaaacaggaucagcgcuuuacagaucucaaaggcucuuuucagagccaccaaaaaaaaaaaaaaaaaaaaaaaaaaaaaaaaaaaaaaaaaaaaaaaaaaaaaaaaaaaaaaaaaaaaaaaaaaaaaaaaaaaaaaaaaaaaaaaaaaaaa

SEQ ID NO: 23952 - RNA, 4129 nt, Artificial Sequence
  SARS-CoV-2/Wuhan/WIV05/2019__EPI_ISL_402128 spike protein mRNA gc mod (1-1273)(K417N_E484K_N501Y_D614G)
aggagacccgugacccggaaguuguacggcuacgcgacuuucccucccacaaacccucgcgcccuuccuuuccuacuugggcccggcagaaagcuuaccauguucguguuccuggugcugcugccucugguguccagccagugugugaaccugaccaccagaacacagcugccuccagccuacaccaacagcuuuaccagaggcguguacuaccccgacaagguguucagauccagcgugcugcacucuacccaggaccuguuccugccuuucuucagcaacgugaccugguuccacgccauccacguguccggcaccaauggcaccaagagauucgacaaccccgugcugcccuucaacgacgggguguacuuugccagcaccgagaaguccaacaucaucagaggcuggaucuucggcaccacacuggacagcaagacccagagccugcugaucgugaacaacgccaccaacguggucaucaaagugugcgaguuccaguucugcaacgaccccuuccugggcgucuacuaccacaagaacaacaagagcuggauggaaagcgaguuccggguguacagcagcgccaacaacugcaccuucgaguacgugucccagccuuuccugauggaccuggaaggcaagcagggcaacuucaagaaccugcgcgaguucguguuuaagaacaucgacggcuacuucaagaucuacagcaagcacaccccuaucaaccucgugcgggaucugccucagggcuucucugcucuggaaccccugguggaucugcccaucggcaucaacaucacccgguuucagacacugcuggcccugcacagaagcuaccugacaccuggcgauagcagcagcggauggacagcuggugccgccgcuuacuaugugggcuaccugcagccuagaaccuuccugcugaaguacaacgagaacggcaccaucaccgacgccguggauugugcucuggauccucugagcgagacaaagugcacccugaaguccuucaccguggaaaagggcaucuaccagaccagcaacuuccgggugcagcccaccgaauccaucgugcgguuccccaauaucaccaaucugugccccuucggcgagguguucaaugccaccagauucgccucuguguacgccuggaaccggaagcggaucagcaauugcguggccgacuacuccgugcuguacaacuccgccagcuucagcaccuucaagugcuacggcguguccccuaccaagcugaacgaccugugcuucacaaacguguacgccgacagcuucgugauccggggagaugaagugcggcagauugccccuggacagacaggcaacaucgccgacuacaacuacaagcugcccgacgacuucaccggcugugugauugccuggaacagcaacaaccuggacuccaaagucggcggcaacuacaauuaccuguaccggcuguuccggaaguccaaucugaagcccuucgagcgggacaucuccaccgagaucuaucaggccggcagcaccccuuguaacggcgugaagggcuucaacugcuacuucccacugcaguccuacggcuuucagcccacauacggcgugggcuaucagcccuacagagugguggugcugagcuucgaacugcugcaugccccugccacagugugcggcccuaagaaaagcaccaaucucgugaagaacaaaugcgugaacuucaacuucaacggccugaccggcaccggcgugcugacagagagcaacaagaaguuccugccauuccagcaguuuggccgggauaucgccgauaccacagacgccguuagagauccccagacacuggaaauccuggacaucaccccuugcagcuucggcggagugucugugaucaccccuggcaccaacaccagcaaucagguggcagugcuguaccagggcgugaacuguaccgaagugcccguggccauucacgccgaucagcugacaccuacauggcggguguacuccaccggcagcaauguguuucagaccagagccggcugucugaucggagccgagcacgugaacaauagcuacgagugcgacauccccaucggcgcuggaaucugcgccagcuaccagacacagacaaacagcccucggagagccagaagcguggccagccagagcaucauugccuacacaaugucucugggcgccgagaacagcguggccuacuccaacaacucuaucgcuauccccaccaacuucaccaucagcgugaccacagagauccugccuguguccaugaccaagaccagcguggacugcaccauguacaucugcggcgauuccaccgagugcuccaaccugcugcugcaguacggcagcuucugcacccagcugaauagagcccugacagggaucgccguggaacaggacaagaacacccaagagguguucgcccaagugaagcagaucuacaagaccccuccuaucaaggacuucggcggcuucaauuucagccagauucugcccgauccuagcaagcccagcaagcggagcuucaucgaggaccugcuguucaacaaagugacacuggccgacgccggcuucaucaagcaguauggcgauugucugggcgacauugccgccagggaucugauuugcgcccagaaguuuaacggacugacagugcugccuccucugcugaccgaugagaugaucgcccaguacacaucugcccugcuggccggcacaaucacaagcggcuggacauuuggagcaggcgccgcucugcagauccccuuugcuaugcagauggccuaccgguucaacggcaucggagugacccagaaugugcuguacgagaaccagaagcugaucgccaaccaguucaacagcgccaucggcaagauccaggacagccugagcagcacagcaagcgcccugggaaagcugcaggacguggucaaccagaaugcccaggcacugaacacccuggucaagcagcuguccuccaacuucggcgccaucagcucugugcugaacgauauccugagcagacuggacaaggucgaggccgaggugcagaucgacagacugaucacaggcagacugcagagccuccagacauacgugacccagcagcugaucagagccgccgagauuagagccucugccaaucuggccgccaccaagaugucugagugugugcugggccagagcaagagaguggacuuuugcggcaagggcuaccaccugaugagcuucccucagucugccccucacggcgugguguuucugcacgugacauaugugcccgcucaagagaagaauuucaccaccgcuccagccaucugccacgacggcaaagcccacuuuccuagagaaggcguguucguguccaacggcacccauugguucgugacacagcggaacuucuacgagccccagaucaucaccaccgacaacaccuucgugucuggcaacugcgacgucgugaucggcauugugaacaauaccguguacgacccucugcagcccgagcuggacagcuucaaagaggaacuggacaaguacuuuaagaaccacacaagccccgacguggaccugggcgauaucagcggaaucaaugccagcgucgugaacauccagaaagagaucgaccggcugaacgagguggccaagaaucugaacgagagccugaucgaccugcaagaacuggggaaguacgagcaguacaucaaguggcccugguacaucuggcugggcuuuaucgccggacugauugccaucgugauggucacaaucaugcuguguugcaugaccagcugcuguagcugccugaagggcuguuguagcuguggcagcugcugcaaguucgacgaggacgauucugagcccgugcugaagggcgugaaacugcacuacacaugaggacuaguguccaccugucccuccugggcugcuggauugucucguuuuccugccaaauaaacaggaucagcgcuuuacagaucucaaaggcucuuuucagagccaccaaaaaaaaaaaaaaaaaaaaaaaaaaaaaaaaaaaaaaaaaaaaaaaaaaaaaaaaaaaaaaaaaaaaaaaaaaaaaaaaaaaaaaaaaaaaaaaaaaaaa

SEQ ID NO: 23953 - RNA, 4120 nt, Artificial Sequence
  SARS-CoV-2/Wuhan/WIV05/2019__EPI_ISL_402128 spike protein mRNA gc mod (1-1273)(L18F_D80A_D215G_L242del_A243del_L244del_R246I_K417N_E484 K_N501Y_D614G_A701V)
aggagacccgugacccggaaguuguacggcuacgcgacuuucccucccacaaacccucgcgcccuuccuuuccuacuugggcccggcagaaagcuuaccauguucguguuccuggugcugcugccucugguguccagccagugugugaacuucaccaccagaacacagcugccuccagccuacaccaacagcuuuaccagaggcguguacuaccccgacaagguguucagauccagcgugcugcacucuacccaggaccuguuccugccuuucuucagcaacgugaccugguuccacgccauccacguguccggcaccaauggcaccaagagauucgccaaccccgugcugcccuucaacgacgggguguacuuugccagcaccgagaaguccaacaucaucagaggcuggaucuucggcaccacacuggacagcaagacccagagccugcugaucgugaacaacgccaccaacguggucaucaaagugugcgaguuccaguucugcaacgaccccuuccugggcgucuacuaccacaagaacaacaagagcuggauggaaagcgaguuccggguguacagcagcgccaacaacugcaccuucgaguacgugucccagccuuuccugauggaccuggaaggcaagcagggcaacuucaagaaccugcgcgaguucguguuuaagaacaucgacggcuacuucaagaucuacagcaagcacaccccuaucaaccucgugcggggccugccucagggcuucucugcucuggaaccccugguggaucugcccaucggcaucaacaucacccgguuucagacacugcacaucagcuaccugacaccuggcgauagcagcagcggauggacagcuggugccgccgcuuacuaugugggcuaccugcagccuagaaccuuccugcugaaguacaacgagaacggcaccaucaccgacgccguggauugugcucuggauccucugagcgagacaaagugcacccugaaguccuucaccguggaaaagggcaucuaccagaccagcaacuuccgggugcagcccaccgaauccaucgugcgguuccccaauaucaccaaucugugccccuucggcgagguguucaaugccaccagauucgccucuguguacgccuggaaccggaagcggaucagcaauugcguggccgacuacuccgugcuguacaacuccgccagcuucagcaccuucaagugcuacggcguguccccuaccaagcugaacgaccugugcuucacaaacguguacgccgacagcuucgugauccggggagaugaagugcggcagauugccccuggacagacaggcaacaucgccgacuacaacuacaagcugcccgacgacuucaccggcugugugauugccuggaacagcaacaaccuggacuccaaagucggcggcaacuacaauuaccuguaccggcuguuccggaaguccaaucugaagcccuucgagcgggacaucuccaccgagaucuaucaggccggcagcaccccuuguaacggcgugaagggcuucaacugcuacuucccacugcaguccuacggcuuucagcccacauacggcgugggcuaucagcccuacagagugguggugcugagcuucgaacugcugcaugccccugccacagugugcggcccuaagaaaagcaccaaucucgugaagaacaaaugcgugaacuucaacuucaacggccugaccggcaccggcgugcugacagagagcaacaagaaguuccugccauuccagcaguuuggccgggauaucgccgauaccacagacgccguuagagauccccagacacuggaaauccuggacaucaccccuugcagcuucggcggagugucugugaucaccccuggcaccaacaccagcaaucagguggcagugcuguaccagggcgugaacuguaccgaagugcccguggccauucacgccgaucagcugacaccuacauggcggguguacuccaccggcagcaauguguuucagaccagagccggcugucugaucggagccgagcacgugaacaauagcuacgagugcgacauccccaucggcgcuggaaucugcgccagcuaccagacacagacaaacagcccucggagagccagaagcguggccagccagagcaucauugccuacacaaugucucugggcguggagaacagcguggccuacuccaacaacucuaucgcuauccccaccaacuucaccaucagcgugaccacagagauccugccuguguccaugaccaagaccagcguggacugcaccauguacaucugcggcgauuccaccgagugcuccaaccugcugcugcaguacggcagcuucugcacccagcugaauagagcccugacagggaucgccguggaacaggacaagaacacccaagagguguucgcccaagugaagcagaucuacaagaccccuccuaucaaggacuucggcggcuucaauuucagccagauucugcccgauccuagcaagcccagcaagcggagcuucaucgaggaccugcuguucaacaaagugacacuggccgacgccggcuucaucaagcaguauggcgauugucugggcgacauugccgccagggaucugauuugcgcccagaaguuuaacggacugacagugcugccuccucugcugaccgaugagaugaucgcccaguacacaucugcccugcuggccggcacaaucacaagcggcuggacauuuggagcaggcgccgcucugcagauccccuuugcuaugcagauggccuaccgguucaacggcaucggagugacccagaaugugcuguacgagaaccagaagcugaucgccaaccaguucaacagcgccaucggcaagauccaggacagccugagcagcacagcaagcgcccugggaaagcugcaggacguggucaaccagaaugcccaggcacugaacacccuggucaagcagcuguccuccaacuucggcgccaucagcucugugcugaacgauauccugagcagacuggacaaggucgaggccgaggugcagaucgacagacugaucacaggcagacugcagagccuccagacauacgugacccagcagcugaucagagccgccgagauuagagccucugccaaucuggccgccaccaagaugucugagugugugcugggccagagcaagagaguggacuuuugcggcaagggcuaccaccugaugagcuucccucagucugccccucacggcgugguguuucugcacgugacauaugugcccgcucaagagaagaauuucaccaccgcuccagccaucugccacgacggcaaagcccacuuuccuagagaaggcguguucguguccaacggcacccauugguucgugacacagcggaacuucuacgagccccagaucaucaccaccgacaacaccuucgugucuggcaacugcgacgucgugaucggcauugugaacaauaccguguacgacccucugcagcccgagcuggacagcuucaaagaggaacuggacaaguacuuuaagaaccacacaagccccgacguggaccugggcgauaucagcggaaucaaugccagcgucgugaacauccagaaagagaucgaccggcugaacgagguggccaagaaucugaacgagagccugaucgaccugcaagaacuggggaaguacgagcaguacaucaaguggcccugguacaucuggcugggcuuuaucgccggacugauugccaucgugauggucacaaucaugcuguguugcaugaccagcugcuguagcugccugaagggcuguuguagcuguggcagcugcugcaaguucgacgaggacgauucugagcccgugcugaagggcgugaaacugcacuacacaugaggacuaguguccaccugucccuccugggcugcuggauugucucguuuuccugccaaauaaacaggaucagcgcuuuacagaucucaaaggcucuuuucagagccaccaaaaaaaaaaaaaaaaaaaaaaaaaaaaaaaaaaaaaaaaaaaaaaaaaaaaaaaaaaaaaaaaaaaaaaaaaaaaaaaaaaaaaaaaaaaaaaaaaaaaa

SEQ ID NO: 23954 - RNA, 4129 nt, Artificial Sequence
  SARS-CoV-2/Wuhan/WIV05/2019__EPI_ISL_402128 spike protein mRNA gc mod (1-1273)(E484K_D614G)
aggagacccgugacccggaaguuguacggcuacgcgacuuucccucccacaaacccucgcgcccuuccuuuccuacuugggcccggcagaaagcuuaccauguucguguuccuggugcugcugccucugguguccagccagugugugaaccugaccaccagaacacagcugccuccagccuacaccaacagcuuuaccagaggcguguacuaccccgacaagguguucagauccagcgugcugcacucuacccaggaccuguuccugccuuucuucagcaacgugaccugguuccacgccauccacguguccggcaccaauggcaccaagagauucgacaaccccgugcugcccuucaacgacgggguguacuuugccagcaccgagaaguccaacaucaucagaggcuggaucuucggcaccacacuggacagcaagacccagagccugcugaucgugaacaacgccaccaacguggucaucaaagugugcgaguuccaguucugcaacgaccccuuccugggcgucuacuaccacaagaacaacaagagcuggauggaaagcgaguuccggguguacagcagcgccaacaacugcaccuucgaguacgugucccagccuuuccugauggaccuggaaggcaagcagggcaacuucaagaaccugcgcgaguucguguuuaagaacaucgacggcuacuucaagaucuacagcaagcacaccccuaucaaccucgugcgggaucugccucagggcuucucugcucuggaaccccugguggaucugcccaucggcaucaacaucacccgguuucagacacugcuggcccugcacagaagcuaccugacaccuggcgauagcagcagcggauggacagcuggugccgccgcuuacuaugugggcuaccugcagccuagaaccuuccugcugaaguacaacgagaacggcaccaucaccgacgccguggauugugcucuggauccucugagcgagacaaagugcacccugaaguccuucaccguggaaaagggcaucuaccagaccagcaacuuccgggugcagcccaccgaauccaucgugcgguuccccaauaucaccaaucugugccccuucggcgagguguucaaugccaccagauucgccucuguguacgccuggaaccggaagcggaucagcaauugcguggccgacuacuccgugcuguacaacuccgccagcuucagcaccuucaagugcuacggcguguccccuaccaagcugaacgaccugugcuucacaaacguguacgccgacagcuucgugauccggggagaugaagugcggcagauugccccuggacagacaggcaagaucgccgacuacaacuacaagcugcccgacgacuucaccggcugugugauugccuggaacagcaacaaccuggacuccaaagucggcggcaacuacaauuaccuguaccggcuguuccggaaguccaaucugaagcccuucgagcgggacaucuccaccgagaucuaucaggccggcagcaccccuuguaacggcgugaagggcuucaacugcuacuucccacugcaguccuacggcuuucagcccacaaauggcgugggcuaucagcccuacagagugguggugcugagcuucgaacugcugcaugccccugccacagugugcggcccuaagaaaagcaccaaucucgugaagaacaaaugcgugaacuucaacuucaacggccugaccggcaccggcgugcugacagagagcaacaagaaguuccugccauuccagcaguuuggccgggauaucgccgauaccacagacgccguuagagauccccagacacuggaaauccuggacaucaccccuugcagcuucggcggagugucugugaucaccccuggcaccaacaccagcaaucagguggcagugcuguaccagggcgugaacuguaccgaagugcccguggccauucacgccgaucagcugacaccuacauggcggguguacuccaccggcagcaauguguuucagaccagagccggcugucugaucggagccgagcacgugaacaauagcuacgagugcgacauccccaucggcgcuggaaucugcgccagcuaccagacacagacaaacagcccucggagagccagaagcguggccagccagagcaucauugccuacacaaugucucugggcgccgagaacagcguggccuacuccaacaacucuaucgcuauccccaccaacuucaccaucagcgugaccacagagauccugccuguguccaugaccaagaccagcguggacugcaccauguacaucugcggcgauuccaccgagugcuccaaccugcugcugcaguacggcagcuucugcacccagcugaauagagcccugacagggaucgccguggaacaggacaagaacacccaagagguguucgcccaagugaagcagaucuacaagaccccuccuaucaaggacuucggcggcuucaauuucagccagauucugcccgauccuagcaagcccagcaagcggagcuucaucgaggaccugcuguucaacaaagugacacuggccgacgccggcuucaucaagcaguauggcgauugucugggcgacauugccgccagggaucugauuugcgcccagaaguuuaacggacugacagugcugccuccucugcugaccgaugagaugaucgcccaguacacaucugcccugcuggccggcacaaucacaagcggcuggacauuuggagcaggcgccgcucugcagauccccuuugcuaugcagauggccuaccgguucaacggcaucggagugacccagaaugugcuguacgagaaccagaagcugaucgccaaccaguucaacagcgccaucggcaagauccaggacagccugagcagcacagcaagcgcccugggaaagcugcaggacguggucaaccagaaugcccaggcacugaacacccuggucaagcagcuguccuccaacuucggcgccaucagcucugugcugaacgauauccugagcagacuggacaaggucgaggccgaggugcagaucgacagacugaucacaggcagacugcagagccuccagacauacgugacccagcagcugaucagagccgccgagauuagagccucugccaaucuggccgccaccaagaugucugagugugugcugggccagagcaagagaguggacuuuugcggcaagggcuaccaccugaugagcuucccucagucugccccucacggcgugguguuucugcacgugacauaugugcccgcucaagagaagaauuucaccaccgcuccagccaucugccacgacggcaaagcccacuuuccuagagaaggcguguucguguccaacggcacccauugguucgugacacagcggaacuucuacgagccccagaucaucaccaccgacaacaccuucgugucuggcaacugcgacgucgugaucggcauugugaacaauaccguguacgacccucugcagcccgagcuggacagcuucaaagaggaacuggacaaguacuuuaagaaccacacaagccccgacguggaccugggcgauaucagcggaaucaaugccagcgucgugaacauccagaaagagaucgaccggcugaacgagguggccaagaaucugaacgagagccugaucgaccugcaagaacuggggaaguacgagcaguacaucaaguggcccugguacaucuggcugggcuuuaucgccggacugauugccaucgugauggucacaaucaugcuguguugcaugaccagcugcuguagcugccugaagggcuguuguagcuguggcagcugcugcaaguucgacgaggacgauucugagcccgugcugaagggcgugaaacugcacuacacaugaggacuaguguccaccugucccuccugggcugcuggauugucucguuuuccugccaaauaaacaggaucagcgcuuuacagaucucaaaggcucuuuucagagccaccaaaaaaaaaaaaaaaaaaaaaaaaaaaaaaaaaaaaaaaaaaaaaaaaaaaaaaaaaaaaaaaaaaaaaaaaaaaaaaaaaaaaaaaaaaaaaaaaaaaaa

SEQ ID NO: 23955 - RNA, 4129 nt, Artificial Sequence
  SARS-CoV-2/Wuhan/WIV05/2019__EPI_ISL_402128 spike protein mRNA gc mod (1-1273)(L18F_T20N_P26S_D138Y_R190S_K417T_E484K_N501Y_D614G_H655Y _T1027I)
aggagacccgugacccggaaguuguacggcuacgcgacuuucccucccacaaacccucgcgcccuuccuuuccuacuugggcccggcagaaagcuuaccauguucguguuccuggugcugcugccucugguguccagccagugugugaacuucaccaacagaacacagcugccuagcgccuacaccaacagcuuuaccagaggcguguacuaccccgacaagguguucagauccagcgugcugcacucuacccaggaccuguuccugccuuucuucagcaacgugaccugguuccacgccauccacguguccggcaccaauggcaccaagagauucgacaaccccgugcugcccuucaacgacgggguguacuuugccagcaccgagaaguccaacaucaucagaggcuggaucuucggcaccacacuggacagcaagacccagagccugcugaucgugaacaacgccaccaacguggucaucaaagugugcgaguuccaguucugcaacuaccccuuccugggcgucuacuaccacaagaacaacaagagcuggauggaaagcgaguuccggguguacagcagcgccaacaacugcaccuucgaguacgugucccagccuuuccugauggaccuggaaggcaagcagggcaacuucaagaaccugagcgaguucguguuuaagaacaucgacggcuacuucaagaucuacagcaagcacaccccuaucaaccucgugcgggaucugccucagggcuucucugcucuggaaccccugguggaucugcccaucggcaucaacaucacccgguuucagacacugcuggcccugcacagaagcuaccugacaccuggcgauagcagcagcggauggacagcuggugccgccgcuuacuaugugggcuaccugcagccuagaaccuuccugcugaaguacaacgagaacggcaccaucaccgacgccguggauugugcucuggauccucugagcgagacaaagugcacccugaaguccuucaccguggaaaagggcaucuaccagaccagcaacuuccgggugcagcccaccgaauccaucgugcgguuccccaauaucaccaaucugugccccuucggcgagguguucaaugccaccagauucgccucuguguacgccuggaaccggaagcggaucagcaauugcguggccgacuacuccgugcuguacaacuccgccagcuucagcaccuucaagugcuacggcguguccccuaccaagcugaacgaccugugcuucacaaacguguacgccgacagcuucgugauccggggagaugaagugcggcagauugccccuggacagacaggcaccaucgccgacuacaacuacaagcugcccgacgacuucaccggcugugugauugccuggaacagcaacaaccuggacuccaaagucggcggcaacuacaauuaccuguaccggcuguuccggaaguccaaucugaagcccuucgagcgggacaucuccaccgagaucuaucaggccggcagcaccccuuguaacggcgugaagggcuucaacugcuacuucccacugcaguccuacggcuuucagcccacauacggcgugggcuaucagcccuacagagugguggugcugagcuucgaacugcugcaugccccugccacagugugcggcccuaagaaaagcaccaaucucgugaagaacaaaugcgugaacuucaacuucaacggccugaccggcaccggcgugcugacagagagcaacaagaaguuccugccauuccagcaguuuggccgggauaucgccgauaccacagacgccguuagagauccccagacacuggaaauccuggacaucaccccuugcagcuucggcggagugucugugaucaccccuggcaccaacaccagcaaucagguggcagugcuguaccagggcgugaacuguaccgaagugcccguggccauucacgccgaucagcugacaccuacauggcggguguacuccaccggcagcaauguguuucagaccagagccggcugucugaucggagccgaguacgugaacaauagcuacgagugcgacauccccaucggcgcuggaaucugcgccagcuaccagacacagacaaacagcccucggagagccagaagcguggccagccagagcaucauugccuacacaaugucucugggcgccgagaacagcguggccuacuccaacaacucuaucgcuauccccaccaacuucaccaucagcgugaccacagagauccugccuguguccaugaccaagaccagcguggacugcaccauguacaucugcggcgauuccaccgagugcuccaaccugcugcugcaguacggcagcuucugcacccagcugaauagagcccugacagggaucgccguggaacaggacaagaacacccaagagguguucgcccaagugaagcagaucuacaagaccccuccuaucaaggacuucggcggcuucaauuucagccagauucugcccgauccuagcaagcccagcaagcggagcuucaucgaggaccugcuguucaacaaagugacacuggccgacgccggcuucaucaagcaguauggcgauugucugggcgacauugccgccagggaucugauuugcgcccagaaguuuaacggacugacagugcugccuccucugcugaccgaugagaugaucgcccaguacacaucugcccugcuggccggcacaaucacaagcggcuggacauuuggagcaggcgccgcucugcagauccccuuugcuaugcagauggccuaccgguucaacggcaucggagugacccagaaugugcuguacgagaaccagaagcugaucgccaaccaguucaacagcgccaucggcaagauccaggacagccugagcagcacagcaagcgcccugggaaagcugcaggacguggucaaccagaaugcccaggcacugaacacccuggucaagcagcuguccuccaacuucggcgccaucagcucugugcugaacgauauccugagcagacuggacaaggucgaggccgaggugcagaucgacagacugaucacaggcagacugcagagccuccagacauacgugacccagcagcugaucagagccgccgagauuagagccucugccaaucuggccgccaucaagaugucugagugugugcugggccagagcaagagaguggacuuuugcggcaagggcuaccaccugaugagcuucccucagucugccccucacggcgugguguuucugcacgugacauaugugcccgcucaagagaagaauuucaccaccgcuccagccaucugccacgacggcaaagcccacuuuccuagagaaggcguguucguguccaacggcacccauugguucgugacacagcggaacuucuacgagccccagaucaucaccaccgacaacaccuucgugucuggcaacugcgacgucgugaucggcauugugaacaauaccguguacgacccucugcagcccgagcuggacagcuucaaagaggaacuggacaaguacuuuaagaaccacacaagccccgacguggaccugggcgauaucagcggaaucaaugccagcgucgugaacauccagaaagagaucgaccggcugaacgagguggccaagaaucugaacgagagccugaucgaccugcaagaacuggggaaguacgagcaguacaucaaguggcccugguacaucuggcugggcuuuaucgccggacugauugccaucgugauggucacaaucaugcuguguugcaugaccagcugcuguagcugccugaagggcuguuguagcuguggcagcugcugcaaguucgacgaggacgauucugagcccgugcugaagggcgugaaacugcacuacacaugaggacuaguguccaccugucccuccugggcugcuggauugucucguuuuccugccaaauaaacaggaucagcgcuuuacagaucucaaaggcucuuuucagagccaccaaaaaaaaaaaaaaaaaaaaaaaaaaaaaaaaaaaaaaaaaaaaaaaaaaaaaaaaaaaaaaaaaaaaaaaaaaaaaaaaaaaaaaaaaaaaaaaaaaaaa

SEQ ID NO: 23956 - RNA, 4129 nt, Artificial Sequence
  SARS-CoV-2/Wuhan/WIV05/2019__EPI_ISL_402128 spike protein mRNA gc mod (1-1273)(S13I_W152C_L452R_D614G)
aggagacccgugacccggaaguuguacggcuacgcgacuuucccucccacaaacccucgcgcccuuccuuuccuacuugggcccggcagaaagcuuaccauguucguguuccuggugcugcugccucugguguccauccagugugugaaccugaccaccagaacacagcugccuccagccuacaccaacagcuuuaccagaggcguguacuaccccgacaagguguucagauccagcgugcugcacucuacccaggaccuguuccugccuuucuucagcaacgugaccugguuccacgccauccacguguccggcaccaauggcaccaagagauucgacaaccccgugcugcccuucaacgacgggguguacuuugccagcaccgagaaguccaacaucaucagaggcuggaucuucggcaccacacuggacagcaagacccagagccugcugaucgugaacaacgccaccaacguggucaucaaagugugcgaguuccaguucugcaacgaccccuuccugggcgucuacuaccacaagaacaacaagagcugcauggaaagcgaguuccggguguacagcagcgccaacaacugcaccuucgaguacgugucccagccuuuccugauggaccuggaaggcaagcagggcaacuucaagaaccugcgcgaguucguguuuaagaacaucgacggcuacuucaagaucuacagcaagcacaccccuaucaaccucgugcgggaucugccucagggcuucucugcucuggaaccccugguggaucugcccaucggcaucaacaucacccgguuucagacacugcuggcccugcacagaagcuaccugacaccuggcgauagcagcagcggauggacagcuggugccgccgcuuacuaugugggcuaccugcagccuagaaccuuccugcugaaguacaacgagaacggcaccaucaccgacgccguggauugugcucuggauccucugagcgagacaaagugcacccugaaguccuucaccguggaaaagggcaucuaccagaccagcaacuuccgggugcagcccaccgaauccaucgugcgguuccccaauaucaccaaucugugccccuucggcgagguguucaaugccaccagauucgccucuguguacgccuggaaccggaagcggaucagcaauugcguggccgacuacuccgugcuguacaacuccgccagcuucagcaccuucaagugcuacggcguguccccuaccaagcugaacgaccugugcuucacaaacguguacgccgacagcuucgugauccggggagaugaagugcggcagauugccccuggacagacaggcaagaucgccgacuacaacuacaagcugcccgacgacuucaccggcugugugauugccuggaacagcaacaaccuggacuccaaagucggcggcaacuacaauuaccgcuaccggcuguuccggaaguccaaucugaagcccuucgagcgggacaucuccaccgagaucuaucaggccggcagcaccccuuguaacggcguggaaggcuucaacugcuacuucccacugcaguccuacggcuuucagcccacaaauggcgugggcuaucagcccuacagagugguggugcugagcuucgaacugcugcaugccccugccacagugugcggcccuaagaaaagcaccaaucucgugaagaacaaaugcgugaacuucaacuucaacggccugaccggcaccggcgugcugacagagagcaacaagaaguuccugccauuccagcaguuuggccgggauaucgccgauaccacagacgccguuagagauccccagacacuggaaauccuggacaucaccccuugcagcuucggcggagugucugugaucaccccuggcaccaacaccagcaaucagguggcagugcuguaccagggcgugaacuguaccgaagugcccguggccauucacgccgaucagcugacaccuacauggcggguguacuccaccggcagcaauguguuucagaccagagccggcugucugaucggagccgagcacgugaacaauagcuacgagugcgacauccccaucggcgcuggaaucugcgccagcuaccagacacagacaaacagcccucggagagccagaagcguggccagccagagcaucauugccuacacaaugucucugggcgccgagaacagcguggccuacuccaacaacucuaucgcuauccccaccaacuucaccaucagcgugaccacagagauccugccuguguccaugaccaagaccagcguggacugcaccauguacaucugcggcgauuccaccgagugcuccaaccugcugcugcaguacggcagcuucugcacccagcugaauagagcccugacagggaucgccguggaacaggacaagaacacccaagagguguucgcccaagugaagcagaucuacaagaccccuccuaucaaggacuucggcggcuucaauuucagccagauucugcccgauccuagcaagcccagcaagcggagcuucaucgaggaccugcuguucaacaaagugacacuggccgacgccggcuucaucaagcaguauggcgauugucugggcgacauugccgccagggaucugauuugcgcccagaaguuuaacggacugacagugcugccuccucugcugaccgaugagaugaucgcccaguacacaucugcccugcuggccggcacaaucacaagcggcuggacauuuggagcaggcgccgcucugcagauccccuuugcuaugcagauggccuaccgguucaacggcaucggagugacccagaaugugcuguacgagaaccagaagcugaucgccaaccaguucaacagcgccaucggcaagauccaggacagccugagcagcacagcaagcgcccugggaaagcugcaggacguggucaaccagaaugcccaggcacugaacacccuggucaagcagcuguccuccaacuucggcgccaucagcucugugcugaacgauauccugagcagacuggacaaggucgaggccgaggugcagaucgacagacugaucacaggcagacugcagagccuccagacauacgugacccagcagcugaucagagccgccgagauuagagccucugccaaucuggccgccaccaagaugucugagugugugcugggccagagcaagagaguggacuuuugcggcaagggcuaccaccugaugagcuucccucagucugccccucacggcgugguguuucugcacgugacauaugugcccgcucaagagaagaauuucaccaccgcuccagccaucugccacgacggcaaagcccacuuuccuagagaaggcguguucguguccaacggcacccauugguucgugacacagcggaacuucuacgagccccagaucaucaccaccgacaacaccuucgugucuggcaacugcgacgucgugaucggcauugugaacaauaccguguacgacccucugcagcccgagcuggacagcuucaaagaggaacuggacaaguacuuuaagaaccacacaagccccgacguggaccugggcgauaucagcggaaucaaugccagcgucgugaacauccagaaagagaucgaccggcugaacgagguggccaagaaucugaacgagagccugaucgaccugcaagaacuggggaaguacgagcaguacaucaaguggcccugguacaucuggcugggcuuuaucgccggacugauugccaucgugauggucacaaucaugcuguguugcaugaccagcugcuguagcugccugaagggcuguuguagcuguggcagcugcugcaaguucgacgaggacgauucugagcccgugcugaagggcgugaaacugcacuacacaugaggacuaguguccaccugucccuccugggcugcuggauugucucguuuuccugccaaauaaacaggaucagcgcuuuacagaucucaaaggcucuuuucagagccaccaaaaaaaaaaaaaaaaaaaaaaaaaaaaaaaaaaaaaaaaaaaaaaaaaaaaaaaaaaaaaaaaaaaaaaaaaaaaaaaaaaaaaaaaaaaaaaaaaaaaa

SEQ ID NO: 23957 - RNA, 4129 nt, Artificial Sequence
  SARS-CoV-2/Wuhan/WIV05/2019__EPI_ISL_402128 spike protein mRNA gc (1-1273)(K986P_V987P) R10155
aggagacccgugacccggaaguuguacggcuacgcgacuuucccucccacaaacccucgcgcccuuccuuuccuacuugggcccggcagaaagcuuaccauguucguguuccugguccuccugccccuggugagcucccagugcgugaaccucaccacccgcacgcagcugccgcccgccuacaccaacagcuucacccggggcgucuacuaccccgacaagguguuccgcuccagcgugcugcacuccacccaggaccucuuccugcccuucuucagcaacgucacgugguuccacgccauccacguguccgggaccaacggcaccaagcgguucgacaacccggugcugcccuucaacgacggggucuacuucgcgagcaccgagaaguccaacaucauccgcggcuggaucuucgggacgacccucgacagcaagacccagucccugcugaucgugaacaacgccaccaacguggucaucaaggugugcgaguuccaguucugcaacgaccccuuccucggcguguacuaccacaagaacaacaagagcuggauggaguccgaguuccgggucuacagcuccgccaacaacugcacguucgaguacgugagccagcccuuccugauggaccuggagggcaagcaggggaacuucaagaaccuccgcgaguucguguucaagaacaucgacggcuacuucaagaucuacuccaagcacaccccgaucaaccugguccgggaccugccccagggguucagcgcccucgagccccugguggaccugcccaucggcaucaacaucacccgcuuccagacccuccuggcccugcaccgguccuaccucacgccgggggacagcagcuccggcuggaccgcgggcgccgccgccuacuacgugggguaccugcagccccgcaccuuccugcucaaguacaacgagaacggcaccaucacggacgcggucgacugcgcccuggacccccugagcgagaccaagugcacccucaaguccuucaccguggagaaggggaucuaccagacgagcaacuuccgggugcagcccaccgaguccaucguccgcuucccgaacaucaccaaccugugccccuucggcgagguguucaacgccacccgguucgccagcgucuacgccuggaaccgcaagcggaucuccaacugcguggcggacuacagcgugcuguacaacuccgccagcuucuccacguucaagugcuacggcgucagccccaccaagcucaacgaccugugcuucaccaacguguacgccgacuccuucgugauccgcggggacgagguccggcagaucgcccccggccagaccgggaagaucgccgacuacaacuacaagcugccggacgacuucacgggcugcgugaucgcguggaacagcaacaaccucgacuccaaggucgggggcaacuacaacuaccuguaccgccuguuccgcaagagcaaccucaagcccuucgagcgggacaucuccaccgagaucuaccaggccggcagcacccccugcaacgggguggagggcuucaacugcuacuucccccugcaguccuacggguuccagccgaccaacggcgugggguaccagcccuaccggguggucgugcugagcuucgagcuccugcacgcccccgccacggugugcggccccaagaaguccaccaaccuggucaagaacaagugcgugaacuucaacuucaacggccucaccgggaccggcgugcugaccgagagcaacaagaaguuccugccguuccagcaguucgggcgcgacaucgccgacacgaccgacgcgguccgcgacccccagacccuggagauccucgacaucacccccugcagcuucggcgggguguccgugaucacgccgggcaccaacaccagcaaccaggucgccgugcuguaccaggacgugaacugcaccgagguccccguggccauccacgccgaccagcugacgcccaccuggcggguguacuccaccggcagcaacgucuuccagacccgcgccgggugccucaucggcgcggagcacgugaacaacuccuacgagugcgacauccccaucggggccggcaucugcgccagcuaccagacgcagaccaacuccccgcggcgcgcccggagcguggcgucccagagcaucaucgccuacaccaugucccugggcgccgagaacagcgucgccuacuccaacaacagcaucgccauccccaccaacuucacgaucuccgugaccaccgagauccugcccgugagcaugaccaagacgagcgucgacugcaccauguacaucugcggggacuccaccgagugcagcaaccuccugcugcaguacggcuccuucugcacccagcucaaccgcgcgcugacggggaucgccguggagcaggacaagaacacccaggagguguucgcccaggucaagcagaucuacaagacgcccccgaucaaggacuucggcggguucaacuucagccagauccugcccgaccccuccaagcccagcaagcgguccuucaucgaggaccuccuguucaacaaggugacccuggccgacgccggcuucaucaagcaguacggcgacugccucggggacaucgcggcccgcgaccugaucugcgcccagaaguucaacggccugaccgugcucccgccccugcugaccgacgagaugaucgcccaguacaccagcgcccuccuggcggggaccaucacguccggcuggaccuucggggccggcgccgcccugcagauccccuucgcgaugcagauggccuaccgguucaacggcaucggggucacccagaacgugcucuacgagaaccagaagcugaucgccaaccaguucaacagcgccaucggcaagauccaggacucccugagcuccaccgccagcgcgcucgggaagcugcaggacguggucaaccagaacgcccaggcccugaacacgcucgugaagcagcuguccagcaacuucggcgccaucuccagcgugcugaacgacauccucucccgccuggacccgcccgaggccgaggugcagaucgaccggcugaucaccgggcgccuccagagccugcagaccuacgugacccagcagcugauccgggcggccgagauccgcgccagcgccaaccucgccgcgaccaagauguccgagugcguccugggccagagcaagcggguggacuucugcggcaagggguaccaccugauguccuucccccagagcgccccgcacggcguggucuuccuccacgugacguacguccccgcccaggagaagaacuucaccaccgcccccgcgaucugccacgacgggaaggcccacuucccccgcgagggcguguucguguccaacgggacccacugguucgucacgcagcggaacuucuacgagccgcagaucaucaccaccgacaacaccuucgugagcggcaacugcgacguggucaucggcaucgugaacaacacgguguacgacccccugcagcccgagcuggacuccuucaaggaggagcucgacaaguacuucaagaaccacaccagccccgacgucgaccugggggacaucuccggcaucaacgccagcguggugaacauccagaaggagaucgaccgccugaacgaggucgccaagaaccucaacgagucccugaucgaccugcaggagcucgggaaguacgagcaguacaucaaguggccgugguacaucuggcugggcuucaucgccggccugaucgcgaucgugauggugaccaucaugcucugcugcaugaccagcugcugcuccugccugaaggggugcugcagcugcggcuccugcugcaaguucgacgaggacgacagcgagcccguccugaagggggugaagcuccacuacacgugaggacuaguguccaccugucccuccugggcugcuggauugucucguuuuccugccaaauaaacaggaucagcgcuuuacagaucucaaaggcucuuuucagagccaccaaaaaaaaaaaaaaaaaaaaaaaaaaaaaaaaaaaaaaaaaaaaaaaaaaaaaaaaaaaaaaaaaaaaaaaaaaaaaaaaaaaaaaaaaaaaaaaaaaaaa

SEQ ID NO: 23958 - RNA, 4129 nt, Artificial Sequence
  SARS-CoV-2/Wuhan/WIV05/2019__EPI_ISL_402128 spike protein mRNA gc (1-1273)(K986P_V987P_ D614G)
aggagacccgugacccggaaguuguacggcuacgcgacuuucccucccacaaacccucgcgcccuuccuuuccuacuugggcccggcagaaagcuuaccauguucguguuccugguccuccugccccuggugagcucccagugcgugaaccucaccacccgcacgcagcugccgcccgccuacaccaacagcuucacccggggcgucuacuaccccgacaagguguuccgcuccagcgugcugcacuccacccaggaccucuuccugcccuucuucagcaacgucacgugguuccacgccauccacguguccgggaccaacggcaccaagcgguucgacaacccggugcugcccuucaacgacggggucuacuucgcgagcaccgagaaguccaacaucauccgcggcuggaucuucgggacgacccucgacagcaagacccagucccugcugaucgugaacaacgccaccaacguggucaucaaggugugcgaguuccaguucugcaacgaccccuuccucggcguguacuaccacaagaacaacaagagcuggauggaguccgaguuccgggucuacagcuccgccaacaacugcacguucgaguacgugagccagcccuuccugauggaccuggagggcaagcaggggaacuucaagaaccuccgcgaguucguguucaagaacaucgacggcuacuucaagaucuacuccaagcacaccccgaucaaccugguccgggaccugccccagggguucagcgcccucgagccccugguggaccugcccaucggcaucaacaucacccgcuuccagacccuccuggcccugcaccgguccuaccucacgccgggggacagcagcuccggcuggaccgcgggcgccgccgccuacuacgugggguaccugcagccccgcaccuuccugcucaaguacaacgagaacggcaccaucacggacgcggucgacugcgcccuggacccccugagcgagaccaagugcacccucaaguccuucaccguggagaaggggaucuaccagacgagcaacuuccgggugcagcccaccgaguccaucguccgcuucccgaacaucaccaaccugugccccuucggcgagguguucaacgccacccgguucgccagcgucuacgccuggaaccgcaagcggaucuccaacugcguggcggacuacagcgugcuguacaacuccgccagcuucuccacguucaagugcuacggcgucagccccaccaagcucaacgaccugugcuucaccaacguguacgccgacuccuucgugauccgcggggacgagguccggcagaucgcccccggccagaccgggaagaucgccgacuacaacuacaagcugccggacgacuucacgggcugcgugaucgcguggaacagcaacaaccucgacuccaaggucgggggcaacuacaacuaccuguaccgccuguuccgcaagagcaaccucaagcccuucgagcgggacaucuccaccgagaucuaccaggccggcagcacccccugcaacgggguggagggcuucaacugcuacuucccccugcaguccuacggguuccagccgaccaacggcgugggguaccagcccuaccggguggucgugcugagcuucgagcuccugcacgcccccgccacggugugcggccccaagaaguccaccaaccuggucaagaacaagugcgugaacuucaacuucaacggccucaccgggaccggcgugcugaccgagagcaacaagaaguuccugccguuccagcaguucgggcgcgacaucgccgacacgaccgacgcgguccgcgacccccagacccuggagauccucgacaucacccccugcagcuucggcgggguguccgugaucacgccgggcaccaacaccagcaaccaggucgccgugcuguaccagggcgugaacugcaccgagguccccguggccauccacgccgaccagcugacgcccaccuggcggguguacuccaccggcagcaacgucuuccagacccgcgccgggugccucaucggcgcggagcacgugaacaacuccuacgagugcgacauccccaucggggccggcaucugcgccagcuaccagacgcagaccaacuccccgcggcgcgcccggagcguggcgucccagagcaucaucgccuacaccaugucccugggcgccgagaacagcgucgccuacuccaacaacagcaucgccauccccaccaacuucacgaucuccgugaccaccgagauccugcccgugagcaugaccaagacgagcgucgacugcaccauguacaucugcggggacuccaccgagugcagcaaccuccugcugcaguacggcuccuucugcacccagcucaaccgcgcgcugacggggaucgccguggagcaggacaagaacacccaggagguguucgcccaggucaagcagaucuacaagacgcccccgaucaaggacuucggcggguucaacuucagccagauccugcccgaccccuccaagcccagcaagcgguccuucaucgaggaccuccuguucaacaaggugacccuggccgacgccggcuucaucaagcaguacggcgacugccucggggacaucgcggcccgcgaccugaucugcgcccagaaguucaacggccugaccgugcucccgccccugcugaccgacgagaugaucgcccaguacaccagcgcccuccuggcggggaccaucacguccggcuggaccuucggggccggcgccgcccugcagauccccuucgcgaugcagauggccuaccgguucaacggcaucggggucacccagaacgugcucuacgagaaccagaagcugaucgccaaccaguucaacagcgccaucggcaagauccaggacucccugagcuccaccgccagcgcgcucgggaagcugcaggacguggucaaccagaacgcccaggcccugaacacgcucgugaagcagcuguccagcaacuucggcgccaucuccagcgugcugaacgacauccucucccgccuggacccgcccgaggccgaggugcagaucgaccggcugaucaccgggcgccuccagagccugcagaccuacgugacccagcagcugauccgggcggccgagauccgcgccagcgccaaccucgccgcgaccaagauguccgagugcguccugggccagagcaagcggguggacuucugcggcaagggguaccaccugauguccuucccccagagcgccccgcacggcguggucuuccuccacgugacguacguccccgcccaggagaagaacuucaccaccgcccccgcgaucugccacgacgggaaggcccacuucccccgcgagggcguguucguguccaacgggacccacugguucgucacgcagcggaacuucuacgagccgcagaucaucaccaccgacaacaccuucgugagcggcaacugcgacguggucaucggcaucgugaacaacacgguguacgacccccugcagcccgagcuggacuccuucaaggaggagcucgacaaguacuucaagaaccacaccagccccgacgucgaccugggggacaucuccggcaucaacgccagcguggugaacauccagaaggagaucgaccgccugaacgaggucgccaagaaccucaacgagucccugaucgaccugcaggagcucgggaaguacgagcaguacaucaaguggccgugguacaucuggcugggcuucaucgccggccugaucgcgaucgugauggugaccaucaugcucugcugcaugaccagcugcugcuccugccugaaggggugcugcagcugcggcuccugcugcaaguucgacgaggacgacagcgagcccguccugaagggggugaagcuccacuacacgugaggacuaguguccaccugucccuccugggcugcuggauugucucguuuuccugccaaauaaacaggaucagcgcuuuacagaucucaaaggcucuuuucagagccaccaaaaaaaaaaaaaaaaaaaaaaaaaaaaaaaaaaaaaaaaaaaaaaaaaaaaaaaaaaaaaaaaaaaaaaaaaaaaaaaaaaaaaaaaaaaaaaaaaaaaa

SEQ ID NO: 23959 - RNA, 4129 nt, Artificial Sequence
  SARS-CoV-2/Wuhan/WIV05/2019__EPI_ISL_402128 spike protein mRNA gc (1-1273)(K986P_V987P_A222V_D614G)
aggagacccgugacccggaaguuguacggcuacgcgacuuucccucccacaaacccucgcgcccuuccuuuccuacuugggcccggcagaaagcuuaccauguucguguuccugguccuccugccccuggugagcucccagugcgugaaccucaccacccgcacgcagcugccgcccgccuacaccaacagcuucacccggggcgucuacuaccccgacaagguguuccgcuccagcgugcugcacuccacccaggaccucuuccugcccuucuucagcaacgucacgugguuccacgccauccacguguccgggaccaacggcaccaagcgguucgacaacccggugcugcccuucaacgacggggucuacuucgcgagcaccgagaaguccaacaucauccgcggcuggaucuucgggacgacccucgacagcaagacccagucccugcugaucgugaacaacgccaccaacguggucaucaaggugugcgaguuccaguucugcaacgaccccuuccucggcguguacuaccacaagaacaacaagagcuggauggaguccgaguuccgggucuacagcuccgccaacaacugcacguucgaguacgugagccagcccuuccugauggaccuggagggcaagcaggggaacuucaagaaccuccgcgaguucguguucaagaacaucgacggcuacuucaagaucuacuccaagcacaccccgaucaaccugguccgggaccugccccagggguucagcguccucgagccccugguggaccugcccaucggcaucaacaucacccgcuuccagacccuccuggcccugcaccgguccuaccucacgccgggggacagcagcuccggcuggaccgcgggcgccgccgccuacuacgugggguaccugcagccccgcaccuuccugcucaaguacaacgagaacggcaccaucacggacgcggucgacugcgcccuggacccccugagcgagaccaagugcacccucaaguccuucaccguggagaaggggaucuaccagacgagcaacuuccgggugcagcccaccgaguccaucguccgcuucccgaacaucaccaaccugugccccuucggcgagguguucaacgccacccgguucgccagcgucuacgccuggaaccgcaagcggaucuccaacugcguggcggacuacagcgugcuguacaacuccgccagcuucuccacguucaagugcuacggcgucagccccaccaagcucaacgaccugugcuucaccaacguguacgccgacuccuucgugauccgcggggacgagguccggcagaucgcccccggccagaccgggaagaucgccgacuacaacuacaagcugccggacgacuucacgggcugcgugaucgcguggaacagcaacaaccucgacuccaaggucgggggcaacuacaacuaccuguaccgccuguuccgcaagagcaaccucaagcccuucgagcgggacaucuccaccgagaucuaccaggccggcagcacccccugcaacgggguggagggcuucaacugcuacuucccccugcaguccuacggguuccagccgaccaacggcgugggguaccagcccuaccggguggucgugcugagcuucgagcuccugcacgcccccgccacggugugcggccccaagaaguccaccaaccuggucaagaacaagugcgugaacuucaacuucaacggccucaccgggaccggcgugcugaccgagagcaacaagaaguuccugccguuccagcaguucgggcgcgacaucgccgacacgaccgacgcgguccgcgacccccagacccuggagauccucgacaucacccccugcagcuucggcgggguguccgugaucacgccgggcaccaacaccagcaaccaggucgccgugcuguaccagggcgugaacugcaccgagguccccguggccauccacgccgaccagcugacgcccaccuggcggguguacuccaccggcagcaacgucuuccagacccgcgccgggugccucaucggcgcggagcacgugaacaacuccuacgagugcgacauccccaucggggccggcaucugcgccagcuaccagacgcagaccaacuccccgcggcgcgcccggagcguggcgucccagagcaucaucgccuacaccaugucccugggcgccgagaacagcgucgccuacuccaacaacagcaucgccauccccaccaacuucacgaucuccgugaccaccgagauccugcccgugagcaugaccaagacgagcgucgacugcaccauguacaucugcggggacuccaccgagugcagcaaccuccugcugcaguacggcuccuucugcacccagcucaaccgcgcgcugacggggaucgccguggagcaggacaagaacacccaggagguguucgcccaggucaagcagaucuacaagacgcccccgaucaaggacuucggcggguucaacuucagccagauccugcccgaccccuccaagcccagcaagcgguccuucaucgaggaccuccuguucaacaaggugacccuggccgacgccggcuucaucaagcaguacggcgacugccucggggacaucgcggcccgcgaccugaucugcgcccagaaguucaacggccugaccgugcucccgccccugcugaccgacgagaugaucgcccaguacaccagcgcccuccuggcggggaccaucacguccggcuggaccuucggggccggcgccgcccugcagauccccuucgcgaugcagauggccuaccgguucaacggcaucggggucacccagaacgugcucuacgagaaccagaagcugaucgccaaccaguucaacagcgccaucggcaagauccaggacucccugagcuccaccgccagcgcgcucgggaagcugcaggacguggucaaccagaacgcccaggcccugaacacgcucgugaagcagcuguccagcaacuucggcgccaucuccagcgugcugaacgacauccucucccgccuggacccgcccgaggccgaggugcagaucgaccggcugaucaccgggcgccuccagagccugcagaccuacgugacccagcagcugauccgggcggccgagauccgcgccagcgccaaccucgccgcgaccaagauguccgagugcguccugggccagagcaagcggguggacuucugcggcaagggguaccaccugauguccuucccccagagcgccccgcacggcguggucuuccuccacgugacguacguccccgcccaggagaagaacuucaccaccgcccccgcgaucugccacgacgggaaggcccacuucccccgcgagggcguguucguguccaacgggacccacugguucgucacgcagcggaacuucuacgagccgcagaucaucaccaccgacaacaccuucgugagcggcaacugcgacguggucaucggcaucgugaacaacacgguguacgacccccugcagcccgagcuggacuccuucaaggaggagcucgacaaguacuucaagaaccacaccagccccgacgucgaccugggggacaucuccggcaucaacgccagcguggugaacauccagaaggagaucgaccgccugaacgaggucgccaagaaccucaacgagucccugaucgaccugcaggagcucgggaaguacgagcaguacaucaaguggccgugguacaucuggcugggcuucaucgccggccugaucgcgaucgugauggugaccaucaugcucugcugcaugaccagcugcugcuccugccugaaggggugcugcagcugcggcuccugcugcaaguucgacgaggacgacagcgagcccguccugaagggggugaagcuccacuacacgugaggacuaguguccaccugucccuccugggcugcuggauugucucguuuuccugccaaauaaacaggaucagcgcuuuacagaucucaaaggcucuuuucagagccaccaaaaaaaaaaaaaaaaaaaaaaaaaaaaaaaaaaaaaaaaaaaaaaaaaaaaaaaaaaaaaaaaaaaaaaaaaaaaaaaaaaaaaaaaaaaaaaaaaaaaa

SEQ ID NO: 23960 - RNA, 4129 nt, Artificial Sequence
  SARS-CoV-2/Wuhan/WIV05/2019__EPI_ISL_402128 spike protein mRNA gc (1-1273)(K986P_V987P_N439K_D614G)
aggagacccgugacccggaaguuguacggcuacgcgacuuucccucccacaaacccucgcgcccuuccuuuccuacuugggcccggcagaaagcuuaccauguucguguuccugguccuccugccccuggugagcucccagugcgugaaccucaccacccgcacgcagcugccgcccgccuacaccaacagcuucacccggggcgucuacuaccccgacaagguguuccgcuccagcgugcugcacuccacccaggaccucuuccugcccuucuucagcaacgucacgugguuccacgccauccacguguccgggaccaacggcaccaagcgguucgacaacccggugcugcccuucaacgacggggucuacuucgcgagcaccgagaaguccaacaucauccgcggcuggaucuucgggacgacccucgacagcaagacccagucccugcugaucgugaacaacgccaccaacguggucaucaaggugugcgaguuccaguucugcaacgaccccuuccucggcguguacuaccacaagaacaacaagagcuggauggaguccgaguuccgggucuacagcuccgccaacaacugcacguucgaguacgugagccagcccuuccugauggaccuggagggcaagcaggggaacuucaagaaccuccgcgaguucguguucaagaacaucgacggcuacuucaagaucuacuccaagcacaccccgaucaaccugguccgggaccugccccagggguucagcgcccucgagccccugguggaccugcccaucggcaucaacaucacccgcuuccagacccuccuggcccugcaccgguccuaccucacgccgggggacagcagcuccggcuggaccgcgggcgccgccgccuacuacgugggguaccugcagccccgcaccuuccugcucaaguacaacgagaacggcaccaucacggacgcggucgacugcgcccuggacccccugagcgagaccaagugcacccucaaguccuucaccguggagaaggggaucuaccagacgagcaacuuccgggugcagcccaccgaguccaucguccgcuucccgaacaucaccaaccugugccccuucggcgagguguucaacgccacccgguucgccagcgucuacgccuggaaccgcaagcggaucuccaacugcguggcggacuacagcgugcuguacaacuccgccagcuucuccacguucaagugcuacggcgucagccccaccaagcucaacgaccugugcuucaccaacguguacgccgacuccuucgugauccgcggggacgagguccggcagaucgcccccggccagaccgggaagaucgccgacuacaacuacaagcugccggacgacuucacgggcugcgugaucgcguggaacagcaagaaccucgacuccaaggucgggggcaacuacaacuaccuguaccgccuguuccgcaagagcaaccucaagcccuucgagcgggacaucuccaccgagaucuaccaggccggcagcacccccugcaacgggguggagggcuucaacugcuacuucccccugcaguccuacggguuccagccgaccaacggcgugggguaccagcccuaccggguggucgugcugagcuucgagcuccugcacgcccccgccacggugugcggccccaagaaguccaccaaccuggucaagaacaagugcgugaacuucaacuucaacggccucaccgggaccggcgugcugaccgagagcaacaagaaguuccugccguuccagcaguucgggcgcgacaucgccgacacgaccgacgcgguccgcgacccccagacccuggagauccucgacaucacccccugcagcuucggcgggguguccgugaucacgccgggcaccaacaccagcaaccaggucgccgugcuguaccagggcgugaacugcaccgagguccccguggccauccacgccgaccagcugacgcccaccuggcggguguacuccaccggcagcaacgucuuccagacccgcgccgggugccucaucggcgcggagcacgugaacaacuccuacgagugcgacauccccaucggggccggcaucugcgccagcuaccagacgcagaccaacuccccgcggcgcgcccggagcguggcgucccagagcaucaucgccuacaccaugucccugggcgccgagaacagcgucgccuacuccaacaacagcaucgccauccccaccaacuucacgaucuccgugaccaccgagauccugcccgugagcaugaccaagacgagcgucgacugcaccauguacaucugcggggacuccaccgagugcagcaaccuccugcugcaguacggcuccuucugcacccagcucaaccgcgcgcugacggggaucgccguggagcaggacaagaacacccaggagguguucgcccaggucaagcagaucuacaagacgcccccgaucaaggacuucggcggguucaacuucagccagauccugcccgaccccuccaagcccagcaagcgguccuucaucgaggaccuccuguucaacaaggugacccuggccgacgccggcuucaucaagcaguacggcgacugccucggggacaucgcggcccgcgaccugaucugcgcccagaaguucaacggccugaccgugcucccgccccugcugaccgacgagaugaucgcccaguacaccagcgcccuccuggcggggaccaucacguccggcuggaccuucggggccggcgccgcccugcagauccccuucgcgaugcagauggccuaccgguucaacggcaucggggucacccagaacgugcucuacgagaaccagaagcugaucgccaaccaguucaacagcgccaucggcaagauccaggacucccugagcuccaccgccagcgcgcucgggaagcugcaggacguggucaaccagaacgcccaggcccugaacacgcucgugaagcagcuguccagcaacuucggcgccaucuccagcgugcugaacgacauccucucccgccuggacccgcccgaggccgaggugcagaucgaccggcugaucaccgggcgccuccagagccugcagaccuacgugacccagcagcugauccgggcggccgagauccgcgccagcgccaaccucgccgcgaccaagauguccgagugcguccugggccagagcaagcggguggacuucugcggcaagggguaccaccugauguccuucccccagagcgccccgcacggcguggucuuccuccacgugacguacguccccgcccaggagaagaacuucaccaccgcccccgcgaucugccacgacgggaaggcccacuucccccgcgagggcguguucguguccaacgggacccacugguucgucacgcagcggaacuucuacgagccgcagaucaucaccaccgacaacaccuucgugagcggcaacugcgacguggucaucggcaucgugaacaacacgguguacgacccccugcagcccgagcuggacuccuucaaggaggagcucgacaaguacuucaagaaccacaccagccccgacgucgaccugggggacaucuccggcaucaacgccagcguggugaacauccagaaggagaucgaccgccugaacgaggucgccaagaaccucaacgagucccugaucgaccugcaggagcucgggaaguacgagcaguacaucaaguggccgugguacaucuggcugggcuucaucgccggccugaucgcgaucgugauggugaccaucaugcucugcugcaugaccagcugcugcuccugccugaaggggugcugcagcugcggcuccugcugcaaguucgacgaggacgacagcgagcccguccugaagggggugaagcuccacuacacgugaggacuaguguccaccugucccuccugggcugcuggauugucucguuuuccugccaaauaaacaggaucagcgcuuuacagaucucaaaggcucuuuucagagccaccaaaaaaaaaaaaaaaaaaaaaaaaaaaaaaaaaaaaaaaaaaaaaaaaaaaaaaaaaaaaaaaaaaaaaaaaaaaaaaaaaaaaaaaaaaaaaaaaaaaaa

SEQ ID NO: 23961 - RNA, 4129 nt, Artificial Sequence
  SARS-CoV-2/Wuhan/WIV05/2019__EPI_ISL_402128 spike protein mRNA gc (1-1273)(K986P_V987P_S477N_D614G)
aggagacccgugacccggaaguuguacggcuacgcgacuuucccucccacaaacccucgcgcccuuccuuuccuacuugggcccggcagaaagcuuaccauguucguguuccugguccuccugccccuggugagcucccagugcgugaaccucaccacccgcacgcagcugccgcccgccuacaccaacagcuucacccggggcgucuacuaccccgacaagguguuccgcuccagcgugcugcacuccacccaggaccucuuccugcccuucuucagcaacgucacgugguuccacgccauccacguguccgggaccaacggcaccaagcgguucgacaacccggugcugcccuucaacgacggggucuacuucgcgagcaccgagaaguccaacaucauccgcggcuggaucuucgggacgacccucgacagcaagacccagucccugcugaucgugaacaacgccaccaacguggucaucaaggugugcgaguuccaguucugcaacgaccccuuccucggcguguacuaccacaagaacaacaagagcuggauggaguccgaguuccgggucuacagcuccgccaacaacugcacguucgaguacgugagccagcccuuccugauggaccuggagggcaagcaggggaacuucaagaaccuccgcgaguucguguucaagaacaucgacggcuacuucaagaucuacuccaagcacaccccgaucaaccugguccgggaccugccccagggguucagcgcccucgagccccugguggaccugcccaucggcaucaacaucacccgcuuccagacccuccuggcccugcaccgguccuaccucacgccgggggacagcagcuccggcuggaccgcgggcgccgccgccuacuacgugggguaccugcagccccgcaccuuccugcucaaguacaacgagaacggcaccaucacggacgcggucgacugcgcccuggacccccugagcgagaccaagugcacccucaaguccuucaccguggagaaggggaucuaccagacgagcaacuuccgggugcagcccaccgaguccaucguccgcuucccgaacaucaccaaccugugccccuucggcgagguguucaacgccacccgguucgccagcgucuacgccuggaaccgcaagcggaucuccaacugcguggcggacuacagcgugcuguacaacuccgccagcuucuccacguucaagugcuacggcgucagccccaccaagcucaacgaccugugcuucaccaacguguacgccgacuccuucgugauccgcggggacgagguccggcagaucgcccccggccagaccgggaagaucgccgacuacaacuacaagcugccggacgacuucacgggcugcgugaucgcguggaacagcaacaaccucgacuccaaggucgggggcaacuacaacuaccuguaccgccuguuccgcaagagcaaccucaagcccuucgagcgggacaucuccaccgagaucuaccaggccggcaacacccccugcaacgggguggagggcuucaacugcuacuucccccugcaguccuacggguuccagccgaccaacggcgugggguaccagcccuaccggguggucgugcugagcuucgagcuccugcacgcccccgccacggugugcggccccaagaaguccaccaaccuggucaagaacaagugcgugaacuucaacuucaacggccucaccgggaccggcgugcugaccgagagcaacaagaaguuccugccguuccagcaguucgggcgcgacaucgccgacacgaccgacgcgguccgcgacccccagacccuggagauccucgacaucacccccugcagcuucggcgggguguccgugaucacgccgggcaccaacaccagcaaccaggucgccgugcuguaccagggcgugaacugcaccgagguccccguggccauccacgccgaccagcugacgcccaccuggcggguguacuccaccggcagcaacgucuuccagacccgcgccgggugccucaucggcgcggagcacgugaacaacuccuacgagugcgacauccccaucggggccggcaucugcgccagcuaccagacgcagaccaacuccccgcggcgcgcccggagcguggcgucccagagcaucaucgccuacaccaugucccugggcgccgagaacagcgucgccuacuccaacaacagcaucgccauccccaccaacuucacgaucuccgugaccaccgagauccugcccgugagcaugaccaagacgagcgucgacugcaccauguacaucugcggggacuccaccgagugcagcaaccuccugcugcaguacggcuccuucugcacccagcucaaccgcgcgcugacggggaucgccguggagcaggacaagaacacccaggagguguucgcccaggucaagcagaucuacaagacgcccccgaucaaggacuucggcggguucaacuucagccagauccugcccgaccccuccaagcccagcaagcgguccuucaucgaggaccuccuguucaacaaggugacccuggccgacgccggcuucaucaagcaguacggcgacugccucggggacaucgcggcccgcgaccugaucugcgcccagaaguucaacggccugaccgugcucccgccccugcugaccgacgagaugaucgcccaguacaccagcgcccuccuggcggggaccaucacguccggcuggaccuucggggccggcgccgcccugcagauccccuucgcgaugcagauggccuaccgguucaacggcaucggggucacccagaacgugcucuacgagaaccagaagcugaucgccaaccaguucaacagcgccaucggcaagauccaggacucccugagcuccaccgccagcgcgcucgggaagcugcaggacguggucaaccagaacgcccaggcccugaacacgcucgugaagcagcuguccagcaacuucggcgccaucuccagcgugcugaacgacauccucucccgccuggacccgcccgaggccgaggugcagaucgaccggcugaucaccgggcgccuccagagccugcagaccuacgugacccagcagcugauccgggcggccgagauccgcgccagcgccaaccucgccgcgaccaagauguccgagugcguccugggccagagcaagcggguggacuucugcggcaagggguaccaccugauguccuucccccagagcgccccgcacggcguggucuuccuccacgugacguacguccccgcccaggagaagaacuucaccaccgcccccgcgaucugccacgacgggaaggcccacuucccccgcgagggcguguucguguccaacgggacccacugguucgucacgcagcggaacuucuacgagccgcagaucaucaccaccgacaacaccuucgugagcggcaacugcgacguggucaucggcaucgugaacaacacgguguacgacccccugcagcccgagcuggacuccuucaaggaggagcucgacaaguacuucaagaaccacaccagccccgacgucgaccugggggacaucuccggcaucaacgccagcguggugaacauccagaaggagaucgaccgccugaacgaggucgccaagaaccucaacgagucccugaucgaccugcaggagcucgggaaguacgagcaguacaucaaguggccgugguacaucuggcugggcuucaucgccggccugaucgcgaucgugauggugaccaucaugcucugcugcaugaccagcugcugcuccugccugaaggggugcugcagcugcggcuccugcugcaaguucgacgaggacgacagcgagcccguccugaagggggugaagcuccacuacacgugaggacuaguguccaccugucccuccugggcugcuggauugucucguuuuccugccaaauaaacaggaucagcgcuuuacagaucucaaaggcucuuuucagagccaccaaaaaaaaaaaaaaaaaaaaaaaaaaaaaaaaaaaaaaaaaaaaaaaaaaaaaaaaaaaaaaaaaaaaaaaaaaaaaaaaaaaaaaaaaaaaaaaaaaaaa

SEQ ID NO: 23962 - RNA, 4129 nt, Artificial Sequence
  SARS-CoV-2/Wuhan/WIV05/2019__EPI_ISL_402128 spike protein mRNA gc (1-1273)(K986P_V987P_N501Y_D614G)
aggagacccgugacccggaaguuguacggcuacgcgacuuucccucccacaaacccucgcgcccuuccuuuccuacuugggcccggcagaaagcuuaccauguucguguuccugguccuccugccccuggugagcucccagugcgugaaccucaccacccgcacgcagcugccgcccgccuacaccaacagcuucacccggggcgucuacuaccccgacaagguguuccgcuccagcgugcugcacuccacccaggaccucuuccugcccuucuucagcaacgucacgugguuccacgccauccacguguccgggaccaacggcaccaagcgguucgacaacccggugcugcccuucaacgacggggucuacuucgcgagcaccgagaaguccaacaucauccgcggcuggaucuucgggacgacccucgacagcaagacccagucccugcugaucgugaacaacgccaccaacguggucaucaaggugugcgaguuccaguucugcaacgaccccuuccucggcguguacuaccacaagaacaacaagagcuggauggaguccgaguuccgggucuacagcuccgccaacaacugcacguucgaguacgugagccagcccuuccugauggaccuggagggcaagcaggggaacuucaagaaccuccgcgaguucguguucaagaacaucgacggcuacuucaagaucuacuccaagcacaccccgaucaaccugguccgggaccugccccagggguucagcgcccucgagccccugguggaccugcccaucggcaucaacaucacccgcuuccagacccuccuggcccugcaccgguccuaccucacgccgggggacagcagcuccggcuggaccgcgggcgccgccgccuacuacgugggguaccugcagccccgcaccuuccugcucaaguacaacgagaacggcaccaucacggacgcggucgacugcgcccuggacccccugagcgagaccaagugcacccucaaguccuucaccguggagaaggggaucuaccagacgagcaacuuccgggugcagcccaccgaguccaucguccgcuucccgaacaucaccaaccugugccccuucggcgagguguucaacgccacccgguucgccagcgucuacgccuggaaccgcaagcggaucuccaacugcguggcggacuacagcgugcuguacaacuccgccagcuucuccacguucaagugcuacggcgucagccccaccaagcucaacgaccugugcuucaccaacguguacgccgacuccuucgugauccgcggggacgagguccggcagaucgcccccggccagaccgggaagaucgccgacuacaacuacaagcugccggacgacuucacgggcugcgugaucgcguggaacagcaacaaccucgacuccaaggucgggggcaacuacaacuaccuguaccgccuguuccgcaagagcaaccucaagcccuucgagcgggacaucuccaccgagaucuaccaggccggcagcacccccugcaacgggguggagggcuucaacugcuacuucccccugcaguccuacggguuccagccgaccuacggcgugggguaccagcccuaccggguggucgugcugagcuucgagcuccugcacgcccccgccacggugugcggccccaagaaguccaccaaccuggucaagaacaagugcgugaacuucaacuucaacggccucaccgggaccggcgugcugaccgagagcaacaagaaguuccugccguuccagcaguucgggcgcgacaucgccgacacgaccgacgcgguccgcgacccccagacccuggagauccucgacaucacccccugcagcuucggcgggguguccgugaucacgccgggcaccaacaccagcaaccaggucgccgugcuguaccagggcgugaacugcaccgagguccccguggccauccacgccgaccagcugacgcccaccuggcggguguacuccaccggcagcaacgucuuccagacccgcgccgggugccucaucggcgcggagcacgugaacaacuccuacgagugcgacauccccaucggggccggcaucugcgccagcuaccagacgcagaccaacuccccgcggcgcgcccggagcguggcgucccagagcaucaucgccuacaccaugucccugggcgccgagaacagcgucgccuacuccaacaacagcaucgccauccccaccaacuucacgaucuccgugaccaccgagauccugcccgugagcaugaccaagacgagcgucgacugcaccauguacaucugcggggacuccaccgagugcagcaaccuccugcugcaguacggcuccuucugcacccagcucaaccgcgcgcugacggggaucgccguggagcaggacaagaacacccaggagguguucgcccaggucaagcagaucuacaagacgcccccgaucaaggacuucggcggguucaacuucagccagauccugcccgaccccuccaagcccagcaagcgguccuucaucgaggaccuccuguucaacaaggugacccuggccgacgccggcuucaucaagcaguacggcgacugccucggggacaucgcggcccgcgaccugaucugcgcccagaaguucaacggccugaccgugcucccgccccugcugaccgacgagaugaucgcccaguacaccagcgcccuccuggcggggaccaucacguccggcuggaccuucggggccggcgccgcccugcagauccccuucgcgaugcagauggccuaccgguucaacggcaucggggucacccagaacgugcucuacgagaaccagaagcugaucgccaaccaguucaacagcgccaucggcaagauccaggacucccugagcuccaccgccagcgcgcucgggaagcugcaggacguggucaaccagaacgcccaggcccugaacacgcucgugaagcagcuguccagcaacuucggcgccaucuccagcgugcugaacgacauccucucccgccuggacccgcccgaggccgaggugcagaucgaccggcugaucaccgggcgccuccagagccugcagaccuacgugacccagcagcugauccgggcggccgagauccgcgccagcgccaaccucgccgcgaccaagauguccgagugcguccugggccagagcaagcggguggacuucugcggcaagggguaccaccugauguccuucccccagagcgccccgcacggcguggucuuccuccacgugacguacguccccgcccaggagaagaacuucaccaccgcccccgcgaucugccacgacgggaaggcccacuucccccgcgagggcguguucguguccaacgggacccacugguucgucacgcagcggaacuucuacgagccgcagaucaucaccaccgacaacaccuucgugagcggcaacugcgacguggucaucggcaucgugaacaacacgguguacgacccccugcagcccgagcuggacuccuucaaggaggagcucgacaaguacuucaagaaccacaccagccccgacgucgaccugggggacaucuccggcaucaacgccagcguggugaacauccagaaggagaucgaccgccugaacgaggucgccaagaaccucaacgagucccugaucgaccugcaggagcucgggaaguacgagcaguacaucaaguggccgugguacaucuggcugggcuucaucgccggccugaucgcgaucgugauggugaccaucaugcucugcugcaugaccagcugcugcuccugccugaaggggugcugcagcugcggcuccugcugcaaguucgacgaggacgacagcgagcccguccugaagggggugaagcuccacuacacgugaggacuaguguccaccugucccuccugggcugcuggauugucucguuuuccugccaaauaaacaggaucagcgcuuuacagaucucaaaggcucuuuucagagccaccaaaaaaaaaaaaaaaaaaaaaaaaaaaaaaaaaaaaaaaaaaaaaaaaaaaaaaaaaaaaaaaaaaaaaaaaaaaaaaaaaaaaaaaaaaaaaaaaaaaaa

SEQ ID NO: 23963 - RNA, 4123 nt, Artificial Sequence
  SARS-CoV-2/Wuhan/WIV05/2019__EPI_ISL_402128 spike protein mRNA gc (1-1273)(K986P_V987P_H69del_V70del_D614G)
aggagacccgugacccggaaguuguacggcuacgcgacuuucccucccacaaacccucgcgcccuuccuuuccuacuugggcccggcagaaagcuuaccauguucguguuccugguccuccugccccuggugagcucccagugcgugaaccucaccacccgcacgcagcugccgcccgccuacaccaacagcuucacccggggcgucuacuaccccgacaagguguuccgcuccagcgugcugcacuccacccaggaccucuuccugcccuucuucagcaacgucacgugguuccacgccaucuccgggaccaacggcaccaagcgguucgacaacccggugcugcccuucaacgacggggucuacuucgcgagcaccgagaaguccaacaucauccgcggcuggaucuucgggacgacccucgacagcaagacccagucccugcugaucgugaacaacgccaccaacguggucaucaaggugugcgaguuccaguucugcaacgaccccuuccucggcguguacuaccacaagaacaacaagagcuggauggaguccgaguuccgggucuacagcuccgccaacaacugcacguucgaguacgugagccagcccuuccugauggaccuggagggcaagcaggggaacuucaagaaccuccgcgaguucguguucaagaacaucgacggcuacuucaagaucuacuccaagcacaccccgaucaaccugguccgggaccugccccagggguucagcgcccucgagccccugguggaccugcccaucggcaucaacaucacccgcuuccagacccuccuggcccugcaccgguccuaccucacgccgggggacagcagcuccggcuggaccgcgggcgccgccgccuacuacgugggguaccugcagccccgcaccuuccugcucaaguacaacgagaacggcaccaucacggacgcggucgacugcgcccuggacccccugagcgagaccaagugcacccucaaguccuucaccguggagaaggggaucuaccagacgagcaacuuccgggugcagcccaccgaguccaucguccgcuucccgaacaucaccaaccugugccccuucggcgagguguucaacgccacccgguucgccagcgucuacgccuggaaccgcaagcggaucuccaacugcguggcggacuacagcgugcuguacaacuccgccagcuucuccacguucaagugcuacggcgucagccccaccaagcucaacgaccugugcuucaccaacguguacgccgacuccuucgugauccgcggggacgagguccggcagaucgcccccggccagaccgggaagaucgccgacuacaacuacaagcugccggacgacuucacgggcugcgugaucgcguggaacagcaacaaccucgacuccaaggucgggggcaacuacaacuaccuguaccgccuguuccgcaagagcaaccucaagcccuucgagcgggacaucuccaccgagaucuaccaggccggcagcacccccugcaacgggguggagggcuucaacugcuacuucccccugcaguccuacggguuccagccgaccaacggcgugggguaccagcccuaccggguggucgugcugagcuucgagcuccugcacgcccccgccacggugugcggccccaagaaguccaccaaccuggucaagaacaagugcgugaacuucaacuucaacggccucaccgggaccggcgugcugaccgagagcaacaagaaguuccugccguuccagcaguucgggcgcgacaucgccgacacgaccgacgcgguccgcgacccccagacccuggagauccucgacaucacccccugcagcuucggcgggguguccgugaucacgccgggcaccaacaccagcaaccaggucgccgugcuguaccagggcgugaacugcaccgagguccccguggccauccacgccgaccagcugacgcccaccuggcggguguacuccaccggcagcaacgucuuccagacccgcgccgggugccucaucggcgcggagcacgugaacaacuccuacgagugcgacauccccaucggggccggcaucugcgccagcuaccagacgcagaccaacuccccgcggcgcgcccggagcguggcgucccagagcaucaucgccuacaccaugucccugggcgccgagaacagcgucgccuacuccaacaacagcaucgccauccccaccaacuucacgaucuccgugaccaccgagauccugcccgugagcaugaccaagacgagcgucgacugcaccauguacaucugcggggacuccaccgagugcagcaaccuccugcugcaguacggcuccuucugcacccagcucaaccgcgcgcugacggggaucgccguggagcaggacaagaacacccaggagguguucgcccaggucaagcagaucuacaagacgcccccgaucaaggacuucggcggguucaacuucagccagauccugcccgaccccuccaagcccagcaagcgguccuucaucgaggaccuccuguucaacaaggugacccuggccgacgccggcuucaucaagcaguacggcgacugccucggggacaucgcggcccgcgaccugaucugcgcccagaaguucaacggccugaccgugcucccgccccugcugaccgacgagaugaucgcccaguacaccagcgcccuccuggcggggaccaucacguccggcuggaccuucggggccggcgccgcccugcagauccccuucgcgaugcagauggccuaccgguucaacggcaucggggucacccagaacgugcucuacgagaaccagaagcugaucgccaaccaguucaacagcgccaucggcaagauccaggacucccugagcuccaccgccagcgcgcucgggaagcugcaggacguggucaaccagaacgcccaggcccugaacacgcucgugaagcagcuguccagcaacuucggcgccaucuccagcgugcugaacgacauccucucccgccuggacccgcccgaggccgaggugcagaucgaccggcugaucaccgggcgccuccagagccugcagaccuacgugacccagcagcugauccgggcggccgagauccgcgccagcgccaaccucgccgcgaccaagauguccgagugcguccugggccagagcaagcggguggacuucugcggcaagggguaccaccugauguccuucccccagagcgccccgcacggcguggucuuccuccacgugacguacguccccgcccaggagaagaacuucaccaccgcccccgcgaucugccacgacgggaaggcccacuucccccgcgagggcguguucguguccaacgggacccacugguucgucacgcagcggaacuucuacgagccgcagaucaucaccaccgacaacaccuucgugagcggcaacugcgacguggucaucggcaucgugaacaacacgguguacgacccccugcagcccgagcuggacuccuucaaggaggagcucgacaaguacuucaagaaccacaccagccccgacgucgaccugggggacaucuccggcaucaacgccagcguggugaacauccagaaggagaucgaccgccugaacgaggucgccaagaaccucaacgagucccugaucgaccugcaggagcucgggaaguacgagcaguacaucaaguggccgugguacaucuggcugggcuucaucgccggccugaucgcgaucgugauggugaccaucaugcucugcugcaugaccagcugcugcuccugccugaaggggugcugcagcugcggcuccugcugcaaguucgacgaggacgacagcgagcccguccugaagggggugaagcuccacuacacgugaggacuaguguccaccugucccuccugggcugcuggauugucucguuuuccugccaaauaaacaggaucagcgcuuuacagaucucaaaggcucuuuucagagccaccaaaaaaaaaaaaaaaaaaaaaaaaaaaaaaaaaaaaaaaaaaaaaaaaaaaaaaaaaaaaaaaaaaaaaaaaaaaaaaaaaaaaaaaaaaaaaaaaaaaaa

SEQ ID NO: 23964 - RNA, 4129 nt, Artificial Sequence
  SARS-CoV-2/Wuhan/WIV05/2019__EPI_ISL_402128 spike protein mRNA gc (1-1273)(K986P_V987P_Y453F_D614G)
aggagacccgugacccggaaguuguacggcuacgcgacuuucccucccacaaacccucgcgcccuuccuuuccuacuugggcccggcagaaagcuuaccauguucguguuccugguccuccugccccuggugagcucccagugcgugaaccucaccacccgcacgcagcugccgcccgccuacaccaacagcuucacccggggcgucuacuaccccgacaagguguuccgcuccagcgugcugcacuccacccaggaccucuuccugcccuucuucagcaacgucacgugguuccacgccauccacguguccgggaccaacggcaccaagcgguucgacaacccggugcugcccuucaacgacggggucuacuucgcgagcaccgagaaguccaacaucauccgcggcuggaucuucgggacgacccucgacagcaagacccagucccugcugaucgugaacaacgccaccaacguggucaucaaggugugcgaguuccaguucugcaacgaccccuuccucggcguguacuaccacaagaacaacaagagcuggauggaguccgaguuccgggucuacagcuccgccaacaacugcacguucgaguacgugagccagcccuuccugauggaccuggagggcaagcaggggaacuucaagaaccuccgcgaguucguguucaagaacaucgacggcuacuucaagaucuacuccaagcacaccccgaucaaccugguccgggaccugccccagggguucagcgcccucgagccccugguggaccugcccaucggcaucaacaucacccgcuuccagacccuccuggcccugcaccgguccuaccucacgccgggggacagcagcuccggcuggaccgcgggcgccgccgccuacuacgugggguaccugcagccccgcaccuuccugcucaaguacaacgagaacggcaccaucacggacgcggucgacugcgcccuggacccccugagcgagaccaagugcacccucaaguccuucaccguggagaaggggaucuaccagacgagcaacuuccgggugcagcccaccgaguccaucguccgcuucccgaacaucaccaaccugugccccuucggcgagguguucaacgccacccgguucgccagcgucuacgccuggaaccgcaagcggaucuccaacugcguggcggacuacagcgugcuguacaacuccgccagcuucuccacguucaagugcuacggcgucagccccaccaagcucaacgaccugugcuucaccaacguguacgccgacuccuucgugauccgcggggacgagguccggcagaucgcccccggccagaccgggaagaucgccgacuacaacuacaagcugccggacgacuucacgggcugcgugaucgcguggaacagcaacaaccucgacuccaaggucgggggcaacuacaacuaccuguuccgccuguuccgcaagagcaaccucaagcccuucgagcgggacaucuccaccgagaucuaccaggccggcagcacccccugcaacgggguggagggcuucaacugcuacuucccccugcaguccuacggguuccagccgaccaacggcgugggguaccagcccuaccggguggucgugcugagcuucgagcuccugcacgcccccgccacggugugcggccccaagaaguccaccaaccuggucaagaacaagugcgugaacuucaacuucaacggccucaccgggaccggcgugcugaccgagagcaacaagaaguuccugccguuccagcaguucgggcgcgacaucgccgacacgaccgacgcgguccgcgacccccagacccuggagauccucgacaucacccccugcagcuucggcgggguguccgugaucacgccgggcaccaacaccagcaaccaggucgccgugcuguaccagggcgugaacugcaccgagguccccguggccauccacgccgaccagcugacgcccaccuggcggguguacuccaccggcagcaacgucuuccagacccgcgccgggugccucaucggcgcggagcacgugaacaacuccuacgagugcgacauccccaucggggccggcaucugcgccagcuaccagacgcagaccaacuccccgcggcgcgcccggagcguggcgucccagagcaucaucgccuacaccaugucccugggcgccgagaacagcgucgccuacuccaacaacagcaucgccauccccaccaacuucacgaucuccgugaccaccgagauccugcccgugagcaugaccaagacgagcgucgacugcaccauguacaucugcggggacuccaccgagugcagcaaccuccugcugcaguacggcuccuucugcacccagcucaaccgcgcgcugacggggaucgccguggagcaggacaagaacacccaggagguguucgcccaggucaagcagaucuacaagacgcccccgaucaaggacuucggcggguucaacuucagccagauccugcccgaccccuccaagcccagcaagcgguccuucaucgaggaccuccuguucaacaaggugacccuggccgacgccggcuucaucaagcaguacggcgacugccucggggacaucgcggcccgcgaccugaucugcgcccagaaguucaacggccugaccgugcucccgccccugcugaccgacgagaugaucgcccaguacaccagcgcccuccuggcggggaccaucacguccggcuggaccuucggggccggcgccgcccugcagauccccuucgcgaugcagauggccuaccgguucaacggcaucggggucacccagaacgugcucuacgagaaccagaagcugaucgccaaccaguucaacagcgccaucggcaagauccaggacucccugagcuccaccgccagcgcgcucgggaagcugcaggacguggucaaccagaacgcccaggcccugaacacgcucgugaagcagcuguccagcaacuucggcgccaucuccagcgugcugaacgacauccucucccgccuggacccgcccgaggccgaggugcagaucgaccggcugaucaccgggcgccuccagagccugcagaccuacgugacccagcagcugauccgggcggccgagauccgcgccagcgccaaccucgccgcgaccaagauguccgagugcguccugggccagagcaagcggguggacuucugcggcaagggguaccaccugauguccuucccccagagcgccccgcacggcguggucuuccuccacgugacguacguccccgcccaggagaagaacuucaccaccgcccccgcgaucugccacgacgggaaggcccacuucccccgcgagggcguguucguguccaacgggacccacugguucgucacgcagcggaacuucuacgagccgcagaucaucaccaccgacaacaccuucgugagcggcaacugcgacguggucaucggcaucgugaacaacacgguguacgacccccugcagcccgagcuggacuccuucaaggaggagcucgacaaguacuucaagaaccacaccagccccgacgucgaccugggggacaucuccggcaucaacgccagcguggugaacauccagaaggagaucgaccgccugaacgaggucgccaagaaccucaacgagucccugaucgaccugcaggagcucgggaaguacgagcaguacaucaaguggccgugguacaucuggcugggcuucaucgccggccugaucgcgaucgugauggugaccaucaugcucugcugcaugaccagcugcugcuccugccugaaggggugcugcagcugcggcuccugcugcaaguucgacgaggacgacagcgagcccguccugaagggggugaagcuccacuacacgugaggacuaguguccaccugucccuccugggcugcuggauugucucguuuuccugccaaauaaacaggaucagcgcuuuacagaucucaaaggcucuuuucagagccaccaaaaaaaaaaaaaaaaaaaaaaaaaaaaaaaaaaaaaaaaaaaaaaaaaaaaaaaaaaaaaaaaaaaaaaaaaaaaaaaaaaaaaaaaaaaaaaaaaaaaa

SEQ ID NO: 23965 - RNA, 4129 nt, Artificial Sequence
  SARS-CoV-2/Wuhan/WIV05/2019__EPI_ISL_402128 spike protein mRNA gc (1-1273)(K986P_V987P_D614G_I692V)
aggagacccgugacccggaaguuguacggcuacgcgacuuucccucccacaaacccucgcgcccuuccuuuccuacuugggcccggcagaaagcuuaccauguucguguuccugguccuccugccccuggugagcucccagugcgugaaccucaccacccgcacgcagcugccgcccgccuacaccaacagcuucacccggggcgucuacuaccccgacaagguguuccgcuccagcgugcugcacuccacccaggaccucuuccugcccuucuucagcaacgucacgugguuccacgccauccacguguccgggaccaacggcaccaagcgguucgacaacccggugcugcccuucaacgacggggucuacuucgcgagcaccgagaaguccaacaucauccgcggcuggaucuucgggacgacccucgacagcaagacccagucccugcugaucgugaacaacgccaccaacguggucaucaaggugugcgaguuccaguucugcaacgaccccuuccucggcguguacuaccacaagaacaacaagagcuggauggaguccgaguuccgggucuacagcuccgccaacaacugcacguucgaguacgugagccagcccuuccugauggaccuggagggcaagcaggggaacuucaagaaccuccgcgaguucguguucaagaacaucgacggcuacuucaagaucuacuccaagcacaccccgaucaaccugguccgggaccugccccagggguucagcgcccucgagccccugguggaccugcccaucggcaucaacaucacccgcuuccagacccuccuggcccugcaccgguccuaccucacgccgggggacagcagcuccggcuggaccgcgggcgccgccgccuacuacgugggguaccugcagccccgcaccuuccugcucaaguacaacgagaacggcaccaucacggacgcggucgacugcgcccuggacccccugagcgagaccaagugcacccucaaguccuucaccguggagaaggggaucuaccagacgagcaacuuccgggugcagcccaccgaguccaucguccgcuucccgaacaucaccaaccugugccccuucggcgagguguucaacgccacccgguucgccagcgucuacgccuggaaccgcaagcggaucuccaacugcguggcggacuacagcgugcuguacaacuccgccagcuucuccacguucaagugcuacggcgucagccccaccaagcucaacgaccugugcuucaccaacguguacgccgacuccuucgugauccgcggggacgagguccggcagaucgcccccggccagaccgggaagaucgccgacuacaacuacaagcugccggacgacuucacgggcugcgugaucgcguggaacagcaacaaccucgacuccaaggucgggggcaacuacaacuaccuguaccgccuguuccgcaagagcaaccucaagcccuucgagcgggacaucuccaccgagaucuaccaggccggcagcacccccugcaacgggguggagggcuucaacugcuacuucccccugcaguccuacggguuccagccgaccaacggcgugggguaccagcccuaccggguggucgugcugagcuucgagcuccugcacgcccccgccacggugugcggccccaagaaguccaccaaccuggucaagaacaagugcgugaacuucaacuucaacggccucaccgggaccggcgugcugaccgagagcaacaagaaguuccugccguuccagcaguucgggcgcgacaucgccgacacgaccgacgcgguccgcgacccccagacccuggagauccucgacaucacccccugcagcuucggcgggguguccgugaucacgccgggcaccaacaccagcaaccaggucgccgugcuguaccagggcgugaacugcaccgagguccccguggccauccacgccgaccagcugacgcccaccuggcggguguacuccaccggcagcaacgucuuccagacccgcgccgggugccucaucggcgcggagcacgugaacaacuccuacgagugcgacauccccaucggggccggcaucugcgccagcuaccagacgcagaccaacuccccgcggcgcgcccggagcguggcgucccagagcgucaucgccuacaccaugucccugggcgccgagaacagcgucgccuacuccaacaacagcaucgccauccccaccaacuucacgaucuccgugaccaccgagauccugcccgugagcaugaccaagacgagcgucgacugcaccauguacaucugcggggacuccaccgagugcagcaaccuccugcugcaguacggcuccuucugcacccagcucaaccgcgcgcugacggggaucgccguggagcaggacaagaacacccaggagguguucgcccaggucaagcagaucuacaagacgcccccgaucaaggacuucggcggguucaacuucagccagauccugcccgaccccuccaagcccagcaagcgguccuucaucgaggaccuccuguucaacaaggugacccuggccgacgccggcuucaucaagcaguacggcgacugccucggggacaucgcggcccgcgaccugaucugcgcccagaaguucaacggccugaccgugcucccgccccugcugaccgacgagaugaucgcccaguacaccagcgcccuccuggcggggaccaucacguccggcuggaccuucggggccggcgccgcccugcagauccccuucgcgaugcagauggccuaccgguucaacggcaucggggucacccagaacgugcucuacgagaaccagaagcugaucgccaaccaguucaacagcgccaucggcaagauccaggacucccugagcuccaccgccagcgcgcucgggaagcugcaggacguggucaaccagaacgcccaggcccugaacacgcucgugaagcagcuguccagcaacuucggcgccaucuccagcgugcugaacgacauccucucccgccuggacccgcccgaggccgaggugcagaucgaccggcugaucaccgggcgccuccagagccugcagaccuacgugacccagcagcugauccgggcggccgagauccgcgccagcgccaaccucgccgcgaccaagauguccgagugcguccugggccagagcaagcggguggacuucugcggcaagggguaccaccugauguccuucccccagagcgccccgcacggcguggucuuccuccacgugacguacguccccgcccaggagaagaacuucaccaccgcccccgcgaucugccacgacgggaaggcccacuucccccgcgagggcguguucguguccaacgggacccacugguucgucacgcagcggaacuucuacgagccgcagaucaucaccaccgacaacaccuucgugagcggcaacugcgacguggucaucggcaucgugaacaacacgguguacgacccccugcagcccgagcuggacuccuucaaggaggagcucgacaaguacuucaagaaccacaccagccccgacgucgaccugggggacaucuccggcaucaacgccagcguggugaacauccagaaggagaucgaccgccugaacgaggucgccaagaaccucaacgagucccugaucgaccugcaggagcucgggaaguacgagcaguacaucaaguggccgugguacaucuggcugggcuucaucgccggccugaucgcgaucgugauggugaccaucaugcucugcugcaugaccagcugcugcuccugccugaaggggugcugcagcugcggcuccugcugcaaguucgacgaggacgacagcgagcccguccugaagggggugaagcuccacuacacgugaggacuaguguccaccugucccuccugggcugcuggauugucucguuuuccugccaaauaaacaggaucagcgcuuuacagaucucaaaggcucuuuucagagccaccaaaaaaaaaaaaaaaaaaaaaaaaaaaaaaaaaaaaaaaaaaaaaaaaaaaaaaaaaaaaaaaaaaaaaaaaaaaaaaaaaaaaaaaaaaaaaaaaaaaaa

SEQ ID NO: 23966 - RNA, 4129 nt, Artificial Sequence
  SARS-CoV-2/Wuhan/WIV05/2019__EPI_ISL_402128 spike protein mRNA gc (1-1273)(K986P_V987P_D614G_M1229I)
aggagacccgugacccggaaguuguacggcuacgcgacuuucccucccacaaacccucgcgcccuuccuuuccuacuugggcccggcagaaagcuuaccauguucguguuccugguccuccugccccuggugagcucccagugcgugaaccucaccacccgcacgcagcugccgcccgccuacaccaacagcuucacccggggcgucuacuaccccgacaagguguuccgcuccagcgugcugcacuccacccaggaccucuuccugcccuucuucagcaacgucacgugguuccacgccauccacguguccgggaccaacggcaccaagcgguucgacaacccggugcugcccuucaacgacggggucuacuucgcgagcaccgagaaguccaacaucauccgcggcuggaucuucgggacgacccucgacagcaagacccagucccugcugaucgugaacaacgccaccaacguggucaucaaggugugcgaguuccaguucugcaacgaccccuuccucggcguguacuaccacaagaacaacaagagcuggauggaguccgaguuccgggucuacagcuccgccaacaacugcacguucgaguacgugagccagcccuuccugauggaccuggagggcaagcaggggaacuucaagaaccuccgcgaguucguguucaagaacaucgacggcuacuucaagaucuacuccaagcacaccccgaucaaccugguccgggaccugccccagggguucagcgcccucgagccccugguggaccugcccaucggcaucaacaucacccgcuuccagacccuccuggcccugcaccgguccuaccucacgccgggggacagcagcuccggcuggaccgcgggcgccgccgccuacuacgugggguaccugcagccccgcaccuuccugcucaaguacaacgagaacggcaccaucacggacgcggucgacugcgcccuggacccccugagcgagaccaagugcacccucaaguccuucaccguggagaaggggaucuaccagacgagcaacuuccgggugcagcccaccgaguccaucguccgcuucccgaacaucaccaaccugugccccuucggcgagguguucaacgccacccgguucgccagcgucuacgccuggaaccgcaagcggaucuccaacugcguggcggacuacagcgugcuguacaacuccgccagcuucuccacguucaagugcuacggcgucagccccaccaagcucaacgaccugugcuucaccaacguguacgccgacuccuucgugauccgcggggacgagguccggcagaucgcccccggccagaccgggaagaucgccgacuacaacuacaagcugccggacgacuucacgggcugcgugaucgcguggaacagcaacaaccucgacuccaaggucgggggcaacuacaacuaccuguaccgccuguuccgcaagagcaaccucaagcccuucgagcgggacaucuccaccgagaucuaccaggccggcagcacccccugcaacgggguggagggcuucaacugcuacuucccccugcaguccuacggguuccagccgaccaacggcgugggguaccagcccuaccggguggucgugcugagcuucgagcuccugcacgcccccgccacggugugcggccccaagaaguccaccaaccuggucaagaacaagugcgugaacuucaacuucaacggccucaccgggaccggcgugcugaccgagagcaacaagaaguuccugccguuccagcaguucgggcgcgacaucgccgacacgaccgacgcgguccgcgacccccagacccuggagauccucgacaucacccccugcagcuucggcgggguguccgugaucacgccgggcaccaacaccagcaaccaggucgccgugcuguaccagggcgugaacugcaccgagguccccguggccauccacgccgaccagcugacgcccaccuggcggguguacuccaccggcagcaacgucuuccagacccgcgccgggugccucaucggcgcggagcacgugaacaacuccuacgagugcgacauccccaucggggccggcaucugcgccagcuaccagacgcagaccaacuccccgcggcgcgcccggagcguggcgucccagagcaucaucgccuacaccaugucccugggcgccgagaacagcgucgccuacuccaacaacagcaucgccauccccaccaacuucacgaucuccgugaccaccgagauccugcccgugagcaugaccaagacgagcgucgacugcaccauguacaucugcggggacuccaccgagugcagcaaccuccugcugcaguacggcuccuucugcacccagcucaaccgcgcgcugacggggaucgccguggagcaggacaagaacacccaggagguguucgcccaggucaagcagaucuacaagacgcccccgaucaaggacuucggcggguucaacuucagccagauccugcccgaccccuccaagcccagcaagcgguccuucaucgaggaccuccuguucaacaaggugacccuggccgacgccggcuucaucaagcaguacggcgacugccucggggacaucgcggcccgcgaccugaucugcgcccagaaguucaacggccugaccgugcucccgccccugcugaccgacgagaugaucgcccaguacaccagcgcccuccuggcggggaccaucacguccggcuggaccuucggggccggcgccgcccugcagauccccuucgcgaugcagauggccuaccgguucaacggcaucggggucacccagaacgugcucuacgagaaccagaagcugaucgccaaccaguucaacagcgccaucggcaagauccaggacucccugagcuccaccgccagcgcgcucgggaagcugcaggacguggucaaccagaacgcccaggcccugaacacgcucgugaagcagcuguccagcaacuucggcgccaucuccagcgugcugaacgacauccucucccgccuggacccgcccgaggccgaggugcagaucgaccggcugaucaccgggcgccuccagagccugcagaccuacgugacccagcagcugauccgggcggccgagauccgcgccagcgccaaccucgccgcgaccaagauguccgagugcguccugggccagagcaagcggguggacuucugcggcaagggguaccaccugauguccuucccccagagcgccccgcacggcguggucuuccuccacgugacguacguccccgcccaggagaagaacuucaccaccgcccccgcgaucugccacgacgggaaggcccacuucccccgcgagggcguguucguguccaacgggacccacugguucgucacgcagcggaacuucuacgagccgcagaucaucaccaccgacaacaccuucgugagcggcaacugcgacguggucaucggcaucgugaacaacacgguguacgacccccugcagcccgagcuggacuccuucaaggaggagcucgacaaguacuucaagaaccacaccagccccgacgucgaccugggggacaucuccggcaucaacgccagcguggugaacauccagaaggagaucgaccgccugaacgaggucgccaagaaccucaacgagucccugaucgaccugcaggagcucgggaaguacgagcaguacaucaaguggccgugguacaucuggcugggcuucaucgccggccugaucgcgaucgugaucgugaccaucaugcucugcugcaugaccagcugcugcuccugccugaaggggugcugcagcugcggcuccugcugcaaguucgacgaggacgacagcgagcccguccugaagggggugaagcuccacuacacgugaggacuaguguccaccugucccuccugggcugcuggauugucucguuuuccugccaaauaaacaggaucagcgcuuuacagaucucaaaggcucuuuucagagccaccaaaaaaaaaaaaaaaaaaaaaaaaaaaaaaaaaaaaaaaaaaaaaaaaaaaaaaaaaaaaaaaaaaaaaaaaaaaaaaaaaaaaaaaaaaaaaaaaaaaaa

SEQ ID NO: 23967 - RNA, 4123 nt, Artificial Sequence
  SARS-CoV-2/Wuhan/WIV05/2019__EPI_ISL_402128 spike protein mRNA gc (1-1273)(K986P_V987P_H69del_V70del_A222V_Y453F_S477N_D614G_I692V)
aggagacccgugacccggaaguuguacggcuacgcgacuuucccucccacaaacccucgcgcccuuccuuuccuacuugggcccggcagaaagcuuaccauguucguguuccugguccuccugccccuggugagcucccagugcgugaaccucaccacccgcacgcagcugccgcccgccuacaccaacagcuucacccggggcgucuacuaccccgacaagguguuccgcuccagcgugcugcacuccacccaggaccucuuccugcccuucuucagcaacgucacgugguuccacgccaucuccgggaccaacggcaccaagcgguucgacaacccggugcugcccuucaacgacggggucuacuucgcgagcaccgagaaguccaacaucauccgcggcuggaucuucgggacgacccucgacagcaagacccagucccugcugaucgugaacaacgccaccaacguggucaucaaggugugcgaguuccaguucugcaacgaccccuuccucggcguguacuaccacaagaacaacaagagcuggauggaguccgaguuccgggucuacagcuccgccaacaacugcacguucgaguacgugagccagcccuuccugauggaccuggagggcaagcaggggaacuucaagaaccuccgcgaguucguguucaagaacaucgacggcuacuucaagaucuacuccaagcacaccccgaucaaccugguccgggaccugccccagggguucagcguccucgagccccugguggaccugcccaucggcaucaacaucacccgcuuccagacccuccuggcccugcaccgguccuaccucacgccgggggacagcagcuccggcuggaccgcgggcgccgccgccuacuacgugggguaccugcagccccgcaccuuccugcucaaguacaacgagaacggcaccaucacggacgcggucgacugcgcccuggacccccugagcgagaccaagugcacccucaaguccuucaccguggagaaggggaucuaccagacgagcaacuuccgggugcagcccaccgaguccaucguccgcuucccgaacaucaccaaccugugccccuucggcgagguguucaacgccacccgguucgccagcgucuacgccuggaaccgcaagcggaucuccaacugcguggcggacuacagcgugcuguacaacuccgccagcuucuccacguucaagugcuacggcgucagccccaccaagcucaacgaccugugcuucaccaacguguacgccgacuccuucgugauccgcggggacgagguccggcagaucgcccccggccagaccgggaagaucgccgacuacaacuacaagcugccggacgacuucacgggcugcgugaucgcguggaacagcaacaaccucgacuccaaggucgggggcaacuacaacuaccuguuccgccuguuccgcaagagcaaccucaagcccuucgagcgggacaucuccaccgagaucuaccaggccggcaacacccccugcaacgggguggagggcuucaacugcuacuucccccugcaguccuacggguuccagccgaccaacggcgugggguaccagcccuaccggguggucgugcugagcuucgagcuccugcacgcccccgccacggugugcggccccaagaaguccaccaaccuggucaagaacaagugcgugaacuucaacuucaacggccucaccgggaccggcgugcugaccgagagcaacaagaaguuccugccguuccagcaguucgggcgcgacaucgccgacacgaccgacgcgguccgcgacccccagacccuggagauccucgacaucacccccugcagcuucggcgggguguccgugaucacgccgggcaccaacaccagcaaccaggucgccgugcuguaccagggcgugaacugcaccgagguccccguggccauccacgccgaccagcugacgcccaccuggcggguguacuccaccggcagcaacgucuuccagacccgcgccgggugccucaucggcgcggagcacgugaacaacuccuacgagugcgacauccccaucggggccggcaucugcgccagcuaccagacgcagaccaacuccccgcggcgcgcccggagcguggcgucccagagcgucaucgccuacaccaugucccugggcgccgagaacagcgucgccuacuccaacaacagcaucgccauccccaccaacuucacgaucuccgugaccaccgagauccugcccgugagcaugaccaagacgagcgucgacugcaccauguacaucugcggggacuccaccgagugcagcaaccuccugcugcaguacggcuccuucugcacccagcucaaccgcgcgcugacggggaucgccguggagcaggacaagaacacccaggagguguucgcccaggucaagcagaucuacaagacgcccccgaucaaggacuucggcggguucaacuucagccagauccugcccgaccccuccaagcccagcaagcgguccuucaucgaggaccuccuguucaacaaggugacccuggccgacgccggcuucaucaagcaguacggcgacugccucggggacaucgcggcccgcgaccugaucugcgcccagaaguucaacggccugaccgugcucccgccccugcugaccgacgagaugaucgcccaguacaccagcgcccuccuggcggggaccaucacguccggcuggaccuucggggccggcgccgcccugcagauccccuucgcgaugcagauggccuaccgguucaacggcaucggggucacccagaacgugcucuacgagaaccagaagcugaucgccaaccaguucaacagcgccaucggcaagauccaggacucccugagcuccaccgccagcgcgcucgggaagcugcaggacguggucaaccagaacgcccaggcccugaacacgcucgugaagcagcuguccagcaacuucggcgccaucuccagcgugcugaacgacauccucucccgccuggacccgcccgaggccgaggugcagaucgaccggcugaucaccgggcgccuccagagccugcagaccuacgugacccagcagcugauccgggcggccgagauccgcgccagcgccaaccucgccgcgaccaagauguccgagugcguccugggccagagcaagcggguggacuucugcggcaagggguaccaccugauguccuucccccagagcgccccgcacggcguggucuuccuccacgugacguacguccccgcccaggagaagaacuucaccaccgcccccgcgaucugccacgacgggaaggcccacuucccccgcgagggcguguucguguccaacgggacccacugguucgucacgcagcggaacuucuacgagccgcagaucaucaccaccgacaacaccuucgugagcggcaacugcgacguggucaucggcaucgugaacaacacgguguacgacccccugcagcccgagcuggacuccuucaaggaggagcucgacaaguacuucaagaaccacaccagccccgacgucgaccugggggacaucuccggcaucaacgccagcguggugaacauccagaaggagaucgaccgccugaacgaggucgccaagaaccucaacgagucccugaucgaccugcaggagcucgggaaguacgagcaguacaucaaguggccgugguacaucuggcugggcuucaucgccggccugaucgcgaucgugauggugaccaucaugcucugcugcaugaccagcugcugcuccugccugaaggggugcugcagcugcggcuccugcugcaaguucgacgaggacgacagcgagcccguccugaagggggugaagcuccacuacacgugaggacuaguguccaccugucccuccugggcugcuggauugucucguuuuccugccaaauaaacaggaucagcgcuuuacagaucucaaaggcucuuuucagagccaccaaaaaaaaaaaaaaaaaaaaaaaaaaaaaaaaaaaaaaaaaaaaaaaaaaaaaaaaaaaaaaaaaaaaaaaaaaaaaaaaaaaaaaaaaaaaaaaaaaaaa

SEQ ID NO: 23968 - RNA, 4123 nt, Artificial Sequence
  SARS-CoV-2/Wuhan/WIV05/2019__EPI_ISL_402128 spike protein mRNA gc (1-1273)(K986P_V987P_H69del_V70del_Y453F_D614G_I692V_M1229I)
aggagacccgugacccggaaguuguacggcuacgcgacuuucccucccacaaacccucgcgcccuuccuuuccuacuugggcccggcagaaagcuuaccauguucguguuccugguccuccugccccuggugagcucccagugcgugaaccucaccacccgcacgcagcugccgcccgccuacaccaacagcuucacccggggcgucuacuaccccgacaagguguuccgcuccagcgugcugcacuccacccaggaccucuuccugcccuucuucagcaacgucacgugguuccacgccaucuccgggaccaacggcaccaagcgguucgacaacccggugcugcccuucaacgacggggucuacuucgcgagcaccgagaaguccaacaucauccgcggcuggaucuucgggacgacccucgacagcaagacccagucccugcugaucgugaacaacgccaccaacguggucaucaaggugugcgaguuccaguucugcaacgaccccuuccucggcguguacuaccacaagaacaacaagagcuggauggaguccgaguuccgggucuacagcuccgccaacaacugcacguucgaguacgugagccagcccuuccugauggaccuggagggcaagcaggggaacuucaagaaccuccgcgaguucguguucaagaacaucgacggcuacuucaagaucuacuccaagcacaccccgaucaaccugguccgggaccugccccagggguucagcgcccucgagccccugguggaccugcccaucggcaucaacaucacccgcuuccagacccuccuggcccugcaccgguccuaccucacgccgggggacagcagcuccggcuggaccgcgggcgccgccgccuacuacgugggguaccugcagccccgcaccuuccugcucaaguacaacgagaacggcaccaucacggacgcggucgacugcgcccuggacccccugagcgagaccaagugcacccucaaguccuucaccguggagaaggggaucuaccagacgagcaacuuccgggugcagcccaccgaguccaucguccgcuucccgaacaucaccaaccugugccccuucggcgagguguucaacgccacccgguucgccagcgucuacgccuggaaccgcaagcggaucuccaacugcguggcggacuacagcgugcuguacaacuccgccagcuucuccacguucaagugcuacggcgucagccccaccaagcucaacgaccugugcuucaccaacguguacgccgacuccuucgugauccgcggggacgagguccggcagaucgcccccggccagaccgggaagaucgccgacuacaacuacaagcugccggacgacuucacgggcugcgugaucgcguggaacagcaacaaccucgacuccaaggucgggggcaacuacaacuaccuguuccgccuguuccgcaagagcaaccucaagcccuucgagcgggacaucuccaccgagaucuaccaggccggcagcacccccugcaacgggguggagggcuucaacugcuacuucccccugcaguccuacggguuccagccgaccaacggcgugggguaccagcccuaccggguggucgugcugagcuucgagcuccugcacgcccccgccacggugugcggccccaagaaguccaccaaccuggucaagaacaagugcgugaacuucaacuucaacggccucaccgggaccggcgugcugaccgagagcaacaagaaguuccugccguuccagcaguucgggcgcgacaucgccgacacgaccgacgcgguccgcgacccccagacccuggagauccucgacaucacccccugcagcuucggcgggguguccgugaucacgccgggcaccaacaccagcaaccaggucgccgugcuguaccagggcgugaacugcaccgagguccccguggccauccacgccgaccagcugacgcccaccuggcggguguacuccaccggcagcaacgucuuccagacccgcgccgggugccucaucggcgcggagcacgugaacaacuccuacgagugcgacauccccaucggggccggcaucugcgccagcuaccagacgcagaccaacuccccgcggcgcgcccggagcguggcgucccagagcgugaucgccuacaccaugucccugggcgccgagaacagcgucgccuacuccaacaacagcaucgccauccccaccaacuucacgaucuccgugaccaccgagauccugcccgugagcaugaccaagacgagcgucgacugcaccauguacaucugcggggacuccaccgagugcagcaaccuccugcugcaguacggcuccuucugcacccagcucaaccgcgcgcugacggggaucgccguggagcaggacaagaacacccaggagguguucgcccaggucaagcagaucuacaagacgcccccgaucaaggacuucggcggguucaacuucagccagauccugcccgaccccuccaagcccagcaagcgguccuucaucgaggaccuccuguucaacaaggugacccuggccgacgccggcuucaucaagcaguacggcgacugccucggggacaucgcggcccgcgaccugaucugcgcccagaaguucaacggccugaccgugcucccgccccugcugaccgacgagaugaucgcccaguacaccagcgcccuccuggcggggaccaucacguccggcuggaccuucggggccggcgccgcccugcagauccccuucgcgaugcagauggccuaccgguucaacggcaucggggucacccagaacgugcucuacgagaaccagaagcugaucgccaaccaguucaacagcgccaucggcaagauccaggacucccugagcuccaccgccagcgcgcucgggaagcugcaggacguggucaaccagaacgcccaggcccugaacacgcucgugaagcagcuguccagcaacuucggcgccaucuccagcgugcugaacgacauccucucccgccuggacccgcccgaggccgaggugcagaucgaccggcugaucaccgggcgccuccagagccugcagaccuacgugacccagcagcugauccgggcggccgagauccgcgccagcgccaaccucgccgcgaccaagauguccgagugcguccugggccagagcaagcggguggacuucugcggcaagggguaccaccugauguccuucccccagagcgccccgcacggcguggucuuccuccacgugacguacguccccgcccaggagaagaacuucaccaccgcccccgcgaucugccacgacgggaaggcccacuucccccgcgagggcguguucguguccaacgggacccacugguucgucacgcagcggaacuucuacgagccgcagaucaucaccaccgacaacaccuucgugagcggcaacugcgacguggucaucggcaucgugaacaacacgguguacgacccccugcagcccgagcuggacuccuucaaggaggagcucgacaaguacuucaagaaccacaccagccccgacgucgaccugggggacaucuccggcaucaacgccagcguggugaacauccagaaggagaucgaccgccugaacgaggucgccaagaaccucaacgagucccugaucgaccugcaggagcucgggaaguacgagcaguacaucaaguggccgugguacaucuggcugggcuucaucgccggccugaucgcgaucgugaucgugaccaucaugcucugcugcaugaccagcugcugcuccugccugaaggggugcugcagcugcggcuccugcugcaaguucgacgaggacgacagcgagcccguccugaagggggugaagcuccacuacacgugaggacuaguguccaccugucccuccugggcugcuggauugucucguuuuccugccaaauaaacaggaucagcgcuuuacagaucucaaaggcucuuuucagagccaccaaaaaaaaaaaaaaaaaaaaaaaaaaaaaaaaaaaaaaaaaaaaaaaaaaaaaaaaaaaaaaaaaaaaaaaaaaaaaaaaaaaaaaaaaaaaaaaaaaaaa

SEQ ID NO: 23969 - RNA, 4120 nt, Artificial Sequence
  SARS-CoV-2/Wuhan/WIV05/2019__EPI_ISL_402128 spike protein mRNA gc (1-1273)(K986P_V987P_K986P_V987P_H69del_V70del_Y144del_N501Y_A570 D_D614G_P681H_T716I_S982A_D1118H)
aggagacccgugacccggaaguuguacggcuacgcgacuuucccucccacaaacccucgcgcccuuccuuuccuacuugggcccggcagaaagcuuaccauguucguguuccugguccuccugccccuggugagcucccagugcgugaaccucaccacccgcacgcagcugccgcccgccuacaccaacagcuucacccggggcgucuacuaccccgacaagguguuccgcuccagcgugcugcacuccacccaggaccucuuccugcccuucuucagcaacgucacgugguuccacgccaucuccgggaccaacggcaccaagcgguucgacaacccggugcugcccuucaacgacggggucuacuucgcgagcaccgagaaguccaacaucauccgcggcuggaucuucgggacgacccucgacagcaagacccagucccugcugaucgugaacaacgccaccaacguggucaucaaggugugcgaguuccaguucugcaacgaccccuuccucggcguguaccacaagaacaacaagagcuggauggaguccgaguuccgggucuacagcuccgccaacaacugcacguucgaguacgugagccagcccuuccugauggaccuggagggcaagcaggggaacuucaagaaccuccgcgaguucguguucaagaacaucgacggcuacuucaagaucuacuccaagcacaccccgaucaaccugguccgggaccugccccagggguucagcgcccucgagccccugguggaccugcccaucggcaucaacaucacccgcuuccagacccuccuggcccugcaccgguccuaccucacgccgggggacagcagcuccggcuggaccgcgggcgccgccgccuacuacgugggguaccugcagccccgcaccuuccugcucaaguacaacgagaacggcaccaucacggacgcggucgacugcgcccuggacccccugagcgagaccaagugcacccucaaguccuucaccguggagaaggggaucuaccagacgagcaacuuccgggugcagcccaccgaguccaucguccgcuucccgaacaucaccaaccugugccccuucggcgagguguucaacgccacccgguucgccagcgucuacgccuggaaccgcaagcggaucuccaacugcguggcggacuacagcgugcuguacaacuccgccagcuucuccacguucaagugcuacggcgucagccccaccaagcucaacgaccugugcuucaccaacguguacgccgacuccuucgugauccgcggggacgagguccggcagaucgcccccggccagaccgggaagaucgccgacuacaacuacaagcugccggacgacuucacgggcugcgugaucgcguggaacagcaacaaccucgacuccaaggucgggggcaacuacaacuaccuguaccgccuguuccgcaagagcaaccucaagcccuucgagcgggacaucuccaccgagaucuaccaggccggcagcacccccugcaacgggguggagggcuucaacugcuacuucccccugcaguccuacggguuccagccgaccuacggcgugggguaccagcccuaccggguggucgugcugagcuucgagcuccugcacgcccccgccacggugugcggccccaagaaguccaccaaccuggucaagaacaagugcgugaacuucaacuucaacggccucaccgggaccggcgugcugaccgagagcaacaagaaguuccugccguuccagcaguucgggcgcgacaucgacgacacgaccgacgcgguccgcgacccccagacccuggagauccucgacaucacccccugcagcuucggcgggguguccgugaucacgccgggcaccaacaccagcaaccaggucgccgugcuguaccagggcgugaacugcaccgagguccccguggccauccacgccgaccagcugacgcccaccuggcggguguacuccaccggcagcaacgucuuccagacccgcgccgggugccucaucggcgcggagcacgugaacaacuccuacgagugcgacauccccaucggggccggcaucugcgccagcuaccagacgcagaccaacucccaccggcgcgcccggagcguggcgucccagagcaucaucgccuacaccaugucccugggcgccgagaacagcgucgccuacuccaacaacagcaucgccauccccaucaacuucacgaucuccgugaccaccgagauccugcccgugagcaugaccaagacgagcgucgacugcaccauguacaucugcggggacuccaccgagugcagcaaccuccugcugcaguacggcuccuucugcacccagcucaaccgcgcgcugacggggaucgccguggagcaggacaagaacacccaggagguguucgcccaggucaagcagaucuacaagacgcccccgaucaaggacuucggcggguucaacuucagccagauccugcccgaccccuccaagcccagcaagcgguccuucaucgaggaccuccuguucaacaaggugacccuggccgacgccggcuucaucaagcaguacggcgacugccucggggacaucgcggcccgcgaccugaucugcgcccagaaguucaacggccugaccgugcucccgccccugcugaccgacgagaugaucgcccaguacaccagcgcccuccuggcggggaccaucacguccggcuggaccuucggggccggcgccgcccugcagauccccuucgcgaugcagauggccuaccgguucaacggcaucggggucacccagaacgugcucuacgagaaccagaagcugaucgccaaccaguucaacagcgccaucggcaagauccaggacucccugagcuccaccgccagcgcgcucgggaagcugcaggacguggucaaccagaacgcccaggcccugaacacgcucgugaagcagcuguccagcaacuucggcgccaucuccagcgugcugaacgacauccucgcccgccuggacccgcccgaggccgaggugcagaucgaccggcugaucaccgggcgccuccagagccugcagaccuacgugacccagcagcugauccgggcggccgagauccgcgccagcgccaaccucgccgcgaccaagauguccgagugcguccugggccagagcaagcggguggacuucugcggcaagggguaccaccugauguccuucccccagagcgccccgcacggcguggucuuccuccacgugacguacguccccgcccaggagaagaacuucaccaccgcccccgcgaucugccacgacgggaaggcccacuucccccgcgagggcguguucguguccaacgggacccacugguucgucacgcagcggaacuucuacgagccgcagaucaucaccacccacaacaccuucgugagcggcaacugcgacguggucaucggcaucgugaacaacacgguguacgacccccugcagcccgagcuggacuccuucaaggaggagcucgacaaguacuucaagaaccacaccagccccgacgucgaccugggggacaucuccggcaucaacgccagcguggugaacauccagaaggagaucgaccgccugaacgaggucgccaagaaccucaacgagucccugaucgaccugcaggagcucgggaaguacgagcaguacaucaaguggccgugguacaucuggcugggcuucaucgccggccugaucgcgaucgugauggugaccaucaugcucugcugcaugaccagcugcugcuccugccugaaggggugcugcagcugcggcuccugcugcaaguucgacgaggacgacagcgagcccguccugaagggggugaagcuccacuacacgugaggacuaguguccaccugucccuccugggcugcuggauugucucguuuuccugccaaauaaacaggaucagcgcuuuacagaucucaaaggcucuuuucagagccaccaaaaaaaaaaaaaaaaaaaaaaaaaaaaaaaaaaaaaaaaaaaaaaaaaaaaaaaaaaaaaaaaaaaaaaaaaaaaaaaaaaaaaaaaaaaaaaaaaaaaa

SEQ ID NO: 23970 - RNA, 4129 nt, Artificial Sequence
  SARS-CoV-2/Wuhan/WIV05/2019__EPI_ISL_402128 spike protein mRNA gc (1-1273)(K986P_V987P_K986P_V987P_K417N_E484K_N501Y_D614G)
aggagacccgugacccggaaguuguacggcuacgcgacuuucccucccacaaacccucgcgcccuuccuuuccuacuugggcccggcagaaagcuuaccauguucguguuccugguccuccugccccuggugagcucccagugcgugaaccucaccacccgcacgcagcugccgcccgccuacaccaacagcuucacccggggcgucuacuaccccgacaagguguuccgcuccagcgugcugcacuccacccaggaccucuuccugcccuucuucagcaacgucacgugguuccacgccauccacguguccgggaccaacggcaccaagcgguucgacaacccggugcugcccuucaacgacggggucuacuucgcgagcaccgagaaguccaacaucauccgcggcuggaucuucgggacgacccucgacagcaagacccagucccugcugaucgugaacaacgccaccaacguggucaucaaggugugcgaguuccaguucugcaacgaccccuuccucggcguguacuaccacaagaacaacaagagcuggauggaguccgaguuccgggucuacagcuccgccaacaacugcacguucgaguacgugagccagcccuuccugauggaccuggagggcaagcaggggaacuucaagaaccuccgcgaguucguguucaagaacaucgacggcuacuucaagaucuacuccaagcacaccccgaucaaccugguccgggaccugccccagggguucagcgcccucgagccccugguggaccugcccaucggcaucaacaucacccgcuuccagacccuccuggcccugcaccgguccuaccucacgccgggggacagcagcuccggcuggaccgcgggcgccgccgccuacuacgugggguaccugcagccccgcaccuuccugcucaaguacaacgagaacggcaccaucacggacgcggucgacugcgcccuggacccccugagcgagaccaagugcacccucaaguccuucaccguggagaaggggaucuaccagacgagcaacuuccgggugcagcccaccgaguccaucguccgcuucccgaacaucaccaaccugugccccuucggcgagguguucaacgccacccgguucgccagcgucuacgccuggaaccgcaagcggaucuccaacugcguggcggacuacagcgugcuguacaacuccgccagcuucuccacguucaagugcuacggcgucagccccaccaagcucaacgaccugugcuucaccaacguguacgccgacuccuucgugauccgcggggacgagguccggcagaucgcccccggccagaccgggaacaucgccgacuacaacuacaagcugccggacgacuucacgggcugcgugaucgcguggaacagcaacaaccucgacuccaaggucgggggcaacuacaacuaccuguaccgccuguuccgcaagagcaaccucaagcccuucgagcgggacaucuccaccgagaucuaccaggccggcagcacccccugcaacggggugaagggcuucaacugcuacuucccccugcaguccuacggguuccagccgaccuacggcgugggguaccagcccuaccggguggucgugcugagcuucgagcuccugcacgcccccgccacggugugcggccccaagaaguccaccaaccuggucaagaacaagugcgugaacuucaacuucaacggccucaccgggaccggcgugcugaccgagagcaacaagaaguuccugccguuccagcaguucgggcgcgacaucgccgacacgaccgacgcgguccgcgacccccagacccuggagauccucgacaucacccccugcagcuucggcgggguguccgugaucacgccgggcaccaacaccagcaaccaggucgccgugcuguaccagggcgugaacugcaccgagguccccguggccauccacgccgaccagcugacgcccaccuggcggguguacuccaccggcagcaacgucuuccagacccgcgccgggugccucaucggcgcggagcacgugaacaacuccuacgagugcgacauccccaucggggccggcaucugcgccagcuaccagacgcagaccaacuccccgcggcgcgcccggagcguggcgucccagagcaucaucgccuacaccaugucccugggcgccgagaacagcgucgccuacuccaacaacagcaucgccauccccaccaacuucacgaucuccgugaccaccgagauccugcccgugagcaugaccaagacgagcgucgacugcaccauguacaucugcggggacuccaccgagugcagcaaccuccugcugcaguacggcuccuucugcacccagcucaaccgcgcgcugacggggaucgccguggagcaggacaagaacacccaggagguguucgcccaggucaagcagaucuacaagacgcccccgaucaaggacuucggcggguucaacuucagccagauccugcccgaccccuccaagcccagcaagcgguccuucaucgaggaccuccuguucaacaaggugacccuggccgacgccggcuucaucaagcaguacggcgacugccucggggacaucgcggcccgcgaccugaucugcgcccagaaguucaacggccugaccgugcucccgccccugcugaccgacgagaugaucgcccaguacaccagcgcccuccuggcggggaccaucacguccggcuggaccuucggggccggcgccgcccugcagauccccuucgcgaugcagauggccuaccgguucaacggcaucggggucacccagaacgugcucuacgagaaccagaagcugaucgccaaccaguucaacagcgccaucggcaagauccaggacucccugagcuccaccgccagcgcgcucgggaagcugcaggacguggucaaccagaacgcccaggcccugaacacgcucgugaagcagcuguccagcaacuucggcgccaucuccagcgugcugaacgacauccucucccgccuggacccgcccgaggccgaggugcagaucgaccggcugaucaccgggcgccuccagagccugcagaccuacgugacccagcagcugauccgggcggccgagauccgcgccagcgccaaccucgccgcgaccaagauguccgagugcguccugggccagagcaagcggguggacuucugcggcaagggguaccaccugauguccuucccccagagcgccccgcacggcguggucuuccuccacgugacguacguccccgcccaggagaagaacuucaccaccgcccccgcgaucugccacgacgggaaggcccacuucccccgcgagggcguguucguguccaacgggacccacugguucgucacgcagcggaacuucuacgagccgcagaucaucaccaccgacaacaccuucgugagcggcaacugcgacguggucaucggcaucgugaacaacacgguguacgacccccugcagcccgagcuggacuccuucaaggaggagcucgacaaguacuucaagaaccacaccagccccgacgucgaccugggggacaucuccggcaucaacgccagcguggugaacauccagaaggagaucgaccgccugaacgaggucgccaagaaccucaacgagucccugaucgaccugcaggagcucgggaaguacgagcaguacaucaaguggccgugguacaucuggcugggcuucaucgccggccugaucgcgaucgugauggugaccaucaugcucugcugcaugaccagcugcugcuccugccugaaggggugcugcagcugcggcuccugcugcaaguucgacgaggacgacagcgagcccguccugaagggggugaagcuccacuacacgugaggacuaguguccaccugucccuccugggcugcuggauugucucguuuuccugccaaauaaacaggaucagcgcuuuacagaucucaaaggcucuuuucagagccaccaaaaaaaaaaaaaaaaaaaaaaaaaaaaaaaaaaaaaaaaaaaaaaaaaaaaaaaaaaaaaaaaaaaaaaaaaaaaaaaaaaaaaaaaaaaaaaaaaaaaa

SEQ ID NO: 23971 - RNA, 4120 nt, Artificial Sequence
  SARS-CoV-2/Wuhan/WIV05/2019__EPI_ISL_402128 spike protein mRNA gc (1-1273)(K986P_V987P_K986P_V987P_L18F_D80A_D215G_L242del_A243del_ L244del_R246I_K417N_E484K_N501Y_D614G_A701V)
aggagacccgugacccggaaguuguacggcuacgcgacuuucccucccacaaacccucgcgcccuuccuuuccuacuugggcccggcagaaagcuuaccauguucguguuccugguccuccugccccuggugagcucccagugcgugaacuucaccacccgcacgcagcugccgcccgccuacaccaacagcuucacccggggcgucuacuaccccgacaagguguuccgcuccagcgugcugcacuccacccaggaccucuuccugcccuucuucagcaacgucacgugguuccacgccauccacguguccgggaccaacggcaccaagcgguucgccaacccggugcugcccuucaacgacggggucuacuucgcgagcaccgagaaguccaacaucauccgcggcuggaucuucgggacgacccucgacagcaagacccagucccugcugaucgugaacaacgccaccaacguggucaucaaggugugcgaguuccaguucugcaacgaccccuuccucggcguguacuaccacaagaacaacaagagcuggauggaguccgaguuccgggucuacagcuccgccaacaacugcacguucgaguacgugagccagcccuuccugauggaccuggagggcaagcaggggaacuucaagaaccuccgcgaguucguguucaagaacaucgacggcuacuucaagaucuacuccaagcacaccccgaucaaccugguccggggccugccccagggguucagcgcccucgagccccugguggaccugcccaucggcaucaacaucacccgcuuccagacccuccacaucuccuaccucacgccgggggacagcagcuccggcuggaccgcgggcgccgccgccuacuacgugggguaccugcagccccgcaccuuccugcucaaguacaacgagaacggcaccaucacggacgcggucgacugcgcccuggacccccugagcgagaccaagugcacccucaaguccuucaccguggagaaggggaucuaccagacgagcaacuuccgggugcagcccaccgaguccaucguccgcuucccgaacaucaccaaccugugccccuucggcgagguguucaacgccacccgguucgccagcgucuacgccuggaaccgcaagcggaucuccaacugcguggcggacuacagcgugcuguacaacuccgccagcuucuccacguucaagugcuacggcgucagccccaccaagcucaacgaccugugcuucaccaacguguacgccgacuccuucgugauccgcggggacgagguccggcagaucgcccccggccagaccgggaacaucgccgacuacaacuacaagcugccggacgacuucacgggcugcgugaucgcguggaacagcaacaaccucgacuccaaggucgggggcaacuacaacuaccuguaccgccuguuccgcaagagcaaccucaagcccuucgagcgggacaucuccaccgagaucuaccaggccggcagcacccccugcaacggggugaagggcuucaacugcuacuucccccugcaguccuacggguuccagccgaccuacggcgugggguaccagcccuaccggguggucgugcugagcuucgagcuccugcacgcccccgccacggugugcggccccaagaaguccaccaaccuggucaagaacaagugcgugaacuucaacuucaacggccucaccgggaccggcgugcugaccgagagcaacaagaaguuccugccguuccagcaguucgggcgcgacaucgccgacacgaccgacgcgguccgcgacccccagacccuggagauccucgacaucacccccugcagcuucggcgggguguccgugaucacgccgggcaccaacaccagcaaccaggucgccgugcuguaccagggcgugaacugcaccgagguccccguggccauccacgccgaccagcugacgcccaccuggcggguguacuccaccggcagcaacgucuuccagacccgcgccgggugccucaucggcgcggagcacgugaacaacuccuacgagugcgacauccccaucggggccggcaucugcgccagcuaccagacgcagaccaacuccccgcggcgcgcccggagcguggcgucccagagcaucaucgccuacaccaugucccugggcguggagaacagcgucgccuacuccaacaacagcaucgccauccccaccaacuucacgaucuccgugaccaccgagauccugcccgugagcaugaccaagacgagcgucgacugcaccauguacaucugcggggacuccaccgagugcagcaaccuccugcugcaguacggcuccuucugcacccagcucaaccgcgcgcugacggggaucgccguggagcaggacaagaacacccaggagguguucgcccaggucaagcagaucuacaagacgcccccgaucaaggacuucggcggguucaacuucagccagauccugcccgaccccuccaagcccagcaagcgguccuucaucgaggaccuccuguucaacaaggugacccuggccgacgccggcuucaucaagcaguacggcgacugccucggggacaucgcggcccgcgaccugaucugcgcccagaaguucaacggccugaccgugcucccgccccugcugaccgacgagaugaucgcccaguacaccagcgcccuccuggcggggaccaucacguccggcuggaccuucggggccggcgccgcccugcagauccccuucgcgaugcagauggccuaccgguucaacggcaucggggucacccagaacgugcucuacgagaaccagaagcugaucgccaaccaguucaacagcgccaucggcaagauccaggacucccugagcuccaccgccagcgcgcucgggaagcugcaggacguggucaaccagaacgcccaggcccugaacacgcucgugaagcagcuguccagcaacuucggcgccaucuccagcgugcugaacgacauccucucccgccuggacccgcccgaggccgaggugcagaucgaccggcugaucaccgggcgccuccagagccugcagaccuacgugacccagcagcugauccgggcggccgagauccgcgccagcgccaaccucgccgcgaccaagauguccgagugcguccugggccagagcaagcggguggacuucugcggcaagggguaccaccugauguccuucccccagagcgccccgcacggcguggucuuccuccacgugacguacguccccgcccaggagaagaacuucaccaccgcccccgcgaucugccacgacgggaaggcccacuucccccgcgagggcguguucguguccaacgggacccacugguucgucacgcagcggaacuucuacgagccgcagaucaucaccaccgacaacaccuucgugagcggcaacugcgacguggucaucggcaucgugaacaacacgguguacgacccccugcagcccgagcuggacuccuucaaggaggagcucgacaaguacuucaagaaccacaccagccccgacgucgaccugggggacaucuccggcaucaacgccagcguggugaacauccagaaggagaucgaccgccugaacgaggucgccaagaaccucaacgagucccugaucgaccugcaggagcucgggaaguacgagcaguacaucaaguggccgugguacaucuggcugggcuucaucgccggccugaucgcgaucgugauggugaccaucaugcucugcugcaugaccagcugcugcuccugccugaaggggugcugcagcugcggcuccugcugcaaguucgacgaggacgacagcgagcccguccugaagggggugaagcuccacuacacgugaggacuaguguccaccugucccuccugggcugcuggauugucucguuuuccugccaaauaaacaggaucagcgcuuuacagaucucaaaggcucuuuucagagccaccaaaaaaaaaaaaaaaaaaaaaaaaaaaaaaaaaaaaaaaaaaaaaaaaaaaaaaaaaaaaaaaaaaaaaaaaaaaaaaaaaaaaaaaaaaaaaaaaaaaaa

SEQ ID NO: 23972 - RNA, 4129 nt, Artificial Sequence
  SARS-CoV-2/Wuhan/WIV05/2019__EPI_ISL_402128 spike protein mRNA gc (1-1273)(K986P_V987P_K986P_V987P_E484K_D614G)
aggagacccgugacccggaaguuguacggcuacgcgacuuucccucccacaaacccucgcgcccuuccuuuccuacuugggcccggcagaaagcuuaccauguucguguuccugguccuccugccccuggugagcucccagugcgugaaccucaccacccgcacgcagcugccgcccgccuacaccaacagcuucacccggggcgucuacuaccccgacaagguguuccgcuccagcgugcugcacuccacccaggaccucuuccugcccuucuucagcaacgucacgugguuccacgccauccacguguccgggaccaacggcaccaagcgguucgacaacccggugcugcccuucaacgacggggucuacuucgcgagcaccgagaaguccaacaucauccgcggcuggaucuucgggacgacccucgacagcaagacccagucccugcugaucgugaacaacgccaccaacguggucaucaaggugugcgaguuccaguucugcaacgaccccuuccucggcguguacuaccacaagaacaacaagagcuggauggaguccgaguuccgggucuacagcuccgccaacaacugcacguucgaguacgugagccagcccuuccugauggaccuggagggcaagcaggggaacuucaagaaccuccgcgaguucguguucaagaacaucgacggcuacuucaagaucuacuccaagcacaccccgaucaaccugguccgggaccugccccagggguucagcgcccucgagccccugguggaccugcccaucggcaucaacaucacccgcuuccagacccuccuggcccugcaccgguccuaccucacgccgggggacagcagcuccggcuggaccgcgggcgccgccgccuacuacgugggguaccugcagccccgcaccuuccugcucaaguacaacgagaacggcaccaucacggacgcggucgacugcgcccuggacccccugagcgagaccaagugcacccucaaguccuucaccguggagaaggggaucuaccagacgagcaacuuccgggugcagcccaccgaguccaucguccgcuucccgaacaucaccaaccugugccccuucggcgagguguucaacgccacccgguucgccagcgucuacgccuggaaccgcaagcggaucuccaacugcguggcggacuacagcgugcuguacaacuccgccagcuucuccacguucaagugcuacggcgucagccccaccaagcucaacgaccugugcuucaccaacguguacgccgacuccuucgugauccgcggggacgagguccggcagaucgcccccggccagaccgggaagaucgccgacuacaacuacaagcugccggacgacuucacgggcugcgugaucgcguggaacagcaacaaccucgacuccaaggucgggggcaacuacaacuaccuguaccgccuguuccgcaagagcaaccucaagcccuucgagcgggacaucuccaccgagaucuaccaggccggcagcacccccugcaacggggugaagggcuucaacugcuacuucccccugcaguccuacggguuccagccgaccaacggcgugggguaccagcccuaccggguggucgugcugagcuucgagcuccugcacgcccccgccacggugugcggccccaagaaguccaccaaccuggucaagaacaagugcgugaacuucaacuucaacggccucaccgggaccggcgugcugaccgagagcaacaagaaguuccugccguuccagcaguucgggcgcgacaucgccgacacgaccgacgcgguccgcgacccccagacccuggagauccucgacaucacccccugcagcuucggcgggguguccgugaucacgccgggcaccaacaccagcaaccaggucgccgugcuguaccagggcgugaacugcaccgagguccccguggccauccacgccgaccagcugacgcccaccuggcggguguacuccaccggcagcaacgucuuccagacccgcgccgggugccucaucggcgcggagcacgugaacaacuccuacgagugcgacauccccaucggggccggcaucugcgccagcuaccagacgcagaccaacuccccgcggcgcgcccggagcguggcgucccagagcaucaucgccuacaccaugucccugggcgccgagaacagcgucgccuacuccaacaacagcaucgccauccccaccaacuucacgaucuccgugaccaccgagauccugcccgugagcaugaccaagacgagcgucgacugcaccauguacaucugcggggacuccaccgagugcagcaaccuccugcugcaguacggcuccuucugcacccagcucaaccgcgcgcugacggggaucgccguggagcaggacaagaacacccaggagguguucgcccaggucaagcagaucuacaagacgcccccgaucaaggacuucggcggguucaacuucagccagauccugcccgaccccuccaagcccagcaagcgguccuucaucgaggaccuccuguucaacaaggugacccuggccgacgccggcuucaucaagcaguacggcgacugccucggggacaucgcggcccgcgaccugaucugcgcccagaaguucaacggccugaccgugcucccgccccugcugaccgacgagaugaucgcccaguacaccagcgcccuccuggcggggaccaucacguccggcuggaccuucggggccggcgccgcccugcagauccccuucgcgaugcagauggccuaccgguucaacggcaucggggucacccagaacgugcucuacgagaaccagaagcugaucgccaaccaguucaacagcgccaucggcaagauccaggacucccugagcuccaccgccagcgcgcucgggaagcugcaggacguggucaaccagaacgcccaggcccugaacacgcucgugaagcagcuguccagcaacuucggcgccaucuccagcgugcugaacgacauccucucccgccuggacccgcccgaggccgaggugcagaucgaccggcugaucaccgggcgccuccagagccugcagaccuacgugacccagcagcugauccgggcggccgagauccgcgccagcgccaaccucgccgcgaccaagauguccgagugcguccugggccagagcaagcggguggacuucugcggcaagggguaccaccugauguccuucccccagagcgccccgcacggcguggucuuccuccacgugacguacguccccgcccaggagaagaacuucaccaccgcccccgcgaucugccacgacgggaaggcccacuucccccgcgagggcguguucguguccaacgggacccacugguucgucacgcagcggaacuucuacgagccgcagaucaucaccaccgacaacaccuucgugagcggcaacugcgacguggucaucggcaucgugaacaacacgguguacgacccccugcagcccgagcuggacuccuucaaggaggagcucgacaaguacuucaagaaccacaccagccccgacgucgaccugggggacaucuccggcaucaacgccagcguggugaacauccagaaggagaucgaccgccugaacgaggucgccaagaaccucaacgagucccugaucgaccugcaggagcucgggaaguacgagcaguacaucaaguggccgugguacaucuggcugggcuucaucgccggccugaucgcgaucgugauggugaccaucaugcucugcugcaugaccagcugcugcuccugccugaaggggugcugcagcugcggcuccugcugcaaguucgacgaggacgacagcgagcccguccugaagggggugaagcuccacuacacgugaggacuaguguccaccugucccuccugggcugcuggauugucucguuuuccugccaaauaaacaggaucagcgcuuuacagaucucaaaggcucuuuucagagccaccaaaaaaaaaaaaaaaaaaaaaaaaaaaaaaaaaaaaaaaaaaaaaaaaaaaaaaaaaaaaaaaaaaaaaaaaaaaaaaaaaaaaaaaaaaaaaaaaaaaaa

SEQ ID NO: 23973 - RNA, 4129 nt, Artificial Sequence
  SARS-CoV-2/Wuhan/WIV05/2019__EPI_ISL_402128 spike protein mRNA gc (1-1273)(K986P_V987P_K986P_V987P_L18F_T20N_P26S_D138Y_R190S_K417T _E484K_N501Y_D614G_H655Y_T1027I)
aggagacccgugacccggaaguuguacggcuacgcgacuuucccucccacaaacccucgcgcccuuccuuuccuacuugggcccggcagaaagcuuaccauguucguguuccugguccuccugccccuggugagcucccagugcgugaacuucaccaaccgcacgcagcugccgagcgccuacaccaacagcuucacccggggcgucuacuaccccgacaagguguuccgcuccagcgugcugcacuccacccaggaccucuuccugcccuucuucagcaacgucacgugguuccacgccauccacguguccgggaccaacggcaccaagcgguucgacaacccggugcugcccuucaacgacggggucuacuucgcgagcaccgagaaguccaacaucauccgcggcuggaucuucgggacgacccucgacagcaagacccagucccugcugaucgugaacaacgccaccaacguggucaucaaggugugcgaguuccaguucugcaacuaccccuuccucggcguguacuaccacaagaacaacaagagcuggauggaguccgaguuccgggucuacagcuccgccaacaacugcacguucgaguacgugagccagcccuuccugauggaccuggagggcaagcaggggaacuucaagaaccucagcgaguucguguucaagaacaucgacggcuacuucaagaucuacuccaagcacaccccgaucaaccugguccgggaccugccccagggguucagcgcccucgagccccugguggaccugcccaucggcaucaacaucacccgcuuccagacccuccuggcccugcaccgguccuaccucacgccgggggacagcagcuccggcuggaccgcgggcgccgccgccuacuacgugggguaccugcagccccgcaccuuccugcucaaguacaacgagaacggcaccaucacggacgcggucgacugcgcccuggacccccugagcgagaccaagugcacccucaaguccuucaccguggagaaggggaucuaccagacgagcaacuuccgggugcagcccaccgaguccaucguccgcuucccgaacaucaccaaccugugccccuucggcgagguguucaacgccacccgguucgccagcgucuacgccuggaaccgcaagcggaucuccaacugcguggcggacuacagcgugcuguacaacuccgccagcuucuccacguucaagugcuacggcgucagccccaccaagcucaacgaccugugcuucaccaacguguacgccgacuccuucgugauccgcggggacgagguccggcagaucgcccccggccagaccgggaccaucgccgacuacaacuacaagcugccggacgacuucacgggcugcgugaucgcguggaacagcaacaaccucgacuccaaggucgggggcaacuacaacuaccuguaccgccuguuccgcaagagcaaccucaagcccuucgagcgggacaucuccaccgagaucuaccaggccggcagcacccccugcaacggggugaagggcuucaacugcuacuucccccugcaguccuacggguuccagccgaccuacggcgugggguaccagcccuaccggguggucgugcugagcuucgagcuccugcacgcccccgccacggugugcggccccaagaaguccaccaaccuggucaagaacaagugcgugaacuucaacuucaacggccucaccgggaccggcgugcugaccgagagcaacaagaaguuccugccguuccagcaguucgggcgcgacaucgccgacacgaccgacgcgguccgcgacccccagacccuggagauccucgacaucacccccugcagcuucggcgggguguccgugaucacgccgggcaccaacaccagcaaccaggucgccgugcuguaccagggcgugaacugcaccgagguccccguggccauccacgccgaccagcugacgcccaccuggcggguguacuccaccggcagcaacgucuuccagacccgcgccgggugccucaucggcgcggaguacgugaacaacuccuacgagugcgacauccccaucggggccggcaucugcgccagcuaccagacgcagaccaacuccccgcggcgcgcccggagcguggcgucccagagcaucaucgccuacaccaugucccugggcgccgagaacagcgucgccuacuccaacaacagcaucgccauccccaccaacuucacgaucuccgugaccaccgagauccugcccgugagcaugaccaagacgagcgucgacugcaccauguacaucugcggggacuccaccgagugcagcaaccuccugcugcaguacggcuccuucugcacccagcucaaccgcgcgcugacggggaucgccguggagcaggacaagaacacccaggagguguucgcccaggucaagcagaucuacaagacgcccccgaucaaggacuucggcggguucaacuucagccagauccugcccgaccccuccaagcccagcaagcgguccuucaucgaggaccuccuguucaacaaggugacccuggccgacgccggcuucaucaagcaguacggcgacugccucggggacaucgcggcccgcgaccugaucugcgcccagaaguucaacggccugaccgugcucccgccccugcugaccgacgagaugaucgcccaguacaccagcgcccuccuggcggggaccaucacguccggcuggaccuucggggccggcgccgcccugcagauccccuucgcgaugcagauggccuaccgguucaacggcaucggggucacccagaacgugcucuacgagaaccagaagcugaucgccaaccaguucaacagcgccaucggcaagauccaggacucccugagcuccaccgccagcgcgcucgggaagcugcaggacguggucaaccagaacgcccaggcccugaacacgcucgugaagcagcuguccagcaacuucggcgccaucuccagcgugcugaacgacauccucucccgccuggacccgcccgaggccgaggugcagaucgaccggcugaucaccgggcgccuccagagccugcagaccuacgugacccagcagcugauccgggcggccgagauccgcgccagcgccaaccucgccgcgaucaagauguccgagugcguccugggccagagcaagcggguggacuucugcggcaagggguaccaccugauguccuucccccagagcgccccgcacggcguggucuuccuccacgugacguacguccccgcccaggagaagaacuucaccaccgcccccgcgaucugccacgacgggaaggcccacuucccccgcgagggcguguucguguccaacgggacccacugguucgucacgcagcggaacuucuacgagccgcagaucaucaccaccgacaacaccuucgugagcggcaacugcgacguggucaucggcaucgugaacaacacgguguacgacccccugcagcccgagcuggacuccuucaaggaggagcucgacaaguacuucaagaaccacaccagccccgacgucgaccugggggacaucuccggcaucaacgccagcguggugaacauccagaaggagaucgaccgccugaacgaggucgccaagaaccucaacgagucccugaucgaccugcaggagcucgggaaguacgagcaguacaucaaguggccgugguacaucuggcugggcuucaucgccggccugaucgcgaucgugauggugaccaucaugcucugcugcaugaccagcugcugcuccugccugaaggggugcugcagcugcggcuccugcugcaaguucgacgaggacgacagcgagcccguccugaagggggugaagcuccacuacacgugaggacuaguguccaccugucccuccugggcugcuggauugucucguuuuccugccaaauaaacaggaucagcgcuuuacagaucucaaaggcucuuuucagagccaccaaaaaaaaaaaaaaaaaaaaaaaaaaaaaaaaaaaaaaaaaaaaaaaaaaaaaaaaaaaaaaaaaaaaaaaaaaaaaaaaaaaaaaaaaaaaaaaaaaaaa

SEQ ID NO: 23974 - RNA, 4129 nt, Artificial Sequence
  SARS-CoV-2/Wuhan/WIV05/2019__EPI_ISL_402128 spike protein mRNA gc (1-1273)(K986P_V987P_K986P_V987P_S13I_W152C_L452R_D614G)
aggagacccgugacccggaaguuguacggcuacgcgacuuucccucccacaaacccucgcgcccuuccuuuccuacuugggcccggcagaaagcuuaccauguucguguuccugguccuccugccccuggugagcauccagugcgugaaccucaccacccgcacgcagcugccgcccgccuacaccaacagcuucacccggggcgucuacuaccccgacaagguguuccgcuccagcgugcugcacuccacccaggaccucuuccugcccuucuucagcaacgucacgugguuccacgccauccacguguccgggaccaacggcaccaagcgguucgacaacccggugcugcccuucaacgacggggucuacuucgcgagcaccgagaaguccaacaucauccgcggcuggaucuucgggacgacccucgacagcaagacccagucccugcugaucgugaacaacgccaccaacguggucaucaaggugugcgaguuccaguucugcaacgaccccuuccucggcguguacuaccacaagaacaacaagagcugcauggaguccgaguuccgggucuacagcuccgccaacaacugcacguucgaguacgugagccagcccuuccugauggaccuggagggcaagcaggggaacuucaagaaccuccgcgaguucguguucaagaacaucgacggcuacuucaagaucuacuccaagcacaccccgaucaaccugguccgggaccugccccagggguucagcgcccucgagccccugguggaccugcccaucggcaucaacaucacccgcuuccagacccuccuggcccugcaccgguccuaccucacgccgggggacagcagcuccggcuggaccgcgggcgccgccgccuacuacgugggguaccugcagccccgcaccuuccugcucaaguacaacgagaacggcaccaucacggacgcggucgacugcgcccuggacccccugagcgagaccaagugcacccucaaguccuucaccguggagaaggggaucuaccagacgagcaacuuccgggugcagcccaccgaguccaucguccgcuucccgaacaucaccaaccugugccccuucggcgagguguucaacgccacccgguucgccagcgucuacgccuggaaccgcaagcggaucuccaacugcguggcggacuacagcgugcuguacaacuccgccagcuucuccacguucaagugcuacggcgucagccccaccaagcucaacgaccugugcuucaccaacguguacgccgacuccuucgugauccgcggggacgagguccggcagaucgcccccggccagaccgggaagaucgccgacuacaacuacaagcugccggacgacuucacgggcugcgugaucgcguggaacagcaacaaccucgacuccaaggucgggggcaacuacaacuaccgcuaccgccuguuccgcaagagcaaccucaagcccuucgagcgggacaucuccaccgagaucuaccaggccggcagcacccccugcaacgggguggagggcuucaacugcuacuucccccugcaguccuacggguuccagccgaccaacggcgugggguaccagcccuaccggguggucgugcugagcuucgagcuccugcacgcccccgccacggugugcggccccaagaaguccaccaaccuggucaagaacaagugcgugaacuucaacuucaacggccucaccgggaccggcgugcugaccgagagcaacaagaaguuccugccguuccagcaguucgggcgcgacaucgccgacacgaccgacgcgguccgcgacccccagacccuggagauccucgacaucacccccugcagcuucggcgggguguccgugaucacgccgggcaccaacaccagcaaccaggucgccgugcuguaccagggcgugaacugcaccgagguccccguggccauccacgccgaccagcugacgcccaccuggcggguguacuccaccggcagcaacgucuuccagacccgcgccgggugccucaucggcgcggagcacgugaacaacuccuacgagugcgacauccccaucggggccggcaucugcgccagcuaccagacgcagaccaacuccccgcggcgcgcccggagcguggcgucccagagcaucaucgccuacaccaugucccugggcgccgagaacagcgucgccuacuccaacaacagcaucgccauccccaccaacuucacgaucuccgugaccaccgagauccugcccgugagcaugaccaagacgagcgucgacugcaccauguacaucugcggggacuccaccgagugcagcaaccuccugcugcaguacggcuccuucugcacccagcucaaccgcgcgcugacggggaucgccguggagcaggacaagaacacccaggagguguucgcccaggucaagcagaucuacaagacgcccccgaucaaggacuucggcggguucaacuucagccagauccugcccgaccccuccaagcccagcaagcgguccuucaucgaggaccuccuguucaacaaggugacccuggccgacgccggcuucaucaagcaguacggcgacugccucggggacaucgcggcccgcgaccugaucugcgcccagaaguucaacggccugaccgugcucccgccccugcugaccgacgagaugaucgcccaguacaccagcgcccuccuggcggggaccaucacguccggcuggaccuucggggccggcgccgcccugcagauccccuucgcgaugcagauggccuaccgguucaacggcaucggggucacccagaacgugcucuacgagaaccagaagcugaucgccaaccaguucaacagcgccaucggcaagauccaggacucccugagcuccaccgccagcgcgcucgggaagcugcaggacguggucaaccagaacgcccaggcccugaacacgcucgugaagcagcuguccagcaacuucggcgccaucuccagcgugcugaacgacauccucucccgccuggacccgcccgaggccgaggugcagaucgaccggcugaucaccgggcgccuccagagccugcagaccuacgugacccagcagcugauccgggcggccgagauccgcgccagcgccaaccucgccgcgaccaagauguccgagugcguccugggccagagcaagcggguggacuucugcggcaagggguaccaccugauguccuucccccagagcgccccgcacggcguggucuuccuccacgugacguacguccccgcccaggagaagaacuucaccaccgcccccgcgaucugccacgacgggaaggcccacuucccccgcgagggcguguucguguccaacgggacccacugguucgucacgcagcggaacuucuacgagccgcagaucaucaccaccgacaacaccuucgugagcggcaacugcgacguggucaucggcaucgugaacaacacgguguacgacccccugcagcccgagcuggacuccuucaaggaggagcucgacaaguacuucaagaaccacaccagccccgacgucgaccugggggacaucuccggcaucaacgccagcguggugaacauccagaaggagaucgaccgccugaacgaggucgccaagaaccucaacgagucccugaucgaccugcaggagcucgggaaguacgagcaguacaucaaguggccgugguacaucuggcugggcuucaucgccggccugaucgcgaucgugauggugaccaucaugcucugcugcaugaccagcugcugcuccugccugaaggggugcugcagcugcggcuccugcugcaaguucgacgaggacgacagcgagcccguccugaagggggugaagcuccacuacacgugaggacuaguguccaccugucccuccugggcugcuggauugucucguuuuccugccaaauaaacaggaucagcgcuuuacagaucucaaaggcucuuuucagagccaccaaaaaaaaaaaaaaaaaaaaaaaaaaaaaaaaaaaaaaaaaaaaaaaaaaaaaaaaaaaaaaaaaaaaaaaaaaaaaaaaaaaaaaaaaaaaaaaaaaaaa

SEQ ID NO: 23975 - RNA, 4129 nt, Artificial Sequence
  SARS-CoV-2/Wuhan/WIV05/2019__EPI_ISL_402128 spike protein mRNA gc (1-1273)(K986P_V987P)
aggagacccgugacccggaaguuguacggcuacgcgacuuucccucccacaaacccucgcgcccuuccuuuccuacuugggcccggcagaaagcuuaccauguucguguuccugguccuccugccccuggugagcucccagugcgugaaccucaccacccgcacgcagcugccgcccgccuacaccaacagcuucacccggggcgucuacuaccccgacaagguguuccgcuccagcgugcugcacuccacccaggaccucuuccugcccuucuucagcaacgucacgugguuccacgccauccacguguccgggaccaacggcaccaagcgguucgacaacccggugcugcccuucaacgacggggucuacuucgcgagcaccgagaaguccaacaucauccgcggcuggaucuucgggacgacccucgacagcaagacccagucccugcugaucgugaacaacgccaccaacguggucaucaaggugugcgaguuccaguucugcaacgaccccuuccucggcguguacuaccacaagaacaacaagagcuggauggaguccgaguuccgggucuacagcuccgccaacaacugcacguucgaguacgugagccagcccuuccugauggaccuggagggcaagcaggggaacuucaagaaccuccgcgaguucguguucaagaacaucgacggcuacuucaagaucuacuccaagcacaccccgaucaaccugguccgggaccugccccagggguucagcgcccucgagccccugguggaccugcccaucggcaucaacaucacccgcuuccagacccuccuggcccugcaccgguccuaccucacgccgggggacagcagcuccggcuggaccgcgggcgccgccgccuacuacgugggguaccugcagccccgcaccuuccugcucaaguacaacgagaacggcaccaucacggacgcggucgacugcgcccuggacccccugagcgagaccaagugcacccucaaguccuucaccguggagaaggggaucuaccagacgagcaacuuccgggugcagcccaccgaguccaucguccgcuucccgaacaucaccaaccugugccccuucggcgagguguucaacgccacccgguucgccagcgucuacgccuggaaccgcaagcggaucuccaacugcguggcggacuacagcgugcuguacaacuccgccagcuucuccacguucaagugcuacggcgucagccccaccaagcucaacgaccugugcuucaccaacguguacgccgacuccuucgugauccgcggggacgagguccggcagaucgcccccggccagaccgggaagaucgccgacuacaacuacaagcugccggacgacuucacgggcugcgugaucgcguggaacagcaacaaccucgacuccaaggucgggggcaacuacaacuaccuguaccgccuguuccgcaagagcaaccucaagcccuucgagcgggacaucuccaccgagaucuaccaggccggcagcacccccugcaacgggguggagggcuucaacugcuacuucccccugcaguccuacggguuccagccgaccaacggcgugggguaccagcccuaccggguggucgugcugagcuucgagcuccugcacgcccccgccacggugugcggccccaagaaguccaccaaccuggucaagaacaagugcgugaacuucaacuucaacggccucaccgggaccggcgugcugaccgagagcaacaagaaguuccugccguuccagcaguucgggcgcgacaucgccgacacgaccgacgcgguccgcgacccccagacccuggagauccucgacaucacccccugcagcuucggcgggguguccgugaucacgccgggcaccaacaccagcaaccaggucgccgugcuguaccaggacgugaacugcaccgagguccccguggccauccacgccgaccagcugacgcccaccuggcggguguacuccaccggcagcaacgucuuccagacccgcgccgggugccucaucggcgcggagcacgugaacaacuccuacgagugcgacauccccaucggggccggcaucugcgccagcuaccagacgcagaccaacuccccgcggcgcgcccggagcguggcgucccagagcaucaucgccuacaccaugucccugggcgccgagaacagcgucgccuacuccaacaacagcaucgccauccccaccaacuucacgaucuccgugaccaccgagauccugcccgugagcaugaccaagacgagcgucgacugcaccauguacaucugcggggacuccaccgagugcagcaaccuccugcugcaguacggcuccuucugcacccagcucaaccgcgcgcugacggggaucgccguggagcaggacaagaacacccaggagguguucgcccaggucaagcagaucuacaagacgcccccgaucaaggacuucggcggguucaacuucagccagauccugcccgaccccuccaagcccagcaagcgguccuucaucgaggaccuccuguucaacaaggugacccuggccgacgccggcuucaucaagcaguacggcgacugccucggggacaucgcggcccgcgaccugaucugcgcccagaaguucaacggccugaccgugcucccgccccugcugaccgacgagaugaucgcccaguacaccagcgcccuccuggcggggaccaucacguccggcuggaccuucggggccggcgccgcccugcagauccccuucgcgaugcagauggccuaccgguucaacggcaucggggucacccagaacgugcucuacgagaaccagaagcugaucgccaaccaguucaacagcgccaucggcaagauccaggacucccugagcuccaccgccagcgcgcucgggaagcugcaggacguggucaaccagaacgcccaggcccugaacacgcucgugaagcagcuguccagcaacuucggcgccaucuccagcgugcugaacgacauccucucccgccuggacccgcccgaggccgagguccagaucgaccggcugaucaccgggcgccuccagagccugcagaccuacgugacccagcagcugauccgggcggccgagauccgcgccagcgccaaccucgccgcgaccaagauguccgagugcgugcugggccagagcaagcgggucgacuucugcggcaagggguaccaccugauguccuucccccagagcgcgccccacggcgugguguuccuccacgucacguacgugcccgcccaggagaagaacuucaccaccgccccggccaucugccacgacgggaaggcccacuucccccgcgagggcgucuucguguccaacgggacccacugguucgugacgcagcggaacuucuacgagccccagaucaucaccaccgacaacaccuucgucagcggcaacugcgacguggugaucggcaucgucaacaacacgguguacgacccccugcagccggagcuggacuccuucaaggaggagcucgacaaguacuucaagaaccacaccagccccgacguggaccugggggacaucuccggcaucaacgccagcgucgugaacauccagaaggagaucgaccgccugaacgagguggccaagaaccucaacgagucccugaucgaccugcaggagcucgggaaguacgagcaguacaucaaguggcccugguacaucuggcugggcuucaucgccggccugaucgcgaucgucauggugaccaucaugcucugcugcaugaccagcugcugcuccugccugaaggggugcugcagcugcggcuccugcugcaaguucgacgaggacgacagcgagccggugcugaagggggucaagcuccacuacacgugaggacuaguguccaccugucccuccugggcugcuggauugucucguuuuccugccaaauaaacaggaucagcgcuuuacagaucucaaaggcucuuuucagagccaccaaaaaaaaaaaaaaaaaaaaaaaaaaaaaaaaaaaaaaaaaaaaaaaaaaaaaaaaaaaaaaaaaaaaaaaaaaaaaaaaaaaaaaaaaaaaaaaaaaaaa

SEQ ID NO: 23976 - RNA, 4129 nt, Artificial Sequence
  SARS-CoV-2/Wuhan/WIV05/2019__EPI_ISL_402128 spike protein mRNA gc (1-1273)(K986P_V987P_ D614G)
aggagacccgugacccggaaguuguacggcuacgcgacuuucccucccacaaacccucgcgcccuuccuuuccuacuugggcccggcagaaagcuuaccauguucguguuccugguccuccugccccuggugagcucccagugcgugaaccucaccacccgcacgcagcugccgcccgccuacaccaacagcuucacccggggcgucuacuaccccgacaagguguuccgcuccagcgugcugcacuccacccaggaccucuuccugcccuucuucagcaacgucacgugguuccacgccauccacguguccgggaccaacggcaccaagcgguucgacaacccggugcugcccuucaacgacggggucuacuucgcgagcaccgagaaguccaacaucauccgcggcuggaucuucgggacgacccucgacagcaagacccagucccugcugaucgugaacaacgccaccaacguggucaucaaggugugcgaguuccaguucugcaacgaccccuuccucggcguguacuaccacaagaacaacaagagcuggauggaguccgaguuccgggucuacagcuccgccaacaacugcacguucgaguacgugagccagcccuuccugauggaccuggagggcaagcaggggaacuucaagaaccuccgcgaguucguguucaagaacaucgacggcuacuucaagaucuacuccaagcacaccccgaucaaccugguccgggaccugccccagggguucagcgcccucgagccccugguggaccugcccaucggcaucaacaucacccgcuuccagacccuccuggcccugcaccgguccuaccucacgccgggggacagcagcuccggcuggaccgcgggcgccgccgccuacuacgugggguaccugcagccccgcaccuuccugcucaaguacaacgagaacggcaccaucacggacgcggucgacugcgcccuggacccccugagcgagaccaagugcacccucaaguccuucaccguggagaaggggaucuaccagacgagcaacuuccgggugcagcccaccgaguccaucguccgcuucccgaacaucaccaaccugugccccuucggcgagguguucaacgccacccgguucgccagcgucuacgccuggaaccgcaagcggaucuccaacugcguggcggacuacagcgugcuguacaacuccgccagcuucuccacguucaagugcuacggcgucagccccaccaagcucaacgaccugugcuucaccaacguguacgccgacuccuucgugauccgcggggacgagguccggcagaucgcccccggccagaccgggaagaucgccgacuacaacuacaagcugccggacgacuucacgggcugcgugaucgcguggaacagcaacaaccucgacuccaaggucgggggcaacuacaacuaccuguaccgccuguuccgcaagagcaaccucaagcccuucgagcgggacaucuccaccgagaucuaccaggccggcagcacccccugcaacgggguggagggcuucaacugcuacuucccccugcaguccuacggguuccagccgaccaacggcgugggguaccagcccuaccggguggucgugcugagcuucgagcuccugcacgcccccgccacggugugcggccccaagaaguccaccaaccuggucaagaacaagugcgugaacuucaacuucaacggccucaccgggaccggcgugcugaccgagagcaacaagaaguuccugccguuccagcaguucgggcgcgacaucgccgacacgaccgacgcgguccgcgacccccagacccuggagauccucgacaucacccccugcagcuucggcgggguguccgugaucacgccgggcaccaacaccagcaaccaggucgccgugcuguaccagggcgugaacugcaccgagguccccguggccauccacgccgaccagcugacgcccaccuggcggguguacuccaccgggagcaacgucuuccagacccgcgccggcugccucaucggggcggagcacgugaacaacuccuacgagugcgacauccccaucggcgccggcaucugcgccagcuaccagacgcagaccaacuccccgcggcgcgcccggagcguggcgucccagagcaucaucgccuacaccaugucccugggggccgagaacagcgucgccuacuccaacaacagcaucgccauccccaccaacuucacgaucuccgugaccaccgagauccugcccgugagcaugaccaagacgagcgucgacugcaccauguacaucugcggcgacuccaccgagugcagcaaccuccugcugcaguacggguccuucugcacccagcucaaccgcgcgcugacgggcaucgccguggagcaggacaagaacacccaggagguguucgcccaggucaagcagaucuacaagacgcccccgaucaaggacuucgggggcuucaacuucagccagauccugcccgaccccuccaagcccagcaagcgguccuucaucgaggaccuccuguucaacaaggugacccuggccgacgccggcuucaucaagcaguacggggacugccucggcgacaucgcggcccgcgaccugaucugcgcccagaaguucaacgggcugaccgugcucccgccccugcugaccgacgagaugaucgcccaguacaccagcgcccuccuggcgggcaccaucacguccggguggaccuucggcgccggcgccgcccugcagauccccuucgcgaugcagauggccuaccgguucaacgggaucggcgucacccagaacgugcucuacgagaaccagaagcugaucgccaaccaguucaacagcgccaucgggaagauccaggacucccugagcuccaccgccagcgcgcucggcaagcugcaggacguggucaaccagaacgcccaggcccugaacacgcucgugaagcagcuguccagcaacuucggggccaucuccagcgugcugaacgacauccucucccgccuggacccgcccgaggccgagguccagaucgaccggcugaucaccggccgccuccagagccugcagaccuacgugacccagcagcugauccgggcggccgagauccgcgccagcgccaaccucgccgcgaccaagauguccgagugcgugcugggccagagcaagcgggucgacuucugcgggaagggcuaccaccugauguccuucccccagagcgcgccccacggggugguguuccuccacgucacguacgugcccgcccaggagaagaacuucaccaccgccccggccaucugccacgacggcaaggcccacuucccccgcgagggggucuucguguccaacggcacccacugguucgugacgcagcggaacuucuacgagccccagaucaucaccaccgacaacaccuucgucagcggcaacugcgacguggugaucgggaucgucaacaacacgguguacgacccccugcagccggagcuggacuccuucaaggaggagcucgacaaguacuucaagaaccacaccagccccgacguggaccugggcgacaucuccgggaucaacgccagcgucgugaacauccagaaggagaucgaccgccugaacgagguggccaagaaccucaacgagucccugaucgaccugcaggagcucggcaaguacgagcaguacaucaaguggcccugguacaucuggcugggcuucaucgccgggcugaucgcgaucgucauggugaccaucaugcucugcugcaugaccagcugcugcuccugccugaagggcugcugcagcugcggguccugcugcaaguucgacgaggacgacagcgagccggugcugaagggcgucaagcuccacuacacgugaggacuaguguccaccugucccuccugggcugcuggauugucucguuuuccugccaaauaaacaggaucagcgcuuuacagaucucaaaggcucuuuucagagccaccaaaaaaaaaaaaaaaaaaaaaaaaaaaaaaaaaaaaaaaaaaaaaaaaaaaaaaaaaaaaaaaaaaaaaaaaaaaaaaaaaaaaaaaaaaaaaaaaaaaaa

SEQ ID NO: 23977 - RNA, 4129 nt, Artificial Sequence
  SARS-CoV-2/Wuhan/WIV05/2019__EPI_ISL_402128 spike protein mRNA gc (1-1273)(K986P_V987P_A222V_D614G)
aggagacccgugacccggaaguuguacggcuacgcgacuuucccucccacaaacccucgcgcccuuccuuuccuacuugggcccggcagaaagcuuaccauguucguguuccugguccuccugccccuggugagcucccagugcgugaaccucaccacccgcacgcagcugccgcccgccuacaccaacagcuucacccggggcgucuacuaccccgacaagguguuccgcuccagcgugcugcacuccacccaggaccucuuccugcccuucuucagcaacgucacgugguuccacgccauccacguguccgggaccaacggcaccaagcgguucgacaacccggugcugcccuucaacgacggggucuacuucgcgagcaccgagaaguccaacaucauccgcggcuggaucuucgggacgacccucgacagcaagacccagucccugcugaucgugaacaacgccaccaacguggucaucaaggugugcgaguuccaguucugcaacgaccccuuccucggcguguacuaccacaagaacaacaagagcuggauggaguccgaguuccgggucuacagcuccgccaacaacugcacguucgaguacgugagccagcccuuccugauggaccuggagggcaagcaggggaacuucaagaaccuccgcgaguucguguucaagaacaucgacggcuacuucaagaucuacuccaagcacaccccgaucaaccugguccgggaccugccccagggguucagcgugcucgagccccugguggaccugcccaucggcaucaacaucacccgcuuccagacccuccuggcccugcaccgguccuaccucacgccgggggacagcagcuccggcuggaccgccggcgcggccgccuacuacgucggguaccugcagccccgcaccuuccugcucaaguacaacgagaacggcaccaucacggacgccguggacugcgcgcuggacccccugagcgagaccaagugcacccucaaguccuucaccguggagaaggggaucuaccagacgagcaacuuccggguccagcccaccgaguccaucgugcgcuucccgaacaucaccaaccugugccccuucggcgaggucuucaacgccacccgguucgccagcguguacgccuggaaccgcaagcggaucuccaacugcguggccgacuacagcguccuguacaacuccgcgagcuucuccacguucaagugcuacggcgugagccccaccaagcucaacgaccugugcuucaccaacguguacgccgacuccuucgucauccgcggggacgaggugcggcagaucgcccccggccagaccgggaagaucgccgacuacaacuacaagcugccggacgacuucacgggcugcgugaucgccuggaacagcaacaaccucgacuccaaggucgggggcaacuacaacuaccuguaccgccuguuccgcaagagcaaccucaagcccuucgagcgggacaucuccaccgagaucuaccaggcgggcagcacccccugcaacgggguggagggcuucaacugcuacuucccccugcaguccuacggguuccagccgaccaacggcgugggguaccagcccuaccgggucguggugcugagcuucgagcuccugcacgcccccgccacggucugcggccccaagaaguccaccaaccuggugaagaacaagugcgugaacuucaacuucaacggccucaccgggaccggcguccugaccgagagcaacaagaaguuccugccguuccagcaguucgggcgcgacaucgccgacacgaccgacgccgugcgcgacccccagacccuggagauccucgacaucacccccugcagcuucggcgggguguccgucaucacgccgggcaccaacaccagcaaccagguggcggugcuguaccagggcgucaacugcaccgaggugcccguggccauccacgccgaccagcugacgcccaccuggcgggucuacuccaccgggagcaacguguuccagacccgcgccggcugccucaucggggccgagcacgugaacaacuccuacgagugcgacauccccaucggcgcgggcaucugcgccagcuaccagacgcagaccaacuccccgcggcgcgcccggagcgucgccucccagagcaucaucgcguacaccaugucccugggggccgagaacagcguggccuacuccaacaacagcaucgccauccccaccaacuucacgaucuccgugaccaccgagauccugcccgucagcaugaccaagacgagcguggacugcaccauguacaucugcggcgacuccaccgagugcagcaaccuccugcugcaguacggguccuucugcacccagcucaaccgcgcccugacgggcaucgcgguggagcaggacaagaacacccaggaggucuucgcccaggugaagcagaucuacaagacgcccccgaucaaggacuucgggggcuucaacuucagccagauccugcccgaccccuccaagcccagcaagcgguccuucaucgaggaccuccuguucaacaaggugacccuggccgacgccggcuucaucaagcaguacggggacugccucggcgacaucgccgcgcgcgaccugaucugcgcccagaaguucaacgggcugaccguccucccgccccugcugaccgacgagaugaucgcccaguacaccagcgcccuccuggccggcaccaucacguccggguggaccuucggcgcgggcgccgcccugcagauccccuucgccaugcagauggcguaccgguucaacgggaucggcgugacccagaacgugcucuacgagaaccagaagcugaucgccaaccaguucaacagcgccaucgggaagauccaggacucccugagcuccaccgccagcgcccucggcaagcugcaggacgucgugaaccagaacgcgcaggcccugaacacgcucgugaagcagcuguccagcaacuucggggccaucuccagcguccugaacgacauccucucccgccuggacccgcccgaggccgaggugcagaucgaccggcugaucaccggccgccuccagagccugcagaccuacgugacccagcagcugauccgggccgcggagauccgcgccagcgccaaccucgccgccaccaagauguccgagugcguccugggccagagcaagcggguggacuucugcgggaagggcuaccaccugauguccuucccccagagcgcgccccacgggguggucuuccuccacgugacguacguccccgcccaggagaagaacuucaccaccgccccggccaucugccacgacggcaaggcgcacuucccccgcgaggggguguucguguccaacggcacccacugguucgucacgcagcggaacuucuacgagccccagaucaucaccaccgacaacaccuucgugagcggcaacugcgacguggucaucgggaucgugaacaacacgguguacgacccccugcagccggagcuggacuccuucaaggaggagcucgacaaguacuucaagaaccacaccagccccgacgucgaccugggcgacaucuccgggaucaacgccagcguggugaacauccagaaggagaucgaccgccugaacgaggucgccaagaaccucaacgagucccugaucgaccugcaggagcucggcaaguacgagcaguacaucaaguggcccugguacaucuggcugggcuucaucgccgggcugaucgccaucgugauggugaccaucaugcucugcugcaugaccagcugcugcuccugccugaagggcugcugcagcugcggguccugcugcaaguucgacgaggacgacagcgagccgguccugaagggcgugaagcuccacuacacgugaggacuaguguccaccugucccuccugggcugcuggauugucucguuuuccugccaaauaaacaggaucagcgcuuuacagaucucaaaggcucuuuucagagccaccaaaaaaaaaaaaaaaaaaaaaaaaaaaaaaaaaaaaaaaaaaaaaaaaaaaaaaaaaaaaaaaaaaaaaaaaaaaaaaaaaaaaaaaaaaaaaaaaaaaaa

SEQ ID NO: 23978 - RNA, 4129 nt, Artificial Sequence
  SARS-CoV-2/Wuhan/WIV05/2019__EPI_ISL_402128 spike protein mRNA gc (1-1273)(K986P_V987P_N439K_D614G)
aggagacccgugacccggaaguuguacggcuacgcgacuuucccucccacaaacccucgcgcccuuccuuuccuacuugggcccggcagaaagcuuaccauguucguguuccugguccuccugccccuggugagcucccagugcgugaaccucaccacccgcacgcagcugccgcccgccuacaccaacagcuucacccggggcgucuacuaccccgacaagguguuccgcuccagcgugcugcacuccacccaggaccucuuccugcccuucuucagcaacgucacgugguuccacgccauccacguguccgggaccaacggcaccaagcgguucgacaacccggugcugcccuucaacgacggggucuacuucgcgagcaccgagaaguccaacaucauccgcggcuggaucuucgggacgacccucgacagcaagacccagucccugcugaucgugaacaacgccaccaacguggucaucaaggugugcgaguuccaguucugcaacgaccccuuccucggcguguacuaccacaagaacaacaagagcuggauggaguccgaguuccgggucuacagcuccgccaacaacugcacguucgaguacgugagccagcccuuccugauggaccuggagggcaagcaggggaacuucaagaaccuccgcgaguucguguucaagaacaucgacggcuacuucaagaucuacuccaagcacaccccgaucaaccugguccgggaccugccccagggguucagcgcccucgagccccugguggaccugcccaucggcaucaacaucacccgcuuccagacccuccuggcccugcaccgguccuaccucacgccgggggacagcagcuccggcuggaccgcgggcgccgccgccuacuacgugggguaccugcagccccgcaccuuccugcucaaguacaacgagaacggcaccaucacggacgcggucgacugcgcccuggacccccugagcgagaccaagugcacccucaaguccuucaccguggagaaggggaucuaccagacgagcaacuuccgggugcagcccaccgaguccaucguccgcuucccgaacaucaccaaccugugccccuucggcgagguguucaacgccacccgguucgccagcgucuacgccuggaaccgcaagcggaucuccaacugcguggcggacuacagcgugcuguacaacuccgccagcuucuccacguucaagugcuacggcgucagccccaccaagcucaacgaccugugcuucaccaacguguacgccgacuccuucgugauccgcggggacgagguccggcagaucgcccccggccagaccgggaagaucgccgacuacaacuacaagcugccggacgacuucacgggcugcgugaucgcguggaacagcaagaaccucgacuccaaggucgggggcaacuacaacuaccuguaccgccuguuccgcaagagcaaccucaagcccuucgagcgggacaucuccaccgagaucuaccaggccggcagcacccccugcaacgggguggagggcuucaacugcuacuucccccugcaguccuacggguuccagccgaccaacggcgugggguaccagcccuaccggguggucgugcugagcuucgagcuccugcacgcccccgccacggugugcggccccaagaaguccaccaaccuggucaagaacaagugcgugaacuucaacuucaacggccucaccgggaccggcgugcugaccgagagcaacaagaaguuccugccguuccagcaguucgggcgcgacaucgccgacacgaccgacgcgguccgcgacccccagacccuggagauccucgacaucacccccugcagcuucggcgggguguccgugaucacgccgggcaccaacaccagcaaccaggucgccgugcuguaccagggcgugaacugcaccgagguccccguggccauccacgccgaccagcugacgcccaccuggcggguguacuccaccgggagcaacgucuuccagacccgcgccggcugccucaucggggcggagcacgugaacaacuccuacgagugcgacauccccaucggcgccggcaucugcgccagcuaccagacgcagaccaacuccccgcggcgcgcccggagcguggcgucccagagcaucaucgccuacaccaugucccugggggccgagaacagcgucgccuacuccaacaacagcaucgccauccccaccaacuucacgaucuccgugaccaccgagauccugcccgugagcaugaccaagacgagcgucgacugcaccauguacaucugcggcgacuccaccgagugcagcaaccuccugcugcaguacggguccuucugcacccagcucaaccgcgcgcugacgggcaucgccguggagcaggacaagaacacccaggagguguucgcccaggucaagcagaucuacaagacgcccccgaucaaggacuucgggggcuucaacuucagccagauccugcccgaccccuccaagcccagcaagcgguccuucaucgaggaccuccuguucaacaaggugacccuggccgacgccggcuucaucaagcaguacggggacugccucggcgacaucgcggcccgcgaccugaucugcgcccagaaguucaacgggcugaccgugcucccgccccugcugaccgacgagaugaucgcccaguacaccagcgcccuccuggcgggcaccaucacguccggguggaccuucggcgccggcgccgcccugcagauccccuucgcgaugcagauggccuaccgguucaacgggaucggcgucacccagaacgugcucuacgagaaccagaagcugaucgccaaccaguucaacagcgccaucgggaagauccaggacucccugagcuccaccgccagcgcgcucggcaagcugcaggacguggucaaccagaacgcccaggcccugaacacgcucgugaagcagcuguccagcaacuucggggccaucuccagcgugcugaacgacauccucucccgccuggacccgcccgaggccgagguccagaucgaccggcugaucaccggccgccuccagagccugcagaccuacgugacccagcagcugauccgggcggccgagauccgcgccagcgccaaccucgccgcgaccaagauguccgagugcgugcugggccagagcaagcgggucgacuucugcgggaagggcuaccaccugauguccuucccccagagcgcgccccacggggugguguuccuccacgucacguacgugcccgcccaggagaagaacuucaccaccgccccggccaucugccacgacggcaaggcccacuucccccgcgagggggucuucguguccaacggcacccacugguucgugacgcagcggaacuucuacgagccccagaucaucaccaccgacaacaccuucgucagcggcaacugcgacguggugaucgggaucgucaacaacacgguguacgacccccugcagccggagcuggacuccuucaaggaggagcucgacaaguacuucaagaaccacaccagccccgacguggaccugggcgacaucuccgggaucaacgccagcgucgugaacauccagaaggagaucgaccgccugaacgagguggccaagaaccucaacgagucccugaucgaccugcaggagcucggcaaguacgagcaguacaucaaguggcccugguacaucuggcugggcuucaucgccgggcugaucgcgaucgucauggugaccaucaugcucugcugcaugaccagcugcugcuccugccugaagggcugcugcagcugcggguccugcugcaaguucgacgaggacgacagcgagccggugcugaagggcgucaagcuccacuacacgugaggacuaguguccaccugucccuccugggcugcuggauugucucguuuuccugccaaauaaacaggaucagcgcuuuacagaucucaaaggcucuuuucagagccaccaaaaaaaaaaaaaaaaaaaaaaaaaaaaaaaaaaaaaaaaaaaaaaaaaaaaaaaaaaaaaaaaaaaaaaaaaaaaaaaaaaaaaaaaaaaaaaaaaaaaa

SEQ ID NO: 23979 - RNA, 4129 nt, Artificial Sequence
  SARS-CoV-2/Wuhan/WIV05/2019__EPI_ISL_402128 spike protein mRNA gc (1-1273)(K986P_V987P_S477N_D614G)
aggagacccgugacccggaaguuguacggcuacgcgacuuucccucccacaaacccucgcgcccuuccuuuccuacuugggcccggcagaaagcuuaccauguucguguuccugguccuccugccccuggugagcucccagugcgugaaccucaccacccgcacgcagcugccgcccgccuacaccaacagcuucacccggggcgucuacuaccccgacaagguguuccgcuccagcgugcugcacuccacccaggaccucuuccugcccuucuucagcaacgucacgugguuccacgccauccacguguccgggaccaacggcaccaagcgguucgacaacccggugcugcccuucaacgacggggucuacuucgcgagcaccgagaaguccaacaucauccgcggcuggaucuucgggacgacccucgacagcaagacccagucccugcugaucgugaacaacgccaccaacguggucaucaaggugugcgaguuccaguucugcaacgaccccuuccucggcguguacuaccacaagaacaacaagagcuggauggaguccgaguuccgggucuacagcuccgccaacaacugcacguucgaguacgugagccagcccuuccugauggaccuggagggcaagcaggggaacuucaagaaccuccgcgaguucguguucaagaacaucgacggcuacuucaagaucuacuccaagcacaccccgaucaaccugguccgggaccugccccagggguucagcgcccucgagccccugguggaccugcccaucggcaucaacaucacccgcuuccagacccuccuggcccugcaccgguccuaccucacgccgggggacagcagcuccggcuggaccgcgggcgccgccgccuacuacgugggguaccugcagccccgcaccuuccugcucaaguacaacgagaacggcaccaucacggacgcggucgacugcgcccuggacccccugagcgagaccaagugcacccucaaguccuucaccguggagaaggggaucuaccagacgagcaacuuccgggugcagcccaccgaguccaucguccgcuucccgaacaucaccaaccugugccccuucggcgagguguucaacgccacccgguucgccagcgucuacgccuggaaccgcaagcggaucuccaacugcguggcggacuacagcgugcuguacaacuccgccagcuucuccacguucaagugcuacggcgucagccccaccaagcucaacgaccugugcuucaccaacguguacgccgacuccuucgugauccgcggggacgagguccggcagaucgcccccggccagaccgggaagaucgccgacuacaacuacaagcugccggacgacuucacgggcugcgugaucgcguggaacagcaacaaccucgacuccaaggucgggggcaacuacaacuaccuguaccgccuguuccgcaagagcaaccucaagcccuucgagcgggacaucuccaccgagaucuaccaggccggcaacacccccugcaacgggguggagggcuucaacugcuacuucccccugcagagcuacggguuccagccgaccaacggcgugggguaccagcccuaccggguggucgugcuguccuucgagcuccugcacgcccccgccacggugugcggccccaagaaguccaccaaccuggucaagaacaagugcgugaacuucaacuucaacggccucaccgggaccggcgugcugaccgagagcaacaagaaguuccugccguuccagcaguucgggcgcgacaucgccgacacgaccgacgcgguccgcgacccccagacccuggagauccucgacaucacccccugcagcuucggcggggugagcgugaucacgccgggcaccaacaccuccaaccaggucgccgugcuguaccagggcgugaacugcaccgagguccccguggccauccacgccgaccagcugacgcccaccuggcggguguacagcaccggguccaacgucuuccagacccgcgccggcugccucaucggggcggagcacgugaacaacagcuacgagugcgacauccccaucggcgccggcaucugcgccuccuaccagacgcagaccaacagcccgcggcgcgcccgguccguggcgagccaguccaucaucgccuacaccaugagccugggggccgagaacuccgucgccuacagcaacaacuccaucgccauccccaccaacuucacgaucagcgugaccaccgagauccugcccguguccaugaccaagacgagcgucgacugcaccauguacaucugcggcgacagcaccgagugcuccaaccuccugcugcaguacgggagcuucugcacccagcucaaccgcgcgcugacgggcaucgccguggagcaggacaagaacacccaggagguguucgcccaggucaagcagaucuacaagacgcccccgaucaaggacuucgggggcuucaacuucucccagauccugcccgaccccagcaagcccuccaagcggagcuucaucgaggaccuccuguucaacaaggugacccuggccgacgccggcuucaucaagcaguacggggacugccucggcgacaucgcggcccgcgaccugaucugcgcccagaaguucaacgggcugaccgugcucccgccccugcugaccgacgagaugaucgcccaguacaccuccgcccuccuggcgggcaccaucacgagcggguggaccuucggcgccggcgccgcccugcagauccccuucgcgaugcagauggccuaccgguucaacgggaucggcgucacccagaacgugcucuacgagaaccagaagcugaucgccaaccaguucaacuccgccaucgggaagauccaggacagccuguccagcaccgccuccgcgcucggcaagcugcaggacguggucaaccagaacgcccaggcccugaacacgcucgugaagcagcugagcuccaacuucggggccaucagcuccgugcugaacgacauccucagccgccuggacccgcccgaggccgagguccagaucgaccggcugaucaccggccgccuccagucccugcagaccuacgugacccagcagcugauccgggcggccgagauccgcgccagcgccaaccucgccgcgaccaagaugagcgagugcgugcugggccaguccaagcgggucgacuucugcgggaagggcuaccaccugaugagcuucccccaguccgcgccccacggggugguguuccuccacgucacguacgugcccgcccaggagaagaacuucaccaccgccccggccaucugccacgacggcaaggcccacuucccccgcgagggggucuucgugagcaacggcacccacugguucgugacgcagcggaacuucuacgagccccagaucaucaccaccgacaacaccuucgucuccggcaacugcgacguggugaucgggaucgucaacaacacgguguacgacccccugcagccggagcuggacagcuucaaggaggagcucgacaaguacuucaagaaccacaccucccccgacguggaccugggcgacaucagcgggaucaacgccuccgucgugaacauccagaaggagaucgaccgccugaacgagguggccaagaaccucaacgagagccugaucgaccugcaggagcucggcaaguacgagcaguacaucaaguggcccugguacaucuggcugggcuucaucgccgggcugaucgcgaucgucauggugaccaucaugcucugcugcaugaccuccugcugcagcugccugaagggcugcugcuccugcgggagcugcugcaaguucgacgaggacgacuccgagccggugcugaagggcgucaagcuccacuacacgugaggacuaguguccaccugucccuccugggcugcuggauugucucguuuuccugccaaauaaacaggaucagcgcuuuacagaucucaaaggcucuuuucagagccaccaaaaaaaaaaaaaaaaaaaaaaaaaaaaaaaaaaaaaaaaaaaaaaaaaaaaaaaaaaaaaaaaaaaaaaaaaaaaaaaaaaaaaaaaaaaaaaaaaaaaa

SEQ ID NO: 23980 - RNA, 4129 nt, Artificial Sequence
  SARS-CoV-2/Wuhan/WIV05/2019__EPI_ISL_402128 spike protein mRNA gc (1-1273)(K986P_V987P_N501Y_D614G)
aggagacccgugacccggaaguuguacggcuacgcgacuuucccucccacaaacccucgcgcccuuccuuuccuacuugggcccggcagaaagcuuaccauguucguguuccugguccuccugccccuggugagcucccagugcgugaaccucaccacccgcacgcagcugccgcccgccuacaccaacagcuucacccggggcgucuacuaccccgacaagguguuccgcuccagcgugcugcacuccacccaggaccucuuccugcccuucuucagcaacgucacgugguuccacgccauccacguguccgggaccaacggcaccaagcgguucgacaacccggugcugcccuucaacgacggggucuacuucgcgagcaccgagaaguccaacaucauccgcggcuggaucuucgggacgacccucgacagcaagacccagucccugcugaucgugaacaacgccaccaacguggucaucaaggugugcgaguuccaguucugcaacgaccccuuccucggcguguacuaccacaagaacaacaagagcuggauggaguccgaguuccgggucuacagcuccgccaacaacugcacguucgaguacgugagccagcccuuccugauggaccuggagggcaagcaggggaacuucaagaaccuccgcgaguucguguucaagaacaucgacggcuacuucaagaucuacuccaagcacaccccgaucaaccugguccgggaccugccccagggguucagcgcccucgagccccugguggaccugcccaucggcaucaacaucacccgcuuccagacccuccuggcccugcaccgguccuaccucacgccgggggacagcagcuccggcuggaccgcgggcgccgccgccuacuacgugggguaccugcagccccgcaccuuccugcucaaguacaacgagaacggcaccaucacggacgcggucgacugcgcccuggacccccugagcgagaccaagugcacccucaaguccuucaccguggagaaggggaucuaccagacgagcaacuuccgggugcagcccaccgaguccaucguccgcuucccgaacaucaccaaccugugccccuucggcgagguguucaacgccacccgguucgccagcgucuacgccuggaaccgcaagcggaucuccaacugcguggcggacuacagcgugcuguacaacuccgccagcuucuccacguucaagugcuacggcgucagccccaccaagcucaacgaccugugcuucaccaacguguacgccgacuccuucgugauccgcggggacgagguccggcagaucgcccccggccagaccgggaagaucgccgacuacaacuacaagcugccggacgacuucacgggcugcgugaucgcguggaacagcaacaaccucgacuccaaggucgggggcaacuacaacuaccuguaccgccuguuccgcaagagcaaccucaagcccuucgagcgggacaucuccaccgagaucuaccaggccggcagcacccccugcaacgggguggagggcuucaacugcuacuucccccugcaguccuacggguuccagccgaccuacggcgugggguaccagcccuaccggguggucgugcugagcuucgagcuccugcacgcccccgccacggugugcggccccaagaaguccaccaaccuggucaagaacaagugcgugaacuucaacuucaacggccucaccgggaccggcgugcugaccgagagcaacaagaaguuccugccguuccagcaguucgggcgcgacaucgccgacacgaccgacgcgguccgcgacccccagacccuggagauccucgacaucacccccugcagcuucggcgggguguccgugaucacgccgggcaccaacaccagcaaccaggucgccgugcuguaccagggcgugaacugcaccgagguccccguggccauccacgccgaccagcugacgcccaccuggcggguguacuccaccgggagcaacgucuuccagacccgcgccggcugccucaucggggcggagcacgugaacaacuccuacgagugcgacauccccaucggcgccggcaucugcgccagcuaccagacgcagaccaacuccccgcggcgcgcccggagcguggcgucccagagcaucaucgccuacaccaugucccugggggccgagaacagcgucgccuacuccaacaacagcaucgccauccccaccaacuucacgaucuccgugaccaccgagauccugcccgugagcaugaccaagacgagcgucgacugcaccauguacaucugcggcgacuccaccgagugcagcaaccuccugcugcaguacggguccuucugcacccagcucaaccgcgcgcugacgggcaucgccguggagcaggacaagaacacccaggagguguucgcccaggucaagcagaucuacaagacgcccccgaucaaggacuucgggggcuucaacuucagccagauccugcccgaccccuccaagcccagcaagcgguccuucaucgaggaccuccuguucaacaaggugacccuggccgacgccggcuucaucaagcaguacggggacugccucggcgacaucgcggcccgcgaccugaucugcgcccagaaguucaacgggcugaccgugcucccgccccugcugaccgacgagaugaucgcccaguacaccagcgcccuccuggcgggcaccaucacguccggguggaccuucggcgccggcgccgcccugcagauccccuucgcgaugcagauggccuaccgguucaacgggaucggcgucacccagaacgugcucuacgagaaccagaagcugaucgccaaccaguucaacagcgccaucgggaagauccaggacucccugagcuccaccgccagcgcgcucggcaagcugcaggacguggucaaccagaacgcccaggcccugaacacgcucgugaagcagcuguccagcaacuucggggccaucuccagcgugcugaacgacauccucucccgccuggacccgcccgaggccgagguccagaucgaccggcugaucaccggccgccuccagagccugcagaccuacgugacccagcagcugauccgggcggccgagauccgcgccagcgccaaccucgccgcgaccaagauguccgagugcgugcugggccagagcaagcgggucgacuucugcgggaagggcuaccaccugauguccuucccccagagcgcgccccacggggugguguuccuccacgucacguacgugcccgcccaggagaagaacuucaccaccgccccggccaucugccacgacggcaaggcccacuucccccgcgagggggucuucguguccaacggcacccacugguucgugacgcagcggaacuucuacgagccccagaucaucaccaccgacaacaccuucgucagcggcaacugcgacguggugaucgggaucgucaacaacacgguguacgacccccugcagccggagcuggacuccuucaaggaggagcucgacaaguacuucaagaaccacaccagccccgacguggaccugggcgacaucuccgggaucaacgccagcgucgugaacauccagaaggagaucgaccgccugaacgagguggccaagaaccucaacgagucccugaucgaccugcaggagcucggcaaguacgagcaguacaucaaguggcccugguacaucuggcugggcuucaucgccgggcugaucgcgaucgucauggugaccaucaugcucugcugcaugaccagcugcugcuccugccugaagggcugcugcagcugcggguccugcugcaaguucgacgaggacgacagcgagccggugcugaagggcgucaagcuccacuacacgugaggacuaguguccaccugucccuccugggcugcuggauugucucguuuuccugccaaauaaacaggaucagcgcuuuacagaucucaaaggcucuuuucagagccaccaaaaaaaaaaaaaaaaaaaaaaaaaaaaaaaaaaaaaaaaaaaaaaaaaaaaaaaaaaaaaaaaaaaaaaaaaaaaaaaaaaaaaaaaaaaaaaaaaaaaa

SEQ ID NO: 23981 - RNA, 4123 nt, Artificial Sequence
  SARS-CoV-2/Wuhan/WIV05/2019__EPI_ISL_402128 spike protein mRNA gc (1-1273)(K986P_V987P_H69del_V70del_D614G)
aggagacccgugacccggaaguuguacggcuacgcgacuuucccucccacaaacccucgcgcccuuccuuuccuacuugggcccggcagaaagcuuaccauguucguguuccugguccuccugccccuggugagcucccagugcgugaaccucaccacccgcacgcagcugccgcccgccuacaccaacagcuucacccggggcgucuacuaccccgacaagguguuccgcuccagcgugcugcacuccacccaggaccucuuccugcccuucuucagcaacgucacgugguuccacgccaucuccgggaccaacggcaccaagcgguucgacaacccggugcugcccuucaacgacgggguguacuucgcgagcaccgagaaguccaacaucauccgcggcuggaucuucgggacgacccucgacagcaagacccagucccugcugaucgucaacaacgccaccaacguggugaucaaggucugcgaguuccaguucugcaacgaccccuuccucggcguguacuaccacaagaacaacaagagcuggauggaguccgaguuccggguguacagcuccgccaacaacugcacguucgaguacgucagccagcccuuccugauggaccuggagggcaagcaggggaacuucaagaaccuccgcgaguucguguucaagaacaucgacggcuacuucaagaucuacuccaagcacaccccgaucaaccuggugcgggaccugccccagggguucagcgcccucgagccccuggucgaccugcccaucggcaucaacaucacccgcuuccagacccuccuggcccugcaccgguccuaccucacgccgggggacagcagcuccggcuggaccgcgggcgccgccgccuacuacgugggguaccugcagccccgcaccuuccugcucaaguacaacgagaacggcaccaucacggacgcgguggacugcgcccuggacccccugagcgagaccaagugcacccucaaguccuucaccgucgagaaggggaucuaccagacgagcaacuuccgggugcagcccaccgaguccaucgugcgcuucccgaacaucaccaaccugugccccuucggcgaggucuucaacgccacccgguucgccagcguguacgccuggaaccgcaagcggaucuccaacugcgucgcggacuacagcgugcuguacaacuccgccagcuucuccacguucaagugcuacggcgugagccccaccaagcucaacgaccugugcuucaccaacgucuacgccgacuccuucgugauccgcggggacgaggugcggcagaucgcccccggccagaccgggaagaucgccgacuacaacuacaagcugccggacgacuucacgggcugcgucaucgcguggaacagcaacaaccucgacuccaaggucgggggcaacuacaacuaccuguaccgccuguuccgcaagagcaaccucaagcccuucgagcgggacaucuccaccgagaucuaccaggccggcagcacccccugcaacgggguggagggcuucaacugcuacuucccccugcaguccuacggguuccagccgaccaacggcgugggguaccagcccuaccggguggugguccugagcuucgagcuccugcacgcccccgccacggugugcggccccaagaaguccaccaaccuggugaagaacaagugcgucaacuucaacuucaacggccucaccgggaccggcgugcugaccgagagcaacaagaaguuccugccguuccagcaguucgggcgcgacaucgccgacacgaccgacgcggugcgcgacccccagacccuggagauccucgacaucacccccugcagcuucggcggggucuccgugaucacgccgggcaccaacaccagcaaccagguggccguccuguaccagggcgugaacugcaccgaggugcccgucgccauccacgccgaccagcugacgcccaccuggcggguguacuccaccgggagcaacguguuccagacccgcgccggcugccucaucggggcggagcacgucaacaacuccuacgagugcgacauccccaucggcgccggcaucugcgccagcuaccagacgcagaccaacuccccgcggcgcgcccggagcguggcgucccagagcaucaucgccuacaccaugucccugggggccgagaacagcguggccuacuccaacaacagcaucgccauccccaccaacuucacgaucuccgucaccaccgagauccugcccgugagcaugaccaagacgagcguggacugcaccauguacaucugcggcgacuccaccgagugcagcaaccuccugcugcaguacggguccuucugcacccagcucaaccgcgcgcugacgggcaucgccgucgagcaggacaagaacacccaggagguguucgcccaggugaagcagaucuacaagacgcccccgaucaaggacuucgggggcuucaacuucagccagauccugcccgaccccuccaagcccagcaagcgguccuucaucgaggaccuccuguucaacaaggucacccuggccgacgccggcuucaucaagcaguacggggacugccucggcgacaucgcggcccgcgaccugaucugcgcccagaaguucaacgggcugaccgugcucccgccccugcugaccgacgagaugaucgcccaguacaccagcgcccuccuggcgggcaccaucacguccggguggaccuucggcgccggcgccgcccugcagauccccuucgcgaugcagauggccuaccgguucaacgggaucggcgugacccagaacguccucuacgagaaccagaagcugaucgccaaccaguucaacagcgccaucgggaagauccaggacucccugagcuccaccgccagcgcgcucggcaagcugcaggacguggugaaccagaacgcccaggcccugaacacgcucgucaagcagcuguccagcaacuucggggccaucuccagcgugcugaacgacauccucucccgccuggacccgcccgaggccgaggugcagaucgaccggcugaucaccggccgccuccagagccugcagaccuacgucacccagcagcugauccgggcggccgagauccgcgccagcgccaaccucgccgcgaccaagauguccgagugcgugcugggccagagcaagcggguggacuucugcgggaagggcuaccaccugauguccuucccccagagcgcgccccacggggucguguuccuccacgugacguacguccccgcccaggagaagaacuucaccaccgccccggccaucugccacgacggcaaggcccacuucccccgcgaggggguguucgucuccaacggcacccacugguucgugacgcagcggaacuucuacgagccccagaucaucaccaccgacaacaccuucgugagcggcaacugcgacgucgugaucgggaucgugaacaacacggucuacgacccccugcagccggagcuggacuccuucaaggaggagcucgacaaguacuucaagaaccacaccagccccgacguggaccugggcgacaucuccgggaucaacgccagcguggucaacauccagaaggagaucgaccgccugaacgagguggccaagaaccucaacgagucccugaucgaccugcaggagcucggcaaguacgagcaguacaucaaguggcccugguacaucuggcugggcuucaucgccgggcugaucgcgaucgugauggucaccaucaugcucugcugcaugaccagcugcugcuccugccugaagggcugcugcagcugcggguccugcugcaaguucgacgaggacgacagcgagccggugcugaagggcgugaagcuccacuacacgugaggacuaguguccaccugucccuccugggcugcuggauugucucguuuuccugccaaauaaacaggaucagcgcuuuacagaucucaaaggcucuuuucagagccaccaaaaaaaaaaaaaaaaaaaaaaaaaaaaaaaaaaaaaaaaaaaaaaaaaaaaaaaaaaaaaaaaaaaaaaaaaaaaaaaaaaaaaaaaaaaaaaaaaaaaa

SEQ ID NO: 23982 - RNA, 4129 nt, Artificial Sequence
  SARS-CoV-2/Wuhan/WIV05/2019__EPI_ISL_402128 spike protein mRNA gc (1-1273)(K986P_V987P_Y453F_D614G)
aggagacccgugacccggaaguuguacggcuacgcgacuuucccucccacaaacccucgcgcccuuccuuuccuacuugggcccggcagaaagcuuaccauguucguguuccugguccuccugccccuggugagcucccagugcgugaaccucaccacccgcacgcagcugccgcccgccuacaccaacagcuucacccggggcgucuacuaccccgacaagguguuccgcuccagcgugcugcacuccacccaggaccucuuccugcccuucuucagcaacgucacgugguuccacgccauccacguguccgggaccaacggcaccaagcgguucgacaacccggugcugcccuucaacgacggggucuacuucgcgagcaccgagaaguccaacaucauccgcggcuggaucuucgggacgacccucgacagcaagacccagucccugcugaucgugaacaacgccaccaacguggucaucaaggugugcgaguuccaguucugcaacgaccccuuccucggcguguacuaccacaagaacaacaagagcuggauggaguccgaguuccgggucuacagcuccgccaacaacugcacguucgaguacgugagccagcccuuccugauggaccuggagggcaagcaggggaacuucaagaaccuccgcgaguucguguucaagaacaucgacggcuacuucaagaucuacuccaagcacaccccgaucaaccugguccgggaccugccccagggguucagcgcccucgagccccugguggaccugcccaucggcaucaacaucacccgcuuccagacccuccuggcccugcaccgguccuaccucacgccgggggacagcagcuccggcuggaccgcgggcgccgccgccuacuacgugggguaccugcagccccgcaccuuccugcucaaguacaacgagaacggcaccaucacggacgcggucgacugcgcccuggacccccugagcgagaccaagugcacccucaaguccuucaccguggagaaggggaucuaccagacgagcaacuuccgggugcagcccaccgaguccaucguccgcuucccgaacaucaccaaccugugccccuucggcgagguguucaacgccacccgguucgccagcgucuacgccuggaaccgcaagcggaucuccaacugcguggcggacuacagcgugcuguacaacuccgccagcuucuccacguucaagugcuacggcgucagccccaccaagcucaacgaccugugcuucaccaacguguacgccgacuccuucgugauccgcggggacgagguccggcagaucgcccccggccagaccgggaagaucgccgacuacaacuacaagcugccggacgacuucacgggcugcgugaucgcguggaacagcaacaaccucgacuccaaggucgggggcaacuacaacuaccuguuccgccuguuccgcaagagcaaccucaagcccuucgagcgggacaucuccaccgagaucuaccaggccggcagcacccccugcaacgggguggagggcuucaacugcuacuucccccugcaguccuacggguuccagccgaccaacggcgugggguaccagcccuaccggguggucgugcugagcuucgagcuccugcacgcccccgccacggugugcggccccaagaaguccaccaaccuggucaagaacaagugcgugaacuucaacuucaacggccucaccgggaccggcgugcugaccgagagcaacaagaaguuccugccguuccagcaguucgggcgcgacaucgccgacacgaccgacgcgguccgcgacccccagacccuggagauccucgacaucacccccugcagcuucggcgggguguccgugaucacgccgggcaccaacaccagcaaccaggucgccgugcuguaccagggcgugaacugcaccgagguccccguggccauccacgccgaccagcugacgcccaccuggcggguguacuccaccgggagcaacgucuuccagacccgcgccggcugccucaucggggcggagcacgugaacaacuccuacgagugcgacauccccaucggcgccggcaucugcgccagcuaccagacgcagaccaacuccccgcggcgcgcccggagcguggcgucccagagcaucaucgccuacaccaugucccugggggccgagaacagcgucgccuacuccaacaacagcaucgccauccccaccaacuucacgaucuccgugaccaccgagauccugcccgugagcaugaccaagacgagcgucgacugcaccauguacaucugcggcgacuccaccgagugcagcaaccuccugcugcaguacggguccuucugcacccagcucaaccgcgcgcugacgggcaucgccguggagcaggacaagaacacccaggagguguucgcccaggucaagcagaucuacaagacgcccccgaucaaggacuucgggggcuucaacuucagccagauccugcccgaccccuccaagcccagcaagcgguccuucaucgaggaccuccuguucaacaaggugacccuggccgacgccggcuucaucaagcaguacggggacugccucggcgacaucgcggcccgcgaccugaucugcgcccagaaguucaacgggcugaccgugcucccgccccugcugaccgacgagaugaucgcccaguacaccagcgcccuccuggcgggcaccaucacguccggguggaccuucggcgccggcgccgcccugcagauccccuucgcgaugcagauggccuaccgguucaacgggaucggcgucacccagaacgugcucuacgagaaccagaagcugaucgccaaccaguucaacagcgccaucgggaagauccaggacucccugagcuccaccgccagcgcgcucggcaagcugcaggacguggucaaccagaacgcccaggcccugaacacgcucgugaagcagcuguccagcaacuucggggccaucuccagcgugcugaacgacauccucucccgccuggacccgcccgaggccgagguccagaucgaccggcugaucaccggccgccuccagagccugcagaccuacgugacccagcagcugauccgggcggccgagauccgcgccagcgccaaccucgccgcgaccaagauguccgagugcgugcugggccagagcaagcgggucgacuucugcgggaagggcuaccaccugauguccuucccccagagcgcgccccacggggugguguuccuccacgucacguacgugcccgcccaggagaagaacuucaccaccgccccggccaucugccacgacggcaaggcccacuucccccgcgagggggucuucguguccaacggcacccacugguucgugacgcagcggaacuucuacgagccccagaucaucaccaccgacaacaccuucgucagcggcaacugcgacguggugaucgggaucgucaacaacacgguguacgacccccugcagccggagcuggacuccuucaaggaggagcucgacaaguacuucaagaaccacaccagccccgacguggaccugggcgacaucuccgggaucaacgccagcgucgugaacauccagaaggagaucgaccgccugaacgagguggccaagaaccucaacgagucccugaucgaccugcaggagcucggcaaguacgagcaguacaucaaguggcccugguacaucuggcugggcuucaucgccgggcugaucgcgaucgucauggugaccaucaugcucugcugcaugaccagcugcugcuccugccugaagggcugcugcagcugcggguccugcugcaaguucgacgaggacgacagcgagccggugcugaagggcgucaagcuccacuacacgugaggacuaguguccaccugucccuccugggcugcuggauugucucguuuuccugccaaauaaacaggaucagcgcuuuacagaucucaaaggcucuuuucagagccaccaaaaaaaaaaaaaaaaaaaaaaaaaaaaaaaaaaaaaaaaaaaaaaaaaaaaaaaaaaaaaaaaaaaaaaaaaaaaaaaaaaaaaaaaaaaaaaaaaaaaa

SEQ ID NO: 23983 - RNA, 4129 nt, Artificial Sequence
  SARS-CoV-2/Wuhan/WIV05/2019__EPI_ISL_402128 spike protein mRNA gc (1-1273)(K986P_V987P_D614G_I692V)
aggagacccgugacccggaaguuguacggcuacgcgacuuucccucccacaaacccucgcgcccuuccuuuccuacuugggcccggcagaaagcuuaccauguucguguuccugguccuccugccccuggugagcucccagugcgugaaccucaccacccgcacgcagcugccgcccgccuacaccaacagcuucacccggggcgucuacuaccccgacaagguguuccgcuccagcgugcugcacuccacccaggaccucuuccugcccuucuucagcaacgucacgugguuccacgccauccacguguccgggaccaacggcaccaagcgguucgacaacccggugcugcccuucaacgacggggucuacuucgcgagcaccgagaaguccaacaucauccgcggcuggaucuucgggacgacccucgacagcaagacccagucccugcugaucgugaacaacgccaccaacguggucaucaaggugugcgaguuccaguucugcaacgaccccuuccucggcguguacuaccacaagaacaacaagagcuggauggaguccgaguuccgggucuacagcuccgccaacaacugcacguucgaguacgugagccagcccuuccugauggaccuggagggcaagcaggggaacuucaagaaccuccgcgaguucguguucaagaacaucgacggcuacuucaagaucuacuccaagcacaccccgaucaaccugguccgggaccugccccagggguucagcgcccucgagccccugguggaccugcccaucggcaucaacaucacccgcuuccagacccuccuggcccugcaccgguccuaccucacgccgggggacagcagcuccggcuggaccgcgggcgccgccgccuacuacgugggguaccugcagccccgcaccuuccugcucaaguacaacgagaacggcaccaucacggacgcggucgacugcgcccuggacccccugagcgagaccaagugcacccucaaguccuucaccguggagaaggggaucuaccagacgagcaacuuccgggugcagcccaccgaguccaucguccgcuucccgaacaucaccaaccugugccccuucggcgagguguucaacgccacccgguucgccagcgucuacgccuggaaccgcaagcggaucuccaacugcguggcggacuacagcgugcuguacaacuccgccagcuucuccacguucaagugcuacggcgucagccccaccaagcucaacgaccugugcuucaccaacguguacgccgacuccuucgugauccgcggggacgagguccggcagaucgcccccggccagaccgggaagaucgccgacuacaacuacaagcugccggacgacuucacgggcugcgugaucgcguggaacagcaacaaccucgacuccaaggucgggggcaacuacaacuaccuguaccgccuguuccgcaagagcaaccucaagcccuucgagcgggacaucuccaccgagaucuaccaggccggcagcacccccugcaacgggguggagggcuucaacugcuacuucccccugcaguccuacggguuccagccgaccaacggcgugggguaccagcccuaccggguggucgugcugagcuucgagcuccugcacgcccccgccacggugugcggccccaagaaguccaccaaccuggucaagaacaagugcgugaacuucaacuucaacggccucaccgggaccggcgugcugaccgagagcaacaagaaguuccugccguuccagcaguucgggcgcgacaucgccgacacgaccgacgcgguccgcgacccccagacccuggagauccucgacaucacccccugcagcuucggcgggguguccgugaucacgccgggcaccaacaccagcaaccaggucgccgugcuguaccagggcgugaacugcaccgagguccccguggccauccacgccgaccagcugacgcccaccuggcggguguacuccaccgggagcaacgucuuccagacccgcgccggcugccucaucggggcggagcacgugaacaacuccuacgagugcgacauccccaucggcgccggcaucugcgccagcuaccagacgcagaccaacuccccgcggcgcgcccggagcguggcgucccagagcgucaucgccuacaccaugucccugggggccgagaacagcguggccuacuccaacaacagcaucgccauccccaccaacuucacgaucuccgugaccaccgagauccugcccgucagcaugaccaagacgagcguggacugcaccauguacaucugcggcgacuccaccgagugcagcaaccuccugcugcaguacggguccuucugcacccagcucaaccgcgcgcugacgggcaucgccguggagcaggacaagaacacccaggaggucuucgcccaggugaagcagaucuacaagacgcccccgaucaaggacuucgggggcuucaacuucagccagauccugcccgaccccuccaagcccagcaagcgguccuucaucgaggaccuccuguucaacaaggugacccuggccgacgccggcuucaucaagcaguacggggacugccucggcgacaucgcggcccgcgaccugaucugcgcccagaaguucaacgggcugaccguccucccgccccugcugaccgacgagaugaucgcccaguacaccagcgcccuccuggcgggcaccaucacguccggguggaccuucggcgccggcgccgcccugcagauccccuucgcgaugcagauggccuaccgguucaacgggaucggcgugacccagaacgugcucuacgagaaccagaagcugaucgccaaccaguucaacagcgccaucgggaagauccaggacucccugagcuccaccgccagcgcgcucggcaagcugcaggacgucgugaaccagaacgcccaggcccugaacacgcucgugaagcagcuguccagcaacuucggggccaucuccagcguccugaacgacauccucucccgccuggacccgcccgaggccgaggugcagaucgaccggcugaucaccggccgccuccagagccugcagaccuacgugacccagcagcugauccgggcggccgagauccgcgccagcgccaaccucgccgcgaccaagauguccgagugcguccugggccagagcaagcggguggacuucugcgggaagggcuaccaccugauguccuucccccagagcgcgccccacgggguggucuuccuccacgugacguacguccccgcccaggagaagaacuucaccaccgccccggccaucugccacgacggcaaggcccacuucccccgcgaggggguguucguguccaacggcacccacugguucgucacgcagcggaacuucuacgagccccagaucaucaccaccgacaacaccuucgugagcggcaacugcgacguggucaucgggaucgugaacaacacgguguacgacccccugcagccggagcuggacuccuucaaggaggagcucgacaaguacuucaagaaccacaccagccccgacgucgaccugggcgacaucuccgggaucaacgccagcguggugaacauccagaaggagaucgaccgccugaacgaggucgccaagaaccucaacgagucccugaucgaccugcaggagcucggcaaguacgagcaguacaucaaguggcccugguacaucuggcugggcuucaucgccgggcugaucgcgaucgugauggugaccaucaugcucugcugcaugaccagcugcugcuccugccugaagggcugcugcagcugcggguccugcugcaaguucgacgaggacgacagcgagccgguccugaagggcgugaagcuccacuacacgugaggacuaguguccaccugucccuccugggcugcuggauugucucguuuuccugccaaauaaacaggaucagcgcuuuacagaucucaaaggcucuuuucagagccaccaaaaaaaaaaaaaaaaaaaaaaaaaaaaaaaaaaaaaaaaaaaaaaaaaaaaaaaaaaaaaaaaaaaaaaaaaaaaaaaaaaaaaaaaaaaaaaaaaaaaa

SEQ ID NO: 23984 - RNA, 4129 nt, Artificial Sequence
  SARS-CoV-2/Wuhan/WIV05/2019__EPI_ISL_402128 spike protein mRNA gc (1-1273)(K986P_V987P_D614G_M1229I)
aggagacccgugacccggaaguuguacggcuacgcgacuuucccucccacaaacccucgcgcccuuccuuuccuacuugggcccggcagaaagcuuaccauguucguguuccugguccuccugccccuggugagcucccagugcgugaaccucaccacccgcacgcagcugccgcccgccuacaccaacagcuucacccggggcgucuacuaccccgacaagguguuccgcuccagcgugcugcacuccacccaggaccucuuccugcccuucuucagcaacgucacgugguuccacgccauccacguguccgggaccaacggcaccaagcgguucgacaacccggugcugcccuucaacgacggggucuacuucgcgagcaccgagaaguccaacaucauccgcggcuggaucuucgggacgacccucgacagcaagacccagucccugcugaucgugaacaacgccaccaacguggucaucaaggugugcgaguuccaguucugcaacgaccccuuccucggcguguacuaccacaagaacaacaagagcuggauggaguccgaguuccgggucuacagcuccgccaacaacugcacguucgaguacgugagccagcccuuccugauggaccuggagggcaagcaggggaacuucaagaaccuccgcgaguucguguucaagaacaucgacggcuacuucaagaucuacuccaagcacaccccgaucaaccugguccgggaccugccccagggguucagcgcccucgagccccugguggaccugcccaucggcaucaacaucacccgcuuccagacccuccuggcccugcaccgguccuaccucacgccgggggacagcagcuccggcuggaccgcgggcgccgccgccuacuacgugggguaccugcagccccgcaccuuccugcucaaguacaacgagaacggcaccaucacggacgcggucgacugcgcccuggacccccugagcgagaccaagugcacccucaaguccuucaccguggagaaggggaucuaccagacgagcaacuuccgggugcagcccaccgaguccaucguccgcuucccgaacaucaccaaccugugccccuucggcgagguguucaacgccacccgguucgccagcgucuacgccuggaaccgcaagcggaucuccaacugcguggcggacuacagcgugcuguacaacuccgccagcuucuccacguucaagugcuacggcgucagccccaccaagcucaacgaccugugcuucaccaacguguacgccgacuccuucgugauccgcggggacgagguccggcagaucgcccccggccagaccgggaagaucgccgacuacaacuacaagcugccggacgacuucacgggcugcgugaucgcguggaacagcaacaaccucgacuccaaggucgggggcaacuacaacuaccuguaccgccuguuccgcaagagcaaccucaagcccuucgagcgggacaucuccaccgagaucuaccaggccggcagcacccccugcaacgggguggagggcuucaacugcuacuucccccugcaguccuacggguuccagccgaccaacggcgugggguaccagcccuaccggguggucgugcugagcuucgagcuccugcacgcccccgccacggugugcggccccaagaaguccaccaaccuggucaagaacaagugcgugaacuucaacuucaacggccucaccgggaccggcgugcugaccgagagcaacaagaaguuccugccguuccagcaguucgggcgcgacaucgccgacacgaccgacgcgguccgcgacccccagacccuggagauccucgacaucacccccugcagcuucggcgggguguccgugaucacgccgggcaccaacaccagcaaccaggucgccgugcuguaccagggcgugaacugcaccgagguccccguggccauccacgccgaccagcugacgcccaccuggcggguguacuccaccgggagcaacgucuuccagacccgcgccggcugccucaucggggcggagcacgugaacaacuccuacgagugcgacauccccaucggcgccggcaucugcgccagcuaccagacgcagaccaacuccccgcggcgcgcccggagcguggcgucccagagcaucaucgccuacaccaugucccugggggccgagaacagcgucgccuacuccaacaacagcaucgccauccccaccaacuucacgaucuccgugaccaccgagauccugcccgugagcaugaccaagacgagcgucgacugcaccauguacaucugcggcgacuccaccgagugcagcaaccuccugcugcaguacggguccuucugcacccagcucaaccgcgcgcugacgggcaucgccguggagcaggacaagaacacccaggagguguucgcccaggucaagcagaucuacaagacgcccccgaucaaggacuucgggggcuucaacuucagccagauccugcccgaccccuccaagcccagcaagcgguccuucaucgaggaccuccuguucaacaaggugacccuggccgacgccggcuucaucaagcaguacggggacugccucggcgacaucgcggcccgcgaccugaucugcgcccagaaguucaacgggcugaccgugcucccgccccugcugaccgacgagaugaucgcccaguacaccagcgcccuccuggcgggcaccaucacguccggguggaccuucggcgccggcgccgcccugcagauccccuucgcgaugcagauggccuaccgguucaacgggaucggcgucacccagaacgugcucuacgagaaccagaagcugaucgccaaccaguucaacagcgccaucgggaagauccaggacucccugagcuccaccgccagcgcgcucggcaagcugcaggacguggucaaccagaacgcccaggcccugaacacgcucgugaagcagcuguccagcaacuucggggccaucuccagcgugcugaacgacauccucucccgccuggacccgcccgaggccgagguccagaucgaccggcugaucaccggccgccuccagagccugcagaccuacgugacccagcagcugauccgggcggccgagauccgcgccagcgccaaccucgccgcgaccaagauguccgagugcgugcugggccagagcaagcgggucgacuucugcgggaagggcuaccaccugauguccuucccccagagcgcgccccacggggugguguuccuccacgucacguacgugcccgcccaggagaagaacuucaccaccgccccggccaucugccacgacggcaaggcccacuucccccgcgagggggucuucguguccaacggcacccacugguucgugacgcagcggaacuucuacgagccccagaucaucaccaccgacaacaccuucgucagcggcaacugcgacguggugaucgggaucgucaacaacacgguguacgacccccugcagccggagcuggacuccuucaaggaggagcucgacaaguacuucaagaaccacaccagccccgacguggaccugggcgacaucuccgggaucaacgccagcgucgugaacauccagaaggagaucgaccgccugaacgagguggccaagaaccucaacgagucccugaucgaccugcaggagcucggcaaguacgagcaguacaucaaguggcccugguacaucuggcugggcuucaucgccgggcugaucgcgaucgucaucgugaccaucaugcucugcugcaugaccagcugcugcuccugccugaagggcugcugcagcugcggguccugcugcaaguucgacgaggacgacagcgagccggugcugaagggcgucaagcuccacuacacgugaggacuaguguccaccugucccuccugggcugcuggauugucucguuuuccugccaaauaaacaggaucagcgcuuuacagaucucaaaggcucuuuucagagccaccaaaaaaaaaaaaaaaaaaaaaaaaaaaaaaaaaaaaaaaaaaaaaaaaaaaaaaaaaaaaaaaaaaaaaaaaaaaaaaaaaaaaaaaaaaaaaaaaaaaaa

SEQ ID NO: 23985 - RNA, 4123 nt, Artificial Sequence
  SARS-CoV-2/Wuhan/WIV05/2019__EPI_ISL_402128 spike protein mRNA gc (1-1273)(K986P_V987P_H69del_V70del_A222V_Y453F_S477N_D614G_I692V)
aggagacccgugacccggaaguuguacggcuacgcgacuuucccucccacaaacccucgcgcccuuccuuuccuacuugggcccggcagaaagcuuaccauguucguguuccugguccuccugccccuggugagcucccagugcgugaaccucaccacccgcacgcagcugccgcccgccuacaccaacagcuucacccggggcgucuacuaccccgacaagguguuccgcuccagcgugcugcacuccacccaggaccucuuccugcccuucuucagcaacgucacgugguuccacgccaucuccgggaccaacggcaccaagcgguucgacaacccggugcugcccuucaacgacgggguguacuucgcgagcaccgagaaguccaacaucauccgcggcuggaucuucgggacgacccucgacagcaagacccagucccugcugaucgucaacaacgccaccaacguggugaucaaggucugcgaguuccaguucugcaacgaccccuuccucggcguguacuaccacaagaacaacaagagcuggauggaguccgaguuccggguguacagcuccgccaacaacugcacguucgaguacgucagccagcccuuccugauggaccuggagggcaagcaggggaacuucaagaaccuccgcgaguucguguucaagaacaucgacggcuacuucaagaucuacuccaagcacaccccgaucaaccuggugcgggaccugccccagggguucagcguccucgagccccugguggaccugcccaucggcaucaacaucacccgcuuccagacccuccuggcccugcaccgguccuaccucacgccgggggacagcagcuccggcuggaccgccggcgcggccgccuacuacgugggguaccugcagccccgcaccuuccugcucaaguacaacgagaacggcaccaucacggacgccgucgacugcgcgcuggacccccugagcgagaccaagugcacccucaaguccuucaccguggagaaggggaucuaccagacgagcaacuuccgggugcagcccaccgaguccaucguccgcuucccgaacaucaccaaccugugccccuucggcgagguguucaacgccacccgguucgccagcgucuacgccuggaaccgcaagcggaucuccaacugcguggccgacuacagcgugcuguacaacuccgcgagcuucuccacguucaagugcuacggcgucagccccaccaagcucaacgaccugugcuucaccaacguguacgccgacuccuucgugauccgcggggacgagguccggcagaucgcccccggccagaccgggaagaucgccgacuacaacuacaagcugccggacgacuucacgggcugcgugaucgccuggaacagcaacaaccucgacuccaaggucgggggcaacuacaacuaccuguuccgccuguuccgcaagagcaaccucaagcccuucgagcgggacaucuccaccgagaucuaccaggcgggcaacacccccugcaacgggguggagggcuucaacugcuacuucccccugcagagcuacggguuccagccgaccaacggcgugggguaccagcccuaccggguggucgugcuguccuucgagcuccugcacgcccccgccacggugugcggccccaagaaguccaccaaccuggucaagaacaagugcgugaacuucaacuucaacggccucaccgggaccggcgugcugaccgagagcaacaagaaguuccugccguuccagcaguucgggcgcgacaucgccgacacgaccgacgccguccgcgacccccagacccuggagauccucgacaucacccccugcagcuucggcggggugagcgugaucacgccgggcaccaacaccuccaaccaggucgcggugcuguaccagggcgugaacugcaccgagguccccguggccauccacgccgaccagcugacgcccaccuggcggguguacagcaccggguccaacgucuuccagacccgcgccggcugccucaucggggccgagcacgugaacaacagcuacgagugcgacauccccaucggcgcgggcaucugcgccuccuaccagacgcagaccaacagcccgcggcgcgcccgguccguggccagccaguccgucaucgcguacaccaugagccugggggccgagaacuccguggccuacagcaacaacuccaucgccauccccaccaacuucacgaucagcgugaccaccgagauccugcccgucuccaugaccaagacgagcguggacugcaccauguacaucugcggcgacagcaccgagugcuccaaccuccugcugcaguacgggagcuucugcacccagcucaaccgcgcccugacgggcaucgcgguggagcaggacaagaacacccaggaggucuucgcccaggugaagcagaucuacaagacgcccccgaucaaggacuucgggggcuucaacuucucccagauccugcccgaccccagcaagcccuccaagcggagcuucaucgaggaccuccuguucaacaaggugacccuggccgacgccggcuucaucaagcaguacggggacugccucggcgacaucgccgcgcgcgaccugaucugcgcccagaaguucaacgggcugaccguccucccgccccugcugaccgacgagaugaucgcccaguacaccuccgcccuccuggccggcaccaucacgagcggguggaccuucggcgcgggcgccgcccugcagauccccuucgccaugcagauggcguaccgguucaacgggaucggcgugacccagaacgugcucuacgagaaccagaagcugaucgccaaccaguucaacuccgccaucgggaagauccaggacagccuguccagcaccgccuccgcccucggcaagcugcaggacgucgugaaccagaacgcgcaggcccugaacacgcucgugaagcagcugagcuccaacuucggggccaucagcuccguccugaacgacauccucagccgccuggacccgcccgaggccgaggugcagaucgaccggcugaucaccggccgccuccagucccugcagaccuacgugacccagcagcugauccgggccgcggagauccgcgccagcgccaaccucgccgccaccaagaugagcgagugcguccugggccaguccaagcggguggacuucugcgggaagggcuaccaccugaugagcuucccccaguccgcgccccacgggguggucuuccuccacgugacguacguccccgcccaggagaagaacuucaccaccgccccggccaucugccacgacggcaaggcgcacuucccccgcgaggggguguucgugagcaacggcacccacugguucgucacgcagcggaacuucuacgagccccagaucaucaccaccgacaacaccuucguguccggcaacugcgacguggucaucgggaucgugaacaacacgguguacgacccccugcagccggagcuggacagcuucaaggaggagcucgacaaguacuucaagaaccacaccucccccgacgucgaccugggcgacaucagcgggaucaacgccuccguggugaacauccagaaggagaucgaccgccugaacgaggucgccaagaaccucaacgagagccugaucgaccugcaggagcucggcaaguacgagcaguacaucaaguggcccugguacaucuggcugggcuucaucgccgggcugaucgccaucgugauggugaccaucaugcucugcugcaugaccuccugcugcagcugccugaagggcugcugcuccugcgggagcugcugcaaguucgacgaggacgacuccgagccgguccugaagggcgugaagcuccacuacacgugaggacuaguguccaccugucccuccugggcugcuggauugucucguuuuccugccaaauaaacaggaucagcgcuuuacagaucucaaaggcucuuuucagagccaccaaaaaaaaaaaaaaaaaaaaaaaaaaaaaaaaaaaaaaaaaaaaaaaaaaaaaaaaaaaaaaaaaaaaaaaaaaaaaaaaaaaaaaaaaaaaaaaaaaaaa

SEQ ID NO: 23986 - RNA, 4123 nt, Artificial Sequence
  SARS-CoV-2/Wuhan/WIV05/2019__EPI_ISL_402128 spike protein mRNA gc (1-1273)(K986P_V987P_H69del_V70del_Y453F_D614G_I692V_M1229I)
aggagacccgugacccggaaguuguacggcuacgcgacuuucccucccacaaacccucgcgcccuuccuuuccuacuugggcccggcagaaagcuuaccauguucguguuccugguccuccugccccuggugagcucccagugcgugaaccucaccacccgcacgcagcugccgcccgccuacaccaacagcuucacccggggcgucuacuaccccgacaagguguuccgcuccagcgugcugcacuccacccaggaccucuuccugcccuucuucagcaacgucacgugguuccacgccaucuccgggaccaacggcaccaagcgguucgacaacccggugcugcccuucaacgacgggguguacuucgcgagcaccgagaaguccaacaucauccgcggcuggaucuucgggacgacccucgacagcaagacccagucccugcugaucgucaacaacgccaccaacguggugaucaaggucugcgaguuccaguucugcaacgaccccuuccucggcguguacuaccacaagaacaacaagagcuggauggaguccgaguuccggguguacagcuccgccaacaacugcacguucgaguacgucagccagcccuuccugauggaccuggagggcaagcaggggaacuucaagaaccuccgcgaguucguguucaagaacaucgacggcuacuucaagaucuacuccaagcacaccccgaucaaccuggugcgggaccugccccagggguucagcgcccucgagccccuggucgaccugcccaucggcaucaacaucacccgcuuccagacccuccuggcccugcaccgguccuaccucacgccgggggacagcagcuccggcuggaccgcgggcgccgccgccuacuacgugggguaccugcagccccgcaccuuccugcucaaguacaacgagaacggcaccaucacggacgcgguggacugcgcccuggacccccugagcgagaccaagugcacccucaaguccuucaccgucgagaaggggaucuaccagacgagcaacuuccgggugcagcccaccgaguccaucgugcgcuucccgaacaucaccaaccugugccccuucggcgaggucuucaacgccacccgguucgccagcguguacgccuggaaccgcaagcggaucuccaacugcgucgcggacuacagcgugcuguacaacuccgccagcuucuccacguucaagugcuacggcgugagccccaccaagcucaacgaccugugcuucaccaacgucuacgccgacuccuucgugauccgcggggacgaggugcggcagaucgcccccggccagaccgggaagaucgccgacuacaacuacaagcugccggacgacuucacgggcugcgucaucgcguggaacagcaacaaccucgacuccaaggucgggggcaacuacaacuaccuguuccgccuguuccgcaagagcaaccucaagcccuucgagcgggacaucuccaccgagaucuaccaggccggcagcacccccugcaacgggguggagggcuucaacugcuacuucccccugcaguccuacggguuccagccgaccaacggcgugggguaccagcccuaccggguggugguccugagcuucgagcuccugcacgcccccgccacggugugcggccccaagaaguccaccaaccuggugaagaacaagugcgucaacuucaacuucaacggccucaccgggaccggcgugcugaccgagagcaacaagaaguuccugccguuccagcaguucgggcgcgacaucgccgacacgaccgacgcggugcgcgacccccagacccuggagauccucgacaucacccccugcagcuucggcggggucuccgugaucacgccgggcaccaacaccagcaaccagguggccguccuguaccagggcgugaacugcaccgaggugcccgucgccauccacgccgaccagcugacgcccaccuggcggguguacuccaccgggagcaacguguuccagacccgcgccggcugccucaucggggcggagcacgucaacaacuccuacgagugcgacauccccaucggcgccggcaucugcgccagcuaccagacgcagaccaacuccccgcggcgcgcccggagcguggcgucccagagcgugaucgccuacaccaugucccugggggccgagaacagcgucgccuacuccaacaacagcaucgccauccccaccaacuucacgaucuccgugaccaccgagauccugcccgugagcaugaccaagacgagcgucgacugcaccauguacaucugcggcgacuccaccgagugcagcaaccuccugcugcaguacggguccuucugcacccagcucaaccgcgcgcugacgggcaucgccguggagcaggacaagaacacccaggagguguucgcccaggucaagcagaucuacaagacgcccccgaucaaggacuucgggggcuucaacuucagccagauccugcccgaccccuccaagcccagcaagcgguccuucaucgaggaccuccuguucaacaaggugacccuggccgacgccggcuucaucaagcaguacggggacugccucggcgacaucgcggcccgcgaccugaucugcgcccagaaguucaacgggcugaccgugcucccgccccugcugaccgacgagaugaucgcccaguacaccagcgcccuccuggcgggcaccaucacguccggguggaccuucggcgccggcgccgcccugcagauccccuucgcgaugcagauggccuaccgguucaacgggaucggcgucacccagaacgugcucuacgagaaccagaagcugaucgccaaccaguucaacagcgccaucgggaagauccaggacucccugagcuccaccgccagcgcgcucggcaagcugcaggacguggucaaccagaacgcccaggcccugaacacgcucgugaagcagcuguccagcaacuucggggccaucuccagcgugcugaacgacauccucucccgccuggacccgcccgaggccgagguccagaucgaccggcugaucaccggccgccuccagagccugcagaccuacgugacccagcagcugauccgggcggccgagauccgcgccagcgccaaccucgccgcgaccaagauguccgagugcgugcugggccagagcaagcgggucgacuucugcgggaagggcuaccaccugauguccuucccccagagcgcgccccacggggugguguuccuccacgucacguacgugcccgcccaggagaagaacuucaccaccgccccggccaucugccacgacggcaaggcccacuucccccgcgagggggucuucguguccaacggcacccacugguucgugacgcagcggaacuucuacgagccccagaucaucaccaccgacaacaccuucgucagcggcaacugcgacguggugaucgggaucgucaacaacacgguguacgacccccugcagccggagcuggacuccuucaaggaggagcucgacaaguacuucaagaaccacaccagccccgacguggaccugggcgacaucuccgggaucaacgccagcgucgugaacauccagaaggagaucgaccgccugaacgagguggccaagaaccucaacgagucccugaucgaccugcaggagcucggcaaguacgagcaguacaucaaguggcccugguacaucuggcugggcuucaucgccgggcugaucgcgaucgucaucgugaccaucaugcucugcugcaugaccagcugcugcuccugccugaagggcugcugcagcugcggguccugcugcaaguucgacgaggacgacagcgagccggugcugaagggcgucaagcuccacuacacgugaggacuaguguccaccugucccuccugggcugcuggauugucucguuuuccugccaaauaaacaggaucagcgcuuuacagaucucaaaggcucuuuucagagccaccaaaaaaaaaaaaaaaaaaaaaaaaaaaaaaaaaaaaaaaaaaaaaaaaaaaaaaaaaaaaaaaaaaaaaaaaaaaaaaaaaaaaaaaaaaaaaaaaaaaaa

SEQ ID NO: 23987 - RNA, 4120 nt, Artificial Sequence
  SARS-CoV-2/Wuhan/WIV05/2019__EPI_ISL_402128 spike protein mRNA gc (1-1273)(K986P_V987P_K986P_V987P_H69del_V70del_Y144del_N501Y_A570 D_D614G_P681H_T716I_S982A_D1118H)
aggagacccgugacccggaaguuguacggcuacgcgacuuucccucccacaaacccucgcgcccuuccuuuccuacuugggcccggcagaaagcuuaccauguucguguuccugguccuccugccccuggugagcucccagugcgugaaccucaccacccgcacgcagcugccgcccgccuacaccaacagcuucacccggggcgucuacuaccccgacaagguguuccgcuccagcgugcugcacuccacccaggaccucuuccugcccuucuucagcaacgucacgugguuccacgccaucuccgggaccaacggcaccaagcgguucgacaacccggugcugcccuucaacgacgggguguacuucgcgagcaccgagaaguccaacaucauccgcggcuggaucuucgggacgacccucgacagcaagacccagucccugcugaucgucaacaacgccaccaacguggugaucaaggucugcgaguuccaguucugcaacgaccccuuccucggcguguaccacaagaacaacaagagcuggauggaguccgaguuccggguguacagcuccgccaacaacugcacguucgaguacgucagccagcccuuccugauggaccuggagggcaagcaggggaacuucaagaaccuccgcgaguucguguucaagaacaucgacggcuacuucaagaucuacuccaagcacaccccgaucaaccuggugcgggaccugccccagggguucagcgcccucgagccccuggucgaccugcccaucggcaucaacaucacccgcuuccagacccuccuggcccugcaccgguccuaccucacgccgggggacagcagcuccggcuggaccgcgggcgccgccgccuacuacgugggguaccugcagccccgcaccuuccugcucaaguacaacgagaacggcaccaucacggacgcgguggacugcgcccuggacccccugagcgagaccaagugcacccucaaguccuucaccgucgagaaggggaucuaccagacgagcaacuuccgggugcagcccaccgaguccaucgugcgcuucccgaacaucaccaaccugugccccuucggcgaggucuucaacgccacccgguucgccagcguguacgccuggaaccgcaagcggaucuccaacugcgucgcggacuacagcgugcuguacaacuccgccagcuucuccacguucaagugcuacggcgugagccccaccaagcucaacgaccugugcuucaccaacgucuacgccgacuccuucgugauccgcggggacgaggugcggcagaucgcccccggccagaccgggaagaucgccgacuacaacuacaagcugccggacgacuucacgggcugcgucaucgcguggaacagcaacaaccucgacuccaaggucgggggcaacuacaacuaccuguaccgccuguuccgcaagagcaaccucaagcccuucgagcgggacaucuccaccgagaucuaccaggccggcagcacccccugcaacgggguggagggcuucaacugcuacuucccccugcaguccuacggguuccagccgaccuacggcgugggguaccagcccuaccggguggugguccugagcuucgagcuccugcacgcccccgccacggugugcggccccaagaaguccaccaaccuggugaagaacaagugcgucaacuucaacuucaacggccucaccgggaccggcgugcugaccgagagcaacaagaaguuccugccguuccagcaguucgggcgcgacaucgacgacacgaccgacgccgugcgcgacccccagacccuggagauccucgacaucacccccugcagcuucggcggggucuccgugaucacgccgggcaccaacaccagcaaccagguggcgguccuguaccagggcgugaacugcaccgaggugcccgucgccauccacgccgaccagcugacgcccaccuggcggguguacuccaccgggagcaacguguuccagacccgcgccggcugccucaucggggccgagcacgucaacaacuccuacgagugcgacauccccaucggcgcgggcaucugcgccagcuaccagacgcagaccaacucccaccggcgcgcccggagcguggccucccagagcaucaucgcguacaccaugucccugggggccgagaacagcguggccuacuccaacaacagcaucgccaucccgaucaacuucaccaucuccgucacgaccgagauccugcccgugagcaugaccaagaccagcguggacugcacgauguacaucugcggcgacuccaccgagugcagcaaccuccugcugcaguacggguccuucugcacccagcucaaccgcgcccugaccggcaucgcggucgagcaggacaagaacacgcaggagguguucgcccaggugaagcagaucuacaagaccccgcccaucaaggacuucgggggcuucaacuucagccagauccugcccgaccccuccaagcccagcaagcgguccuucaucgaggaccuccuguucaacaaggucacccuggccgacgccggcuucaucaagcaguacggggacugccucggcgacaucgccgcgcgcgaccugaucugcgcccagaaguucaacgggcugaccgugcugcccccgcuccugacggacgagaugaucgcccaguacaccagcgcccuccuggccggcaccaucaccuccggguggacguucggcgcgggcgccgcccugcagauccccuucgccaugcagauggcguaccgguucaacgggaucggcgugacccagaacguccucuacgagaaccagaagcugaucgccaaccaguucaacagcgccaucgggaagauccaggacucccugagcuccaccgccagcgcccucggcaagcugcaggacguggugaaccagaacgcgcaggcccugaacacccucgucaagcagcuguccagcaacuucggggccaucuccagcgugcugaacgacauccucgcccgccuggacccgcccgaggccgaggugcagaucgaccggcugaucacgggccgccuccagucccugcagaccuacgucacccagcagcugauccgggcggccgagauccgcgccagcgccaaccucgccgcgaccaagaugagcgagugcgugcugggccaguccaagcggguggacuucugcgggaagggcuaccaccugaugagcuucccccaguccgcgccccacggggucguguuccuccacgugaccuacguccccgcccaggagaagaacuucacgaccgcccccgccaucugccacgacggcaaggcccacuucccgcgcgaggggguguucgucagcaacggcacccacugguucgugacccagcggaacuucuacgagccccagaucaucacgacccacaacaccuucguguccggcaacugcgacgucgugaucgggaucgugaacaacaccgucuacgacccccugcagcccgagcuggacagcuucaaggaggagcucgacaaguacuucaagaaccacacguccccggacguggaccugggcgacaucagcgggaucaacgccuccguggucaacauccagaaggagaucgaccgccugaacgagguggccaagaaccucaacgagagccugaucgaccugcaggagcucggcaaguacgagcaguacaucaaguggcccugguacaucuggcugggcuucaucgccgggcugaucgcgaucgugauggucaccaucaugcucugcugcaugaccuccugcugcagcugccugaagggcugcugcuccugcgggagcugcugcaaguucgacgaggacgacuccgagcccgugcugaagggcgugaagcuccacuacaccugaggacuaguguccaccugucccuccugggcugcuggauugucucguuuuccugccaaauaaacaggaucagcgcuuuacagaucucaaaggcucuuuucagagccaccaaaaaaaaaaaaaaaaaaaaaaaaaaaaaaaaaaaaaaaaaaaaaaaaaaaaaaaaaaaaaaaaaaaaaaaaaaaaaaaaaaaaaaaaaaaaaaaaaaaaa

SEQ ID NO: 23988 - RNA, 4129 nt, Artificial Sequence
  SARS-CoV-2/Wuhan/WIV05/2019__EPI_ISL_402128 spike protein mRNA gc (1-1273)(K986P_V987P_K986P_V987P_K417N_E484K_N501Y_D614G)
aggagacccgugacccggaaguuguacggcuacgcgacuuucccucccacaaacccucgcgcccuuccuuuccuacuugggcccggcagaaagcuuaccauguucguguuccugguccuccugccccuggugagcucccagugcgugaaccucaccacccgcacgcagcugccgcccgccuacaccaacagcuucacccggggcgucuacuaccccgacaagguguuccgcuccagcgugcugcacuccacccaggaccucuuccugcccuucuucagcaacgucacgugguuccacgccauccacguguccgggaccaacggcaccaagcgguucgacaacccggugcugcccuucaacgacggggucuacuucgcgagcaccgagaaguccaacaucauccgcggcuggaucuucgggacgacccucgacagcaagacccagucccugcugaucgugaacaacgccaccaacguggucaucaaggugugcgaguuccaguucugcaacgaccccuuccucggcguguacuaccacaagaacaacaagagcuggauggaguccgaguuccgggucuacagcuccgccaacaacugcacguucgaguacgugagccagcccuuccugauggaccuggagggcaagcaggggaacuucaagaaccuccgcgaguucguguucaagaacaucgacggcuacuucaagaucuacuccaagcacaccccgaucaaccugguccgggaccugccccagggguucagcgcccucgagccccugguggaccugcccaucggcaucaacaucacccgcuuccagacccuccuggcccugcaccgguccuaccucacgccgggggacagcagcuccggcuggaccgcgggcgccgccgccuacuacgugggguaccugcagccccgcaccuuccugcucaaguacaacgagaacggcaccaucacggacgcggucgacugcgcccuggacccccugagcgagaccaagugcacccucaaguccuucaccguggagaaggggaucuaccagacgagcaacuuccgggugcagcccaccgaguccaucguccgcuucccgaacaucaccaaccugugccccuucggcgagguguucaacgccacccgguucgccagcgucuacgccuggaaccgcaagcggaucuccaacugcguggcggacuacagcgugcuguacaacuccgccagcuucuccacguucaagugcuacggcgucagccccaccaagcucaacgaccugugcuucaccaacguguacgccgacuccuucgugauccgcggggacgagguccggcagaucgcccccggccagaccgggaacaucgccgacuacaacuacaagcugccggacgacuucacgggcugcgugaucgcguggaacagcaacaaccucgacuccaaggucgggggcaacuacaacuaccuguaccgccuguuccgcaagagcaaccucaagcccuucgagcgggacaucuccaccgagaucuaccaggccggcagcacccccugcaacggggugaagggcuucaacugcuacuucccccugcaguccuacggguuccagccgaccuacggcgugggguaccagcccuaccggguggucgugcugagcuucgagcuccugcacgcccccgccacggugugcggccccaagaaguccaccaaccuggucaagaacaagugcgugaacuucaacuucaacggccucaccgggaccggcgugcugaccgagagcaacaagaaguuccugccguuccagcaguucgggcgcgacaucgccgacacgaccgacgcgguccgcgacccccagacccuggagauccucgacaucacccccugcagcuucggcgggguguccgugaucacgccgggcaccaacaccagcaaccaggucgccgugcuguaccagggcgugaacugcaccgagguccccguggccauccacgccgaccagcugacgcccaccuggcggguguacuccaccgggagcaacgucuuccagacccgcgccggcugccucaucggggcggagcacgugaacaacuccuacgagugcgacauccccaucggcgccggcaucugcgccagcuaccagacgcagaccaacuccccgcggcgcgcccggagcguggcgucccagagcaucaucgccuacaccaugucccugggggccgagaacagcgucgccuacuccaacaacagcaucgccauccccaccaacuucacgaucuccgugaccaccgagauccugcccgugagcaugaccaagacgagcgucgacugcaccauguacaucugcggcgacuccaccgagugcagcaaccuccugcugcaguacggguccuucugcacccagcucaaccgcgcgcugacgggcaucgccguggagcaggacaagaacacccaggagguguucgcccaggucaagcagaucuacaagacgcccccgaucaaggacuucgggggcuucaacuucagccagauccugcccgaccccuccaagcccagcaagcgguccuucaucgaggaccuccuguucaacaaggugacccuggccgacgccggcuucaucaagcaguacggggacugccucggcgacaucgcggcccgcgaccugaucugcgcccagaaguucaacgggcugaccgugcucccgccccugcugaccgacgagaugaucgcccaguacaccagcgcccuccuggcgggcaccaucacguccggguggaccuucggcgccggcgccgcccugcagauccccuucgcgaugcagauggccuaccgguucaacgggaucggcgucacccagaacgugcucuacgagaaccagaagcugaucgccaaccaguucaacagcgccaucgggaagauccaggacucccugagcuccaccgccagcgcgcucggcaagcugcaggacguggucaaccagaacgcccaggcccugaacacgcucgugaagcagcuguccagcaacuucggggccaucuccagcgugcugaacgacauccucucccgccuggacccgcccgaggccgagguccagaucgaccggcugaucaccggccgccuccagagccugcagaccuacgugacccagcagcugauccgggcggccgagauccgcgccagcgccaaccucgccgcgaccaagauguccgagugcgugcugggccagagcaagcgggucgacuucugcgggaagggcuaccaccugauguccuucccccagagcgcgccccacggggugguguuccuccacgucacguacgugcccgcccaggagaagaacuucaccaccgccccggccaucugccacgacggcaaggcccacuucccccgcgagggggucuucguguccaacggcacccacugguucgugacgcagcggaacuucuacgagccccagaucaucaccaccgacaacaccuucgucagcggcaacugcgacguggugaucgggaucgucaacaacacgguguacgacccccugcagccggagcuggacuccuucaaggaggagcucgacaaguacuucaagaaccacaccagccccgacguggaccugggcgacaucuccgggaucaacgccagcgucgugaacauccagaaggagaucgaccgccugaacgagguggccaagaaccucaacgagucccugaucgaccugcaggagcucggcaaguacgagcaguacaucaaguggcccugguacaucuggcugggcuucaucgccgggcugaucgcgaucgucauggugaccaucaugcucugcugcaugaccagcugcugcuccugccugaagggcugcugcagcugcggguccugcugcaaguucgacgaggacgacagcgagccggugcugaagggcgucaagcuccacuacacgugaggacuaguguccaccugucccuccugggcugcuggauugucucguuuuccugccaaauaaacaggaucagcgcuuuacagaucucaaaggcucuuuucagagccaccaaaaaaaaaaaaaaaaaaaaaaaaaaaaaaaaaaaaaaaaaaaaaaaaaaaaaaaaaaaaaaaaaaaaaaaaaaaaaaaaaaaaaaaaaaaaaaaaaaaaa

SEQ ID NO: 23989 - RNA, 4120 nt, Artificial Sequence
  SARS-CoV-2/Wuhan/WIV05/2019__EPI_ISL_402128 spike protein mRNA gc (1-1273)(K986P_V987P_K986P_V987P_L18F_D80A_D215G_L242del_A243del_ L244del_R246I_K417N_E484K_N501Y_D614G_A701V)
aggagacccgugacccggaaguuguacggcuacgcgacuuucccucccacaaacccucgcgcccuuccuuuccuacuugggcccggcagaaagcuuaccauguucguguuccugguccuccugccccuggugagcucccagugcgugaacuucaccacccgcacgcagcucccgcccgccuacaccaacagcuucacccggggcgucuacuaccccgacaagguguuccgcuccagcgugcugcacuccacccaggaccuguuccuccccuucuucagcaacgucacgugguuccacgccauccacguguccgggaccaacggcaccaagcgguucgcgaacccggugcugcccuucaacgacggggucuacuucgccagcaccgagaaguccaacaucauccgcggcuggaucuucgggacgacccuggacagcaagacccagucccuccugaucgugaacaacgccaccaacguggucaucaaggugugcgaguuccaguucugcaacgaccccuuccugggcguguacuaccacaagaacaacaagagcuggauggaguccgaguuccgggucuacagcuccgccaacaacugcacguucgaguacgugagccagcccuuccucauggaccuggagggcaagcaggggaacuucaagaaccugcgcgaguucguguucaagaacaucgacggcuacuucaagaucuacuccaagcacaccccgaucaaccucguccgggggcugccccagggcuucagcgcccuggagccccucguggaccugcccaucgggaucaacaucacccgcuuccagacccugcacaucuccuaccucacgccgggcgacagcagcuccggcuggaccgcgggggccgccgccuacuacgugggcuaccugcagccccggaccuuccugcucaaguacaacgagaacgggaccaucacggacgcggucgacugcgcccuggacccccugagcgagaccaagugcacccucaaguccuucaccguggagaagggcaucuaccagacgagcaacuuccgcgugcagcccaccgaguccaucguccgguucccgaacaucaccaaccugugccccuucggcgagguguucaacgccacccgcuucgccagcgucuacgccuggaaccggaagcgcaucuccaacugcguggcggacuacagcgugcuguacaacuccgccagcuucuccacguucaagugcuacggggucagccccaccaagcucaacgaccugugcuucaccaacguguacgccgacuccuucgugauccggggcgacgagguccgccagaucgcccccgggcagaccggcaacaucgccgacuacaacuacaagcugccggacgacuucacggggugcgugaucgcguggaacagcaacaaccucgacuccaaggugggcggcaacuacaacuaccuguaccggcuguuccgcaagagcaaccucaagcccuucgagcgggacaucuccaccgagaucuaccaggccgggagcacccccugcaacggcgucaagggguucaacugcuacuucccccugcaguccuacggcuuccagccgaccuacggggugggcuaccagcccuaccgcguggucgugcugagcuucgagcuccugcacgcccccgccacggugugcggccccaagaaguccaccaaccuggucaagaacaagugcgugaacuucaacuucaacgggcucaccggcaccggggugcugaccgagagcaacaagaaguuccugccguuccagcaguucggccgggacaucgccgacacgaccgacgcgguccgcgacccccagacccucgagauccuggacaucacccccugcagcuucgggggcguguccgugaucacgccgggcaccaacaccagcaaccaggucgccgugcuguaccagggggugaacugcaccgagguccccguggccauccacgccgaccagcugacgcccaccuggcgcguguacuccaccggcagcaacgucuuccagacccgggccgggugccucaucggcgcggagcacgugaacaacuccuacgagugcgacauccccaucggcgccgggaucugcgccagcuaccagacgcagaccaacuccccgcgccgggcccgcagcguggcgucccagagcaucaucgccuacaccaugucccugggcgucgagaacagcguggccuacuccaacaacagcaucgccauccccaccaacuucacgaucuccgugaccaccgagauccugcccgucagcaugaccaagacgagcguggacugcaccauguacaucugcggggacuccaccgagugcagcaaccuccugcugcaguacggcuccuucugcacccagcucaaccgggcccugacggggaucgcgguggagcaggacaagaacacccaggaggucuucgcccaggugaagcagaucuacaagacgcccccgaucaaggacuucggcggcuucaacuucagccagauccugcccgaccccuccaagcccagcaagcgcuccuucaucgaggaccuccuguucaacaaggugacccuggccgacgccggguucaucaagcaguacggcgacugccucggggacaucgccgcgcgggaccugaucugcgcccagaaguucaacggccugaccguccucccgccccugcugaccgacgagaugaucgcccaguacaccagcgcccuccuggccgggaccaucacguccggcuggaccuucggcgcgggggccgcccugcagauccccuucgccaugcagauggcguaccgcuucaacggcaucggggugacccagaacgugcucuacgagaaccagaagcugaucgccaaccaguucaacagcgccaucggcaagauccaggacucccugagcuccaccgccagcgcccucgggaagcugcaggacgucgugaaccagaacgcgcaggcccugaacacgcucgugaagcagcuguccagcaacuucggcgccaucuccagcguccugaacgacauccucucccggcuggacccgcccgaggccgaggugcagaucgaccgccugaucaccggccggcuccagagccugcagaccuacgugacccagcagcugauccgcgccgcggagauccgggccagcgccaaccucgccgccaccaagauguccgagugcguccuggggcagagcaagcgcguggacuucugcggcaagggguaccaccugauguccuucccccagagcgcgccccacggcguggucuuccuccacgugacguacguccccgcccaggagaagaacuucaccaccgccccggccaucugccacgacgggaaggcgcacuucccccgggagggcguguucguguccaacggcacccacugguucgucacgcagcgcaacuucuacgagccccagaucaucaccaccgacaacaccuucgugagcgggaacugcgacguggucaucggcaucgugaacaacacgguguacgacccccugcagccggagcuggacuccuucaaggaggagcucgacaaguacuucaagaaccacaccagccccgacgucgaccugggggacaucuccggcaucaacgccagcguggugaacauccagaaggagaucgaccggcugaacgaggucgccaagaaccucaacgagucccugaucgaccugcaggagcucggcaaguacgagcaguacaucaaguggcccugguacaucuggcugggguucaucgccggccugaucgccaucgugauggugaccaucaugcucugcugcaugaccagcugcugcuccugccugaaggggugcugcagcugcggcuccugcugcaaguucgacgaggacgacagcgagccgguccugaagggggugaagcuccacuacacgugaggacuaguguccaccugucccuccugggcugcuggauugucucguuuuccugccaaauaaacaggaucagcgcuuuacagaucucaaaggcucuuuucagagccaccaaaaaaaaaaaaaaaaaaaaaaaaaaaaaaaaaaaaaaaaaaaaaaaaaaaaaaaaaaaaaaaaaaaaaaaaaaaaaaaaaaaaaaaaaaaaaaaaaaaaa

SEQ ID NO: 23990 - RNA, 4129 nt, Artificial Sequence
  SARS-CoV-2/Wuhan/WIV05/2019__EPI_ISL_402128 spike protein mRNA gc (1-1273)(K986P_V987P_K986P_V987P_E484K_D614G)
aggagacccgugacccggaaguuguacggcuacgcgacuuucccucccacaaacccucgcgcccuuccuuuccuacuugggcccggcagaaagcuuaccauguucguguuccugguccuccugccccuggugagcucccagugcgugaaccucaccacccgcacgcagcugccgcccgccuacaccaacagcuucacccggggcgucuacuaccccgacaagguguuccgcuccagcgugcugcacuccacccaggaccucuuccugcccuucuucagcaacgucacgugguuccacgccauccacguguccgggaccaacggcaccaagcgguucgacaacccggugcugcccuucaacgacggggucuacuucgcgagcaccgagaaguccaacaucauccgcggcuggaucuucgggacgacccucgacagcaagacccagucccugcugaucgugaacaacgccaccaacguggucaucaaggugugcgaguuccaguucugcaacgaccccuuccucggcguguacuaccacaagaacaacaagagcuggauggaguccgaguuccgggucuacagcuccgccaacaacugcacguucgaguacgugagccagcccuuccugauggaccuggagggcaagcaggggaacuucaagaaccuccgcgaguucguguucaagaacaucgacggcuacuucaagaucuacuccaagcacaccccgaucaaccugguccgggaccugccccagggguucagcgcccucgagccccugguggaccugcccaucggcaucaacaucacccgcuuccagacccuccuggcccugcaccgguccuaccucacgccgggggacagcagcuccggcuggaccgcgggcgccgccgccuacuacgugggguaccugcagccccgcaccuuccugcucaaguacaacgagaacggcaccaucacggacgcggucgacugcgcccuggacccccugagcgagaccaagugcacccucaaguccuucaccguggagaaggggaucuaccagacgagcaacuuccgggugcagcccaccgaguccaucguccgcuucccgaacaucaccaaccugugccccuucggcgagguguucaacgccacccgguucgccagcgucuacgccuggaaccgcaagcggaucuccaacugcguggcggacuacagcgugcuguacaacuccgccagcuucuccacguucaagugcuacggcgucagccccaccaagcucaacgaccugugcuucaccaacguguacgccgacuccuucgugauccgcggggacgagguccggcagaucgcccccggccagaccgggaagaucgccgacuacaacuacaagcugccggacgacuucacgggcugcgugaucgcguggaacagcaacaaccucgacuccaaggucgggggcaacuacaacuaccuguaccgccuguuccgcaagagcaaccucaagcccuucgagcgggacaucuccaccgagaucuaccaggccggcagcacccccugcaacggggugaagggcuucaacugcuacuucccccugcaguccuacggguuccagccgaccaacggcgugggguaccagcccuaccggguggucgugcugagcuucgagcuccugcacgcccccgccacggugugcggccccaagaaguccaccaaccuggucaagaacaagugcgugaacuucaacuucaacggccucaccgggaccggcgugcugaccgagagcaacaagaaguuccugccguuccagcaguucgggcgcgacaucgccgacacgaccgacgcgguccgcgacccccagacccuggagauccucgacaucacccccugcagcuucggcgggguguccgugaucacgccgggcaccaacaccagcaaccaggucgccgugcuguaccagggcgugaacugcaccgagguccccguggccauccacgccgaccagcugacgcccaccuggcggguguacuccaccgggagcaacgucuuccagacccgcgccggcugccucaucggggcggagcacgugaacaacuccuacgagugcgacauccccaucggcgccggcaucugcgccagcuaccagacgcagaccaacuccccgcggcgcgcccggagcguggcgucccagagcaucaucgccuacaccaugucccugggggccgagaacagcgucgccuacuccaacaacagcaucgccauccccaccaacuucacgaucuccgugaccaccgagauccugcccgugagcaugaccaagacgagcgucgacugcaccauguacaucugcggcgacuccaccgagugcagcaaccuccugcugcaguacggguccuucugcacccagcucaaccgcgcgcugacgggcaucgccguggagcaggacaagaacacccaggagguguucgcccaggucaagcagaucuacaagacgcccccgaucaaggacuucgggggcuucaacuucagccagauccugcccgaccccuccaagcccagcaagcgguccuucaucgaggaccuccuguucaacaaggugacccuggccgacgccggcuucaucaagcaguacggggacugccucggcgacaucgcggcccgcgaccugaucugcgcccagaaguucaacgggcugaccgugcucccgccccugcugaccgacgagaugaucgcccaguacaccagcgcccuccuggcgggcaccaucacguccggguggaccuucggcgccggcgccgcccugcagauccccuucgcgaugcagauggccuaccgguucaacgggaucggcgucacccagaacgugcucuacgagaaccagaagcugaucgccaaccaguucaacagcgccaucgggaagauccaggacucccugagcuccaccgccagcgcgcucggcaagcugcaggacguggucaaccagaacgcccaggcccugaacacgcucgugaagcagcuguccagcaacuucggggccaucuccagcgugcugaacgacauccucucccgccuggacccgcccgaggccgagguccagaucgaccggcugaucaccggccgccuccagagccugcagaccuacgugacccagcagcugauccgggcggccgagauccgcgccagcgccaaccucgccgcgaccaagauguccgagugcgugcugggccagagcaagcgggucgacuucugcgggaagggcuaccaccugauguccuucccccagagcgcgccccacggggugguguuccuccacgucacguacgugcccgcccaggagaagaacuucaccaccgccccggccaucugccacgacggcaaggcccacuucccccgcgagggggucuucguguccaacggcacccacugguucgugacgcagcggaacuucuacgagccccagaucaucaccaccgacaacaccuucgucagcggcaacugcgacguggugaucgggaucgucaacaacacgguguacgacccccugcagccggagcuggacuccuucaaggaggagcucgacaaguacuucaagaaccacaccagccccgacguggaccugggcgacaucuccgggaucaacgccagcgucgugaacauccagaaggagaucgaccgccugaacgagguggccaagaaccucaacgagucccugaucgaccugcaggagcucggcaaguacgagcaguacaucaaguggcccugguacaucuggcugggcuucaucgccgggcugaucgcgaucgucauggugaccaucaugcucugcugcaugaccagcugcugcuccugccugaagggcugcugcagcugcggguccugcugcaaguucgacgaggacgacagcgagccggugcugaagggcgucaagcuccacuacacgugaggacuaguguccaccugucccuccugggcugcuggauugucucguuuuccugccaaauaaacaggaucagcgcuuuacagaucucaaaggcucuuuucagagccaccaaaaaaaaaaaaaaaaaaaaaaaaaaaaaaaaaaaaaaaaaaaaaaaaaaaaaaaaaaaaaaaaaaaaaaaaaaaaaaaaaaaaaaaaaaaaaaaaaaaaa

SEQ ID NO: 23991 - RNA, 4129 nt, Artificial Sequence
  SARS-CoV-2/Wuhan/WIV05/2019__EPI_ISL_402128 spike protein mRNA gc (1-1273)(K986P_V987P_K986P_V987P_L18F_T20N_P26S_D138Y_R190S_K417T _E484K_N501Y_D614G_H655Y_T1027I)
aggagacccgugacccggaaguuguacggcuacgcgacuuucccucccacaaacccucgcgcccuuccuuuccuacuugggcccggcagaaagcuuaccauguucguguuccugguccuccugccccuggugagcucccagugcgugaacuucaccaaccgcacccagcucccgagcgccuacacgaacuccuucacccggggcgucuacuaccccgacaagguguuccgcagcuccgugcugcacagcacccaggaccuguuccuccccuucuucuccaacgucaccugguuccacgccauccacgugagcgggacgaacggcaccaagcgguucgacaaccccgugcugccguucaacgacggggucuacuucgcguccaccgagaaguccaacaucauccgcggcuggaucuucgggaccacgcuggacuccaagacccagagccuccugaucgugaacaacgccaccaacguggucaucaaggugugcgaguuccaguucugcaacuaccccuuccugggcguguacuaccacaagaacaacaaguccuggauggagagcgaguuccgggucuacuccagcgccaacaacugcaccuucgaguacgugucccagcccuuccucauggaccuggagggcaagcaggggaacuucaagaaccugagcgaguucguguucaagaacaucgacggcuacuucaagaucuacuccaagcacacgcccaucaaccucguccgcgaccugccgcagggguucagcgcccuggagccccucguggaccugcccaucggcaucaacaucacccgguuccagacccugcucgcccugcaccgcagcuaccugacccccggggacuccagcuccggcuggacggcgggcgccgccgccuacuacgugggguaccuccagccgcggaccuuccugcugaaguacaacgagaacggcaccaucaccgacgcggucgacugcgcccucgacccccugagcgagacgaagugcacccugaaguccuucaccguggagaaggggaucuaccagaccagcaacuuccgcgugcagcccacggaguccaucguccgguuccccaacaucaccaaccucugcccguucggcgagguguucaacgccacccgcuucgccagcgucuacgccuggaaccggaagcgcaucuccaacugcguggcggacuacagcgugcuguacaacuccgccagcuucuccaccuucaagugcuacggcgucagccccacgaagcugaacgaccucugcuucaccaacguguacgccgacuccuucgugauccgcggggacgagguccggcagaucgcccccggccagaccgggaccaucgccgacuacaacuacaagcugcccgacgacuucacgggcugcgugaucgcguggaacagcaacaaccuggacuccaaggucgggggcaacuacaacuaccucuaccggcuguuccgcaagagcaaccugaagccguucgagcgggacaucuccaccgagaucuaccaggccggcagcacccccugcaacggggugaagggcuucaacugcuacuucccccuccagagcuacggguuccagcccaccuacggcgugggguaccagccguaccgcguggucgugcuguccuucgagcugcuccacgcccccgccacggugugcggccccaagaaguccaccaaccuggucaagaacaagugcgugaacuucaacuucaacggccugaccgggaccggcgugcucaccgagagcaacaagaaguuccugcccuuccagcaguucgggcgggacaucgccgacacgaccgacgcgguccgcgacccgcagacccuggagauccuggacaucacccccugcagcuucggcgggguguccgugaucacgcccggcaccaacaccagcaaccaggucgccgugcucuaccagggcgugaacugcaccgaggucccgguggccauccacgccgaccagcugacgcccaccuggcgcguguacuccaccgggagcaacgucuuccagacccgggccggcugccugaucggggcggaguacgugaacaacuccuacgagugcgacauccccaucggcgccggcaucugcgccagcuaccagacgcagaccaacagcccccgccgggcccgcagcguggcgucccagagcaucaucgccuacaccaugucccucggggccgagaacagcgucgccuacuccaacaacagcaucgccaucccgaccaacuucacgaucagcgugaccaccgagauccugcccguguccaugaccaagacgagcgucgacugcaccauguacaucugcggcgacuccaccgagugcagcaaccugcuccugcaguacggguccuucugcacccagcugaaccgggcgcucacgggcaucgccguggagcaggacaagaacacccaggagguguucgcccaggucaagcagaucuacaagaccccgcccaucaaggacuucgggggcuucaacuucagccagauccugcccgaccccuccaagcccagcaagcgcuccuucaucgaggaccuccuguucaacaaggugacccuggccgacgccggcuucaucaagcaguacggggacugccugggcgacaucgcggcccgggaccucaucugcgcccagaaguucaacgggcugacggugcugcccccgcuccugaccgacgagaugaucgcccaguacaccagcgcccugcucgcgggcaccaucacguccggguggaccuucggcgccggcgccgcccugcagauccccuucgcgaugcagauggccuaccgcuucaacgggaucggcgucacccagaacgugcuguacgagaaccagaagcucaucgccaaccaguucaacagcgccaucgggaagauccaggacucccugagcuccaccgccagcgcgcugggcaagcuccaggacguggucaaccagaacgcccaggcccugaacacgcuggugaagcagcucuccagcaacuucggggccaucuccagcgugcugaacgacauccugagccggcucgacccgcccgaggccgagguccagaucgaccgccugaucaccggccggcugcagucccuccagaccuacgugacccagcagcugauccgcgcggccgagauccgggccagcgccaaccuggccgcgaucaagauguccgagugcgugcucggccagagcaagcgcgucgacuucugcgggaagggcuaccaccugauguccuucccccagagcgcgccccacggggugguguuccugcacgucaccuacgugcccgcccaggagaagaacuucacgaccgcccccgccaucugccacgacggcaaggcccacuucccgcgggagggggucuucguguccaacggcacccacugguucgugacccagcgcaacuucuacgagccccagaucaucacgaccgacaacaccuucgucagcggcaacugcgacguggugaucgggaucgucaacaacaccguguacgacccccuccagcccgagcuggacuccuucaaggaggagcuggacaaguacuucaagaaccacacgagcccggacguggaccucggcgacaucuccgggaucaacgccagcgucgugaacauccagaaggagaucgaccggcugaacgagguggccaagaaccugaacgagucccucaucgaccugcaggagcugggcaaguacgagcaguacaucaaguggcccugguacaucuggcucggcuucaucgccgggcugaucgcgaucgucauggugaccaucaugcugugcugcaugaccagcugcugcuccugccucaagggcugcugcagcugcggguccugcugcaaguucgacgaggacgacagcgagcccgugcugaagggcgucaagcugcacuacaccugaggacuaguguccaccugucccuccugggcugcuggauugucucguuuuccugccaaauaaacaggaucagcgcuuuacagaucucaaaggcucuuuucagagccaccaaaaaaaaaaaaaaaaaaaaaaaaaaaaaaaaaaaaaaaaaaaaaaaaaaaaaaaaaaaaaaaaaaaaaaaaaaaaaaaaaaaaaaaaaaaaaaaaaaaaa

SEQ ID NO: 23992 - RNA, 4129 nt, Artificial Sequence
  SARS-CoV-2/Wuhan/WIV05/2019__EPI_ISL_402128 spike protein mRNA gc (1-1273)(K986P_V987P_K986P_V987P_S13I_W152C_L452R_D614G)
aggagacccgugacccggaaguuguacggcuacgcgacuuucccucccacaaacccucgcgcccuuccuuuccuacuugggcccggcagaaagcuuaccauguucguguuccugguccuccugccccuggugagcauccagugcgugaaccucaccacccgcacgcagcugccgcccgccuacaccaacuccuucacccggggcgucuacuaccccgacaagguguuccgcagcuccgugcugcacagcacccaggaccucuuccugcccuucuucuccaacgucacgugguuccacgccauccacgugagcgggaccaacggcaccaagcgguucgacaacccggugcugcccuucaacgacggggucuacuucgcguccaccgagaaguccaacaucauccgcggcuggaucuucgggacgacccucgacagcaagacccagagccugcugaucgugaacaacgccaccaacguggucaucaaggugugcgaguuccaguucugcaacgaccccuuccucggcguguacuaccacaagaacaacaaguccugcauggagagcgaguuccgggucuacuccagcgccaacaacugcacguucgaguacgugucccagcccuuccugauggaccuggagggcaagcaggggaacuucaagaaccuccgcgaguucguguucaagaacaucgacggcuacuucaagaucuacagcaagcacaccccgaucaaccugguccgggaccugccccagggguucuccgcccucgagccccugguggaccugcccaucggcaucaacaucacccgcuuccagacccuccuggcccugcaccggagcuaccucacgccgggggacuccagcagcggcuggaccgcgggcgccgccgccuacuacgugggguaccugcagccccgcaccuuccugcucaaguacaacgagaacggcaccaucacggacgcggucgacugcgcccuggacccccuguccgagaccaagugcacccucaagagcuucaccguggagaaggggaucuaccagacguccaacuuccgggugcagcccaccgagagcaucguccgcuucccgaacaucaccaaccugugccccuucggcgagguguucaacgccacccgguucgccuccgucuacgccuggaaccgcaagcggaucagcaacugcguggcggacuacuccgugcuguacaacagcgccuccuucagcacguucaagugcuacggcgucucccccaccaagcucaacgaccugugcuucaccaacguguacgccgacagcuucgugauccgcggggacgagguccggcagaucgcccccggccagaccgggaagaucgccgacuacaacuacaagcugccggacgacuucacgggcugcgugaucgcguggaacuccaacaaccucgacagcaaggucgggggcaacuacaacuaccgcuaccggcuguuccgcaaguccaaccugaagcccuucgagcgggacaucagcaccgagaucuaccaggccggcuccacccccugcaacgggguggagggcuucaacugcuacuucccccuccagagcuacggguuccagccgaccaacggcgugggguaccagcccuaccgcguggucgugcuguccuucgagcugcuccacgcccccgccacggugugcggccccaagaaguccaccaaccuggucaagaacaagugcgugaacuucaacuucaacggccugaccgggaccggcgugcucaccgagagcaacaagaaguuccugccguuccagcaguucgggcgcgacaucgccgacacgaccgacgcgguccgggacccccagacccuggagauccuggacaucacccccugcagcuucggcggggugagcgugaucacgccgggcaccaacaccuccaaccaggucgccgugcucuaccagggcgugaacugcaccgagguccccguggccauccacgccgaccagcugacgcccaccuggcgcguguacagcaccggguccaacgucuuccagacccgggccggcugccugaucggggcggagcacgugaacaacagcuacgagugcgacauccccaucggcgccggcaucugcgccuccuaccagacgcagaccaacagcccgcgccgggcccgcuccguggcgagccaguccaucaucgccuacaccaugagccucggggccgagaacuccgucgccuacagcaacaacuccaucgccauccccaccaacuucacgaucagcgugaccaccgagauccugcccguguccaugaccaagacgagcgucgacugcaccauguacaucugcggcgacagcaccgagugcuccaaccugcuccugcaguacgggagcuucugcacccagcugaaccgggcgcucacgggcaucgccguggagcaggacaagaacacccaggagguguucgcccaggucaagcagaucuacaagacgcccccgaucaaggacuucgggggcuucaacuucucccagauccugcccgaccccagcaagcccuccaagcgcagcuucaucgaggaccuccuguucaacaaggugacccuggccgacgccggcuucaucaagcaguacggggacugccugggcgacaucgcggcccgggaccucaucugcgcccagaaguucaacgggcugaccgugcugccgccccuccugaccgacgagaugaucgcccaguacaccuccgcccugcucgcgggcaccaucacgagcggguggaccuucggcgccggcgccgcccugcagauccccuucgcgaugcagauggccuaccgcuucaacgggaucggcgucacccagaacgugcuguacgagaaccagaagcucaucgccaaccaguucaacuccgccaucgggaagauccaggacagccuguccagcaccgccuccgcgcugggcaagcuccaggacguggucaaccagaacgcccaggcccugaacacgcuggugaagcagcucagcuccaacuucggggccaucagcuccgugcugaacgacauccugagccggcucgacccgcccgaggccgagguccagaucgaccgccugaucaccggccggcugcagucccuccagaccuacgugacccagcagcugauccgcgcggccgagauccgggccagcgccaaccuggccgcgaccaagaugagcgagugcgugcucggccaguccaagcgcgucgacuucugcgggaagggcuaccaccugaugagcuucccccaguccgcgccccacggggugguguuccugcacgucacguacgugcccgcccaggagaagaacuucaccaccgccccggccaucugccacgacggcaaggcccacuucccccgggagggggucuucgugagcaacggcacccacugguucgugacgcagcgcaacuucuacgagccccagaucaucaccaccgacaacaccuucgucuccggcaacugcgacguggugaucgggaucgucaacaacacgguguacgacccccuccagccggagcuggacagcuucaaggaggagcuggacaaguacuucaagaaccacaccucccccgacguggaccucggcgacaucagcgggaucaacgccuccgucgugaacauccagaaggagaucgaccggcugaacgagguggccaagaaccugaacgagagccucaucgaccugcaggagcugggcaaguacgagcaguacaucaaguggcccugguacaucuggcucggcuucaucgccgggcugaucgcgaucgucauggugaccaucaugcugugcugcaugaccuccugcugcagcugccucaagggcugcugcuccugcgggagcugcugcaaguucgacgaggacgacuccgagccggugcugaagggcgucaagcugcacuacacgugaggacuaguguccaccugucccuccugggcugcuggauugucucguuuuccugccaaauaaacaggaucagcgcuuuacagaucucaaaggcucuuuucagagccaccaaaaaaaaaaaaaaaaaaaaaaaaaaaaaaaaaaaaaaaaaaaaaaaaaaaaaaaaaaaaaaaaaaaaaaaaaaaaaaaaaaaaaaaaaaaaaaaaaaaaa

SEQ ID NO: 23993 - RNA, 4129 nt, Artificial Sequence
  SARS-CoV-2/Wuhan/WIV05/2019__EPI_ISL_402128 spike protein mRNA gc (1-1273)(K986P_V987P)
aggagacccgugacccggaaguuguacggcuacgcgacuuucccucccacaaacccucgcgcccuuccuuuccuacuugggcccggcagaaagcuuaccauguucguguuccuggugcugcugccccuggugagcagccagugcgugaaccugaccacccggacccagcugccaccagccuacaccaacagcuucacccggggcgucuacuaccccgacaagguguuccggagcagcguccugcacagcacccaggaccuguuccugcccuucuucagcaacgugaccugguuccacgccauccacgugagcggcaccaacggcaccaagcgguucgacaaccccgugcugcccuucaacgacggcguguacuucgccagcaccgagaagagcaacaucauccggggcuggaucuucggcaccacccuggacagcaagacccagagccugcugaucgugaauaacgccaccaacguggugaucaaggugugcgaguuccaguucugcaacgaccccuuccugggcguguacuaccacaagaacaacaagagcuggauggagagcgaguuccggguguacagcagcgccaacaacugcaccuucgaguacgugagccagcccuuccugauggaccuggagggcaagcagggcaacuucaagaaccugcgggaguucguguucaagaacaucgacggcuacuucaagaucuacagcaagcacaccccaaucaaccuggugcgggaucugccccagggcuucucagcccuggagccccugguggaccugcccaucggcaucaacaucacccgguuccagacccugcuggcccugcaccggagcuaccugaccccaggcgacagcagcagcggguggacagcaggcgcggcugcuuacuacgugggcuaccugcagccccggaccuuccugcugaaguacaacgagaacggcaccaucaccgacgccguggacugcgcccuggacccucugagcgagaccaagugcacccugaagagcuucaccguggagaagggcaucuaccagaccagcaacuuccgggugcagcccaccgagagcaucgugcgguuccccaacaucaccaaccugugccccuucggcgagguguucaacgccacccgguucgccagcguguacgccuggaaccggaagcggaucagcaacugcguggccgacuacagcgugcuguacaacagcgccagcuucagcaccuucaagugcuacggcgugagccccaccaagcugaacgaccugugcuucaccaacguguacgccgacagcuucgugauccguggcgacgaggugcggcagaucgcacccggccagacaggcaagaucgccgacuacaacuacaagcugcccgacgacuucaccggcugcgugaucgccuggaacagcaacaaccucgacagcaaggugggcggcaacuacaacuaccuguaccggcuguuccggaagagcaaccugaagcccuucgagcgggacaucagcaccgagaucuaccaagccggcuccaccccuugcaacggcguggagggcuucaacugcuacuucccucugcagagcuacggcuuccagcccaccaacggcgugggcuaccagcccuaccgggugguggugcugagcuucgagcugcugcacgccccagccaccguguguggccccaagaagagcaccaaccuggugaagaacaagugcgugaacuucaacuucaacggccuuaccggcaccggcgugcugaccgagagcaacaagaaauuccugcccuuucagcaguucggccgggacaucgccgacaccaccgacgcugugcgggauccccagacccuggagauccuggacaucaccccuugcagcuucggcggcgugagcgugaucaccccaggcaccaacaccagcaaccagguggccgugcuguaccaggacgugaacugcaccgaggugcccguggccauccacgccgaccagcugacacccaccuggcgggucuacagcaccggcagcaacguguuccagacccgggccgguugccugaucggcgccgagcacgugaacaacagcuacgagugcgacauccccaucggcgccggcaucugugccagcuaccagacccagaccaauucaccccggagggcaaggagcguggccagccagagcaucaucgccuacaccaugagccugggcgccgagaacagcguggccuacagcaacaacagcaucgccauccccaccaacuucaccaucagcgugaccaccgagauucugcccgugagcaugaccaagaccagcguggacugcaccauguacaucugcggcgacagcaccgagugcagcaaccugcugcugcaguacggcagcuucugcacccagcugaaccgggcccugaccggcaucgccguggagcaggacaagaacacccaggagguguucgcccaggugaagcagaucuacaagaccccucccaucaaggacuucggcggcuucaacuucagccagauccugcccgaccccagcaagcccagcaagcggagcuucaucgaggaccugcuguucaacaaggugacccuagccgacgccggcuucaucaagcaguacggcgacugccucggcgacauagccgcccgggaccugaucugcgcccagaaguucaacggccugaccgugcugccuccccugcugaccgacgagaugaucgcccaguacaccagcgcccuguuagccggaaccaucaccagcggcuggacuuucggcgcuggagccgcucugcagauccccuucgccaugcagauggccuaccgguucaacggcaucggcgugacccagaacgugcuguacgagaaccagaagcugaucgccaaccaguucaacagcgccaucggcaagauccaggacagccugagcagcaccgcuagcgcccugggcaagcugcaggacguggugaaccagaacgcccaggcccugaacacccuggugaagcagcugagcagcaacuucggcgccaucagcagcgugcugaacgacauccugagccggcuggacccucccgaggccgaggugcagaucgaccggcugaucacuggccggcugcagagccugcagaccuacgugacccagcagcugauccgggccgccgagauucgggccagcgccaaccuggccgccaccaagaugagcgagugcgugcugggccagagcaagcggguggacuucugcggcaagggcuaccaccugaugagcuuuccccagagcgcaccccacggagugguguuccugcacgugaccuacgugcccgcccaggagaagaacuucaccaccgccccagccaucugccacgacggcaaggcccacuuuccccgggagggcguguucgugagcaacggcacccacugguucgugacccagcggaacuucuacgagccccagaucaucaccaccgacaacaccuucgugagcggcaacugcgacguggugaucggcaucgugaacaacaccguguacgauccccugcagcccgagcuggacagcuucaaggaggagcuggacaaguacuucaagaaucacaccagccccgacguggaccugggcgacaucagcggcaucaacgccagcguggugaacauccagaaggagaucgaucggcugaacgagguggccaagaaccugaacgagagccugaucgaccugcaggagcugggcaaguacgagcaguacaucaaguggcccugguacaucuggcugggcuucaucgccggccugaucgccaucgugauggugaccaucaugcugugcugcaugaccagcugcugcagcugccugaagggcuguugcagcugcggcagcugcugcaaguucgacgaggacgacagcgagcccgugcugaagggcgugaagcugcacuacaccugaggacuaguguccaccugucccuccugggcugcuggauugucucguuuuccugccaaauaaacaggaucagcgcuuuacagaucucaaaggcucuuuucagagccaccaaaaaaaaaaaaaaaaaaaaaaaaaaaaaaaaaaaaaaaaaaaaaaaaaaaaaaaaaaaaaaaaaaaaaaaaaaaaaaaaaaaaaaaaaaaaaaaaaaaaa

SEQ ID NO: 23994 - RNA, 4129 nt, Artificial Sequence
  SARS-CoV-2/Wuhan/WIV05/2019__EPI_ISL_402128 spike protein mRNA gc (1-1273)(K986P_V987P_ D614G)
aggagacccgugacccggaaguuguacggcuacgcgacuuucccucccacaaacccucgcgcccuuccuuuccuacuugggcccggcagaaagcuuaccauguucguguuccuggugcugcugccccuggugagcagccagugcgugaaccugaccacccggacccagcugccaccagccuacaccaacagcuucacccggggcgucuacuaccccgacaagguguuccggagcagcguccugcacagcacccaggaccuguuccugcccuucuucagcaacgugaccugguuccacgccauccacgugagcggcaccaacggcaccaagcgguucgacaaccccgugcugcccuucaacgacggcguguacuucgccagcaccgagaagagcaacaucauccggggcuggaucuucggcaccacccuggacagcaagacccagagccugcugaucgugaauaacgccaccaacguggugaucaaggugugcgaguuccaguucugcaacgaccccuuccugggcguguacuaccacaagaacaacaagagcuggauggagagcgaguuccggguguacagcagcgccaacaacugcaccuucgaguacgugagccagcccuuccugauggaccuggagggcaagcagggcaacuucaagaaccugcgggaguucguguucaagaacaucgacggcuacuucaagaucuacagcaagcacaccccaaucaaccuggugcgggaucugccccagggcuucucagcccuggagccccugguggaccugcccaucggcaucaacaucacccgguuccagacccugcuggcccugcaccggagcuaccugaccccaggcgacagcagcagcggguggacagcaggcgcggcugcuuacuacgugggcuaccugcagccccggaccuuccugcugaaguacaacgagaacggcaccaucaccgacgccguggacugcgcccuggacccucugagcgagaccaagugcacccugaagagcuucaccguggagaagggcaucuaccagaccagcaacuuccgggugcagcccaccgagagcaucgugcgguuccccaacaucaccaaccugugccccuucggcgagguguucaacgccacccgguucgccagcguguacgccuggaaccggaagcggaucagcaacugcguggccgacuacagcgugcuguacaacagcgccagcuucagcaccuucaagugcuacggcgugagccccaccaagcugaacgaccugugcuucaccaacguguacgccgacagcuucgugauccguggcgacgaggugcggcagaucgcacccggccagacaggcaagaucgccgacuacaacuacaagcugcccgacgacuucaccggcugcgugaucgccuggaacagcaacaaccucgacagcaaggugggcggcaacuacaacuaccuguaccggcuguuccggaagagcaaccugaagcccuucgagcgggacaucagcaccgagaucuaccaagccggcuccaccccuugcaacggcguggagggcuucaacugcuacuucccucugcagagcuacggcuuccagcccaccaacggcgugggcuaccagcccuaccgggugguggugcugagcuucgagcugcugcacgccccagccaccguguguggccccaagaagagcaccaaccuggugaagaacaagugcgugaacuucaacuucaacggccuuaccggcaccggcgugcugaccgagagcaacaagaaauuccugcccuuucagcaguucggccgggacaucgccgacaccaccgacgcugugcgggauccccagacccuggagauccuggacaucaccccuugcagcuucggcggcgugagcgugaucaccccaggcaccaacaccagcaaccagguggccgugcuguaccagggcgugaacugcaccgaggugcccguggccauccacgccgaccagcugacacccaccuggcgggucuacagcaccggcagcaacguguuccagacccgggccgguugccugaucggcgccgagcacgugaacaacagcuacgagugcgacauccccaucggcgccggcaucugugccagcuaccagacccagaccaauucaccccggagggcaaggagcguggccagccagagcaucaucgccuacaccaugagccugggcgccgagaacagcguggccuacagcaacaacagcaucgccauccccaccaacuucaccaucagcgugaccaccgagauucugcccgugagcaugaccaagaccagcguggacugcaccauguacaucugcggcgacagcaccgagugcagcaaccugcugcugcaguacggcagcuucugcacccagcugaaccgggcccugaccggcaucgccguggagcaggacaagaacacccaggagguguucgcccaggugaagcagaucuacaagaccccucccaucaaggacuucggcggcuucaacuucagccagauccugcccgaccccagcaagcccagcaagcggagcuucaucgaggaccugcuguucaacaaggugacccuagccgacgccggcuucaucaagcaguacggcgacugccucggcgacauagccgcccgggaccugaucugcgcccagaaguucaacggccugaccgugcugccuccccugcugaccgacgagaugaucgcccaguacaccagcgcccuguuagccggaaccaucaccagcggcuggacuuucggcgcuggagccgcucugcagauccccuucgccaugcagauggccuaccgguucaacggcaucggcgugacccagaacgugcuguacgagaaccagaagcugaucgccaaccaguucaacagcgccaucggcaagauccaggacagccugagcagcaccgcuagcgcccugggcaagcugcaggacguggugaaccagaacgcccaggcccugaacacccuggugaagcagcugagcagcaacuucggcgccaucagcagcgugcugaacgacauccugagccggcuggacccucccgaggccgaggugcagaucgaccggcugaucacuggccggcugcagagccugcagaccuacgugacccagcagcugauccgggccgccgagauucgggccagcgccaaccuggccgccaccaagaugagcgagugcgugcugggccagagcaagcggguggacuucugcggcaagggcuaccaccugaugagcuuuccccagagcgcaccccacggagugguguuccugcacgugaccuacgugcccgcccaggagaagaacuucaccaccgccccagccaucugccacgacggcaaggcccacuuuccccgggagggcguguucgugagcaacggcacccacugguucgugacccagcggaacuucuacgagccccagaucaucaccaccgacaacaccuucgugagcggcaacugcgacguggugaucggcaucgugaacaacaccguguacgauccccugcagcccgagcuggacagcuucaaggaggagcuggacaaguacuucaagaaucacaccagccccgacguggaccugggcgacaucagcggcaucaacgccagcguggugaacauccagaaggagaucgaucggcugaacgagguggccaagaaccugaacgagagccugaucgaccugcaggagcugggcaaguacgagcaguacaucaaguggcccugguacaucuggcugggcuucaucgccggccugaucgccaucgugauggugaccaucaugcugugcugcaugaccagcugcugcagcugccugaagggcuguugcagcugcggcagcugcugcaaguucgacgaggacgacagcgagcccgugcugaagggcgugaagcugcacuacaccugaggacuaguguccaccugucccuccugggcugcuggauugucucguuuuccugccaaauaaacaggaucagcgcuuuacagaucucaaaggcucuuuucagagccaccaaaaaaaaaaaaaaaaaaaaaaaaaaaaaaaaaaaaaaaaaaaaaaaaaaaaaaaaaaaaaaaaaaaaaaaaaaaaaaaaaaaaaaaaaaaaaaaaaaaaa

SEQ ID NO: 23995 - RNA, 4129 nt, Artificial Sequence
  SARS-CoV-2/Wuhan/WIV05/2019__EPI_ISL_402128 spike protein mRNA gc (1-1273)(K986P_V987P_A222V_D614G)
aggagacccgugacccggaaguuguacggcuacgcgacuuucccucccacaaacccucgcgcccuuccuuuccuacuugggcccggcagaaagcuuaccauguucguguuccuggugcugcugccccuggugagcagccagugcgugaaccugaccacccggacccagcugccaccagccuacaccaacagcuucacccggggcgucuacuaccccgacaagguguuccggagcagcguccugcacagcacccaggaccuguuccugcccuucuucagcaacgugaccugguuccacgccauccacgugagcggcaccaacggcaccaagcgguucgacaaccccgugcugcccuucaacgacggcguguacuucgccagcaccgagaagagcaacaucauccggggcuggaucuucggcaccacccuggacagcaagacccagagccugcugaucgugaauaacgccaccaacguggugaucaaggugugcgaguuccaguucugcaacgaccccuuccugggcguguacuaccacaagaacaacaagagcuggauggagagcgaguuccggguguacagcagcgccaacaacugcaccuucgaguacgugagccagcccuuccugauggaccuggagggcaagcagggcaacuucaagaaccugcgggaguucguguucaagaacaucgacggcuacuucaagaucuacagcaagcacaccccaaucaaccuggugcgggaucugccccagggcuucucagugcuggagccccugguggaccugcccaucggcaucaacaucacccgguuccagacccugcuggcccugcaccggagcuaccugaccccaggcgacagcagcagcggguggacagcaggcgcggcugcuuacuacgugggcuaccugcagccccggaccuuccugcugaaguacaacgagaacggcaccaucaccgacgccguggacugcgcccuggacccucugagcgagaccaagugcacccugaagagcuucaccguggagaagggcaucuaccagaccagcaacuuccgggugcagcccaccgagagcaucgugcgguuccccaacaucaccaaccugugccccuucggcgagguguucaacgccacccgguucgccagcguguacgccuggaaccggaagcggaucagcaacugcguggccgacuacagcgugcuguacaacagcgccagcuucagcaccuucaagugcuacggcgugagccccaccaagcugaacgaccugugcuucaccaacguguacgccgacagcuucgugauccguggcgacgaggugcggcagaucgcacccggccagacaggcaagaucgccgacuacaacuacaagcugcccgacgacuucaccggcugcgugaucgccuggaacagcaacaaccucgacagcaaggugggcggcaacuacaacuaccuguaccggcuguuccggaagagcaaccugaagcccuucgagcgggacaucagcaccgagaucuaccaagccggcuccaccccuugcaacggcguggagggcuucaacugcuacuucccucugcagagcuacggcuuccagcccaccaacggcgugggcuaccagcccuaccgggugguggugcugagcuucgagcugcugcacgccccagccaccguguguggccccaagaagagcaccaaccuggugaagaacaagugcgugaacuucaacuucaacggccuuaccggcaccggcgugcugaccgagagcaacaagaaauuccugcccuuucagcaguucggccgggacaucgccgacaccaccgacgcugugcgggauccccagacccuggagauccuggacaucaccccuugcagcuucggcggcgugagcgugaucaccccaggcaccaacaccagcaaccagguggccgugcuguaccagggcgugaacugcaccgaggugcccguggccauccacgccgaccagcugacacccaccuggcgggucuacagcaccggcagcaacguguuccagacccgggccgguugccugaucggcgccgagcacgugaacaacagcuacgagugcgacauccccaucggcgccggcaucugugccagcuaccagacccagaccaauucaccccggagggcaaggagcguggccagccagagcaucaucgccuacaccaugagccugggcgccgagaacagcguggccuacagcaacaacagcaucgccauccccaccaacuucaccaucagcgugaccaccgagauucugcccgugagcaugaccaagaccagcguggacugcaccauguacaucugcggcgacagcaccgagugcagcaaccugcugcugcaguacggcagcuucugcacccagcugaaccgggcccugaccggcaucgccguggagcaggacaagaacacccaggagguguucgcccaggugaagcagaucuacaagaccccucccaucaaggacuucggcggcuucaacuucagccagauccugcccgaccccagcaagcccagcaagcggagcuucaucgaggaccugcuguucaacaaggugacccuagccgacgccggcuucaucaagcaguacggcgacugccucggcgacauagccgcccgggaccugaucugcgcccagaaguucaacggccugaccgugcugccuccccugcugaccgacgagaugaucgcccaguacaccagcgcccuguuagccggaaccaucaccagcggcuggacuuucggcgcuggagccgcucugcagauccccuucgccaugcagauggccuaccgguucaacggcaucggcgugacccagaacgugcuguacgagaaccagaagcugaucgccaaccaguucaacagcgccaucggcaagauccaggacagccugagcagcaccgcuagcgcccugggcaagcugcaggacguggugaaccagaacgcccaggcccugaacacccuggugaagcagcugagcagcaacuucggcgccaucagcagcgugcugaacgacauccugagccggcuggacccucccgaggccgaggugcagaucgaccggcugaucacuggccggcugcagagccugcagaccuacgugacccagcagcugauccgggccgccgagauucgggccagcgccaaccuggccgccaccaagaugagcgagugcgugcugggccagagcaagcggguggacuucugcggcaagggcuaccaccugaugagcuuuccccagagcgcaccccacggagugguguuccugcacgugaccuacgugcccgcccaggagaagaacuucaccaccgccccagccaucugccacgacggcaaggcccacuuuccccgggagggcguguucgugagcaacggcacccacugguucgugacccagcggaacuucuacgagccccagaucaucaccaccgacaacaccuucgugagcggcaacugcgacguggugaucggcaucgugaacaacaccguguacgauccccugcagcccgagcuggacagcuucaaggaggagcuggacaaguacuucaagaaucacaccagccccgacguggaccugggcgacaucagcggcaucaacgccagcguggugaacauccagaaggagaucgaucggcugaacgagguggccaagaaccugaacgagagccugaucgaccugcaggagcugggcaaguacgagcaguacaucaaguggcccugguacaucuggcugggcuucaucgccggccugaucgccaucgugauggugaccaucaugcugugcugcaugaccagcugcugcagcugccugaagggcuguugcagcugcggcagcugcugcaaguucgacgaggacgacagcgagcccgugcugaagggcgugaagcugcacuacaccugaggacuaguguccaccugucccuccugggcugcuggauugucucguuuuccugccaaauaaacaggaucagcgcuuuacagaucucaaaggcucuuuucagagccaccaaaaaaaaaaaaaaaaaaaaaaaaaaaaaaaaaaaaaaaaaaaaaaaaaaaaaaaaaaaaaaaaaaaaaaaaaaaaaaaaaaaaaaaaaaaaaaaaaaaaa

SEQ ID NO: 23996 - RNA, 4129 nt, Artificial Sequence
  SARS-CoV-2/Wuhan/WIV05/2019__EPI_ISL_402128 spike protein mRNA gc (1-1273)(K986P_V987P_N439K_D614G)
aggagacccgugacccggaaguuguacggcuacgcgacuuucccucccacaaacccucgcgcccuuccuuuccuacuugggcccggcagaaagcuuaccauguucguguuccuggugcugcugccccuggugagcagccagugcgugaaccugaccacccggacccagcugccaccagccuacaccaacagcuucacccggggcgucuacuaccccgacaagguguuccggagcagcguccugcacagcacccaggaccuguuccugcccuucuucagcaacgugaccugguuccacgccauccacgugagcggcaccaacggcaccaagcgguucgacaaccccgugcugcccuucaacgacggcguguacuucgccagcaccgagaagagcaacaucauccggggcuggaucuucggcaccacccuggacagcaagacccagagccugcugaucgugaauaacgccaccaacguggugaucaaggugugcgaguuccaguucugcaacgaccccuuccugggcguguacuaccacaagaacaacaagagcuggauggagagcgaguuccggguguacagcagcgccaacaacugcaccuucgaguacgugagccagcccuuccugauggaccuggagggcaagcagggcaacuucaagaaccugcgggaguucguguucaagaacaucgacggcuacuucaagaucuacagcaagcacaccccaaucaaccuggugcgggaucugccccagggcuucucagcccuggagccccugguggaccugcccaucggcaucaacaucacccgguuccagacccugcuggcccugcaccggagcuaccugaccccaggcgacagcagcagcggguggacagcaggcgcggcugcuuacuacgugggcuaccugcagccccggaccuuccugcugaaguacaacgagaacggcaccaucaccgacgccguggacugcgcccuggacccucugagcgagaccaagugcacccugaagagcuucaccguggagaagggcaucuaccagaccagcaacuuccgggugcagcccaccgagagcaucgugcgguuccccaacaucaccaaccugugccccuucggcgagguguucaacgccacccgguucgccagcguguacgccuggaaccggaagcggaucagcaacugcguggccgacuacagcgugcuguacaacagcgccagcuucagcaccuucaagugcuacggcgugagccccaccaagcugaacgaccugugcuucaccaacguguacgccgacagcuucgugauccguggcgacgaggugcggcagaucgcacccggccagacaggcaagaucgccgacuacaacuacaagcugcccgacgacuucaccggcugcgugaucgccuggaacagcaagaaccucgacagcaaggugggcggcaacuacaacuaccuguaccggcuguuccggaagagcaaccugaagcccuucgagcgggacaucagcaccgagaucuaccaagccggcuccaccccuugcaacggcguggagggcuucaacugcuacuucccucugcagagcuacggcuuccagcccaccaacggcgugggcuaccagcccuaccgggugguggugcugagcuucgagcugcugcacgccccagccaccguguguggccccaagaagagcaccaaccuggugaagaacaagugcgugaacuucaacuucaacggccuuaccggcaccggcgugcugaccgagagcaacaagaaauuccugcccuuucagcaguucggccgggacaucgccgacaccaccgacgcugugcgggauccccagacccuggagauccuggacaucaccccuugcagcuucggcggcgugagcgugaucaccccaggcaccaacaccagcaaccagguggccgugcuguaccagggcgugaacugcaccgaggugcccguggccauccacgccgaccagcugacacccaccuggcgggucuacagcaccggcagcaacguguuccagacccgggccgguugccugaucggcgccgagcacgugaacaacagcuacgagugcgacauccccaucggcgccggcaucugugccagcuaccagacccagaccaauucaccccggagggcaaggagcguggccagccagagcaucaucgccuacaccaugagccugggcgccgagaacagcguggccuacagcaacaacagcaucgccauccccaccaacuucaccaucagcgugaccaccgagauucugcccgugagcaugaccaagaccagcguggacugcaccauguacaucugcggcgacagcaccgagugcagcaaccugcugcugcaguacggcagcuucugcacccagcugaaccgggcccugaccggcaucgccguggagcaggacaagaacacccaggagguguucgcccaggugaagcagaucuacaagaccccucccaucaaggacuucggcggcuucaacuucagccagauccugcccgaccccagcaagcccagcaagcggagcuucaucgaggaccugcuguucaacaaggugacccuagccgacgccggcuucaucaagcaguacggcgacugccucggcgacauagccgcccgggaccugaucugcgcccagaaguucaacggccugaccgugcugccuccccugcugaccgacgagaugaucgcccaguacaccagcgcccuguuagccggaaccaucaccagcggcuggacuuucggcgcuggagccgcucugcagauccccuucgccaugcagauggccuaccgguucaacggcaucggcgugacccagaacgugcuguacgagaaccagaagcugaucgccaaccaguucaacagcgccaucggcaagauccaggacagccugagcagcaccgcuagcgcccugggcaagcugcaggacguggugaaccagaacgcccaggcccugaacacccuggugaagcagcugagcagcaacuucggcgccaucagcagcgugcugaacgacauccugagccggcuggacccucccgaggccgaggugcagaucgaccggcugaucacuggccggcugcagagccugcagaccuacgugacccagcagcugauccgggccgccgagauucgggccagcgccaaccuggccgccaccaagaugagcgagugcgugcugggccagagcaagcggguggacuucugcggcaagggcuaccaccugaugagcuuuccccagagcgcaccccacggagugguguuccugcacgugaccuacgugcccgcccaggagaagaacuucaccaccgccccagccaucugccacgacggcaaggcccacuuuccccgggagggcguguucgugagcaacggcacccacugguucgugacccagcggaacuucuacgagccccagaucaucaccaccgacaacaccuucgugagcggcaacugcgacguggugaucggcaucgugaacaacaccguguacgauccccugcagcccgagcuggacagcuucaaggaggagcuggacaaguacuucaagaaucacaccagccccgacguggaccugggcgacaucagcggcaucaacgccagcguggugaacauccagaaggagaucgaucggcugaacgagguggccaagaaccugaacgagagccugaucgaccugcaggagcugggcaaguacgagcaguacaucaaguggcccugguacaucuggcugggcuucaucgccggccugaucgccaucgugauggugaccaucaugcugugcugcaugaccagcugcugcagcugccugaagggcuguugcagcugcggcagcugcugcaaguucgacgaggacgacagcgagcccgugcugaagggcgugaagcugcacuacaccugaggacuaguguccaccugucccuccugggcugcuggauugucucguuuuccugccaaauaaacaggaucagcgcuuuacagaucucaaaggcucuuuucagagccaccaaaaaaaaaaaaaaaaaaaaaaaaaaaaaaaaaaaaaaaaaaaaaaaaaaaaaaaaaaaaaaaaaaaaaaaaaaaaaaaaaaaaaaaaaaaaaaaaaaaaa

SEQ ID NO: 23997 - RNA, 4129 nt, Artificial Sequence
  SARS-CoV-2/Wuhan/WIV05/2019__EPI_ISL_402128 spike protein mRNA gc (1-1273)(K986P_V987P_S477N_D614G)
aggagacccgugacccggaaguuguacggcuacgcgacuuucccucccacaaacccucgcgcccuuccuuuccuacuugggcccggcagaaagcuuaccauguucguguuccuggugcugcugccccuggugagcagccagugcgugaaccugaccacccggacccagcugccaccagccuacaccaacagcuucacccggggcgucuacuaccccgacaagguguuccggagcagcguccugcacagcacccaggaccuguuccugcccuucuucagcaacgugaccugguuccacgccauccacgugagcggcaccaacggcaccaagcgguucgacaaccccgugcugcccuucaacgacggcguguacuucgccagcaccgagaagagcaacaucauccggggcuggaucuucggcaccacccuggacagcaagacccagagccugcugaucgugaauaacgccaccaacguggugaucaaggugugcgaguuccaguucugcaacgaccccuuccugggcguguacuaccacaagaacaacaagagcuggauggagagcgaguuccggguguacagcagcgccaacaacugcaccuucgaguacgugagccagcccuuccugauggaccuggagggcaagcagggcaacuucaagaaccugcgggaguucguguucaagaacaucgacggcuacuucaagaucuacagcaagcacaccccaaucaaccuggugcgggaucugccccagggcuucucagcccuggagccccugguggaccugcccaucggcaucaacaucacccgguuccagacccugcuggcccugcaccggagcuaccugaccccaggcgacagcagcagcggguggacagcaggcgcggcugcuuacuacgugggcuaccugcagccccggaccuuccugcugaaguacaacgagaacggcaccaucaccgacgccguggacugcgcccuggacccucugagcgagaccaagugcacccugaagagcuucaccguggagaagggcaucuaccagaccagcaacuuccgggugcagcccaccgagagcaucgugcgguuccccaacaucaccaaccugugccccuucggcgagguguucaacgccacccgguucgccagcguguacgccuggaaccggaagcggaucagcaacugcguggccgacuacagcgugcuguacaacagcgccagcuucagcaccuucaagugcuacggcgugagccccaccaagcugaacgaccugugcuucaccaacguguacgccgacagcuucgugauccguggcgacgaggugcggcagaucgcacccggccagacaggcaagaucgccgacuacaacuacaagcugcccgacgacuucaccggcugcgugaucgccuggaacagcaacaaccucgacagcaaggugggcggcaacuacaacuaccuguaccggcuguuccggaagagcaaccugaagcccuucgagcgggacaucagcaccgagaucuaccaagccggcaacaccccuugcaacggcguggagggcuucaacugcuacuucccucugcagagcuacggcuuccagcccaccaacggcgugggcuaccagcccuaccgggugguggugcugagcuucgagcugcugcacgccccagccaccguguguggccccaagaagagcaccaaccuggugaagaacaagugcgugaacuucaacuucaacggccuuaccggcaccggcgugcugaccgagagcaacaagaaauuccugcccuuucagcaguucggccgggacaucgccgacaccaccgacgcugugcgggauccccagacccuggagauccuggacaucaccccuugcagcuucggcggcgugagcgugaucaccccaggcaccaacaccagcaaccagguggccgugcuguaccagggcgugaacugcaccgaggugcccguggccauccacgccgaccagcugacacccaccuggcgggucuacagcaccggcagcaacguguuccagacccgggccgguugccugaucggcgccgagcacgugaacaacagcuacgagugcgacauccccaucggcgccggcaucugugccagcuaccagacccagaccaauucaccccggagggcaaggagcguggccagccagagcaucaucgccuacaccaugagccugggcgccgagaacagcguggccuacagcaacaacagcaucgccauccccaccaacuucaccaucagcgugaccaccgagauucugcccgugagcaugaccaagaccagcguggacugcaccauguacaucugcggcgacagcaccgagugcagcaaccugcugcugcaguacggcagcuucugcacccagcugaaccgggcccugaccggcaucgccguggagcaggacaagaacacccaggagguguucgcccaggugaagcagaucuacaagaccccucccaucaaggacuucggcggcuucaacuucagccagauccugcccgaccccagcaagcccagcaagcggagcuucaucgaggaccugcuguucaacaaggugacccuagccgacgccggcuucaucaagcaguacggcgacugccucggcgacauagccgcccgggaccugaucugcgcccagaaguucaacggccugaccgugcugccuccccugcugaccgacgagaugaucgcccaguacaccagcgcccuguuagccggaaccaucaccagcggcuggacuuucggcgcuggagccgcucugcagauccccuucgccaugcagauggccuaccgguucaacggcaucggcgugacccagaacgugcuguacgagaaccagaagcugaucgccaaccaguucaacagcgccaucggcaagauccaggacagccugagcagcaccgcuagcgcccugggcaagcugcaggacguggugaaccagaacgcccaggcccugaacacccuggugaagcagcugagcagcaacuucggcgccaucagcagcgugcugaacgacauccugagccggcuggacccucccgaggccgaggugcagaucgaccggcugaucacuggccggcugcagagccugcagaccuacgugacccagcagcugauccgggccgccgagauucgggccagcgccaaccuggccgccaccaagaugagcgagugcgugcugggccagagcaagcggguggacuucugcggcaagggcuaccaccugaugagcuuuccccagagcgcaccccacggagugguguuccugcacgugaccuacgugcccgcccaggagaagaacuucaccaccgccccagccaucugccacgacggcaaggcccacuuuccccgggagggcguguucgugagcaacggcacccacugguucgugacccagcggaacuucuacgagccccagaucaucaccaccgacaacaccuucgugagcggcaacugcgacguggugaucggcaucgugaacaacaccguguacgauccccugcagcccgagcuggacagcuucaaggaggagcuggacaaguacuucaagaaucacaccagccccgacguggaccugggcgacaucagcggcaucaacgccagcguggugaacauccagaaggagaucgaucggcugaacgagguggccaagaaccugaacgagagccugaucgaccugcaggagcugggcaaguacgagcaguacaucaaguggcccugguacaucuggcugggcuucaucgccggccugaucgccaucgugauggugaccaucaugcugugcugcaugaccagcugcugcagcugccugaagggcuguugcagcugcggcagcugcugcaaguucgacgaggacgacagcgagcccgugcugaagggcgugaagcugcacuacaccugaggacuaguguccaccugucccuccugggcugcuggauugucucguuuuccugccaaauaaacaggaucagcgcuuuacagaucucaaaggcucuuuucagagccaccaaaaaaaaaaaaaaaaaaaaaaaaaaaaaaaaaaaaaaaaaaaaaaaaaaaaaaaaaaaaaaaaaaaaaaaaaaaaaaaaaaaaaaaaaaaaaaaaaaaaa

SEQ ID NO: 23998 - RNA, 4129 nt, Artificial Sequence
  SARS-CoV-2/Wuhan/WIV05/2019__EPI_ISL_402128 spike protein mRNA gc (1-1273)(K986P_V987P_N501Y_D614G)
aggagacccgugacccggaaguuguacggcuacgcgacuuucccucccacaaacccucgcgcccuuccuuuccuacuugggcccggcagaaagcuuaccauguucguguuccuggugcugcugccccuggugagcagccagugcgugaaccugaccacccggacccagcugccaccagccuacaccaacagcuucacccggggcgucuacuaccccgacaagguguuccggagcagcguccugcacagcacccaggaccuguuccugcccuucuucagcaacgugaccugguuccacgccauccacgugagcggcaccaacggcaccaagcgguucgacaaccccgugcugcccuucaacgacggcguguacuucgccagcaccgagaagagcaacaucauccggggcuggaucuucggcaccacccuggacagcaagacccagagccugcugaucgugaauaacgccaccaacguggugaucaaggugugcgaguuccaguucugcaacgaccccuuccugggcguguacuaccacaagaacaacaagagcuggauggagagcgaguuccggguguacagcagcgccaacaacugcaccuucgaguacgugagccagcccuuccugauggaccuggagggcaagcagggcaacuucaagaaccugcgggaguucguguucaagaacaucgacggcuacuucaagaucuacagcaagcacaccccaaucaaccuggugcgggaucugccccagggcuucucagcccuggagccccugguggaccugcccaucggcaucaacaucacccgguuccagacccugcuggcccugcaccggagcuaccugaccccaggcgacagcagcagcggguggacagcaggcgcggcugcuuacuacgugggcuaccugcagccccggaccuuccugcugaaguacaacgagaacggcaccaucaccgacgccguggacugcgcccuggacccucugagcgagaccaagugcacccugaagagcuucaccguggagaagggcaucuaccagaccagcaacuuccgggugcagcccaccgagagcaucgugcgguuccccaacaucaccaaccugugccccuucggcgagguguucaacgccacccgguucgccagcguguacgccuggaaccggaagcggaucagcaacugcguggccgacuacagcgugcuguacaacagcgccagcuucagcaccuucaagugcuacggcgugagccccaccaagcugaacgaccugugcuucaccaacguguacgccgacagcuucgugauccguggcgacgaggugcggcagaucgcacccggccagacaggcaagaucgccgacuacaacuacaagcugcccgacgacuucaccggcugcgugaucgccuggaacagcaacaaccucgacagcaaggugggcggcaacuacaacuaccuguaccggcuguuccggaagagcaaccugaagcccuucgagcgggacaucagcaccgagaucuaccaagccggcuccaccccuugcaacggcguggagggcuucaacugcuacuucccucugcagagcuacggcuuccagcccaccuacggcgugggcuaccagcccuaccgggugguggugcugagcuucgagcugcugcacgccccagccaccguguguggccccaagaagagcaccaaccuggugaagaacaagugcgugaacuucaacuucaacggccuuaccggcaccggcgugcugaccgagagcaacaagaaauuccugcccuuucagcaguucggccgggacaucgccgacaccaccgacgcugugcgggauccccagacccuggagauccuggacaucaccccuugcagcuucggcggcgugagcgugaucaccccaggcaccaacaccagcaaccagguggccgugcuguaccagggcgugaacugcaccgaggugcccguggccauccacgccgaccagcugacacccaccuggcgggucuacagcaccggcagcaacguguuccagacccgggccgguugccugaucggcgccgagcacgugaacaacagcuacgagugcgacauccccaucggcgccggcaucugugccagcuaccagacccagaccaauucaccccggagggcaaggagcguggccagccagagcaucaucgccuacaccaugagccugggcgccgagaacagcguggccuacagcaacaacagcaucgccauccccaccaacuucaccaucagcgugaccaccgagauucugcccgugagcaugaccaagaccagcguggacugcaccauguacaucugcggcgacagcaccgagugcagcaaccugcugcugcaguacggcagcuucugcacccagcugaaccgggcccugaccggcaucgccguggagcaggacaagaacacccaggagguguucgcccaggugaagcagaucuacaagaccccucccaucaaggacuucggcggcuucaacuucagccagauccugcccgaccccagcaagcccagcaagcggagcuucaucgaggaccugcuguucaacaaggugacccuagccgacgccggcuucaucaagcaguacggcgacugccucggcgacauagccgcccgggaccugaucugcgcccagaaguucaacggccugaccgugcugccuccccugcugaccgacgagaugaucgcccaguacaccagcgcccuguuagccggaaccaucaccagcggcuggacuuucggcgcuggagccgcucugcagauccccuucgccaugcagauggccuaccgguucaacggcaucggcgugacccagaacgugcuguacgagaaccagaagcugaucgccaaccaguucaacagcgccaucggcaagauccaggacagccugagcagcaccgcuagcgcccugggcaagcugcaggacguggugaaccagaacgcccaggcccugaacacccuggugaagcagcugagcagcaacuucggcgccaucagcagcgugcugaacgacauccugagccggcuggacccucccgaggccgaggugcagaucgaccggcugaucacuggccggcugcagagccugcagaccuacgugacccagcagcugauccgggccgccgagauucgggccagcgccaaccuggccgccaccaagaugagcgagugcgugcugggccagagcaagcggguggacuucugcggcaagggcuaccaccugaugagcuuuccccagagcgcaccccacggagugguguuccugcacgugaccuacgugcccgcccaggagaagaacuucaccaccgccccagccaucugccacgacggcaaggcccacuuuccccgggagggcguguucgugagcaacggcacccacugguucgugacccagcggaacuucuacgagccccagaucaucaccaccgacaacaccuucgugagcggcaacugcgacguggugaucggcaucgugaacaacaccguguacgauccccugcagcccgagcuggacagcuucaaggaggagcuggacaaguacuucaagaaucacaccagccccgacguggaccugggcgacaucagcggcaucaacgccagcguggugaacauccagaaggagaucgaucggcugaacgagguggccaagaaccugaacgagagccugaucgaccugcaggagcugggcaaguacgagcaguacaucaaguggcccugguacaucuggcugggcuucaucgccggccugaucgccaucgugauggugaccaucaugcugugcugcaugaccagcugcugcagcugccugaagggcuguugcagcugcggcagcugcugcaaguucgacgaggacgacagcgagcccgugcugaagggcgugaagcugcacuacaccugaggacuaguguccaccugucccuccugggcugcuggauugucucguuuuccugccaaauaaacaggaucagcgcuuuacagaucucaaaggcucuuuucagagccaccaaaaaaaaaaaaaaaaaaaaaaaaaaaaaaaaaaaaaaaaaaaaaaaaaaaaaaaaaaaaaaaaaaaaaaaaaaaaaaaaaaaaaaaaaaaaaaaaaaaaa

SEQ ID NO: 23999 - RNA, 4123 nt, Artificial Sequence
  SARS-CoV-2/Wuhan/WIV05/2019__EPI_ISL_402128 spike protein mRNA gc (1-1273)(K986P_V987P_H69del_V70del_D614G)
aggagacccgugacccggaaguuguacggcuacgcgacuuucccucccacaaacccucgcgcccuuccuuuccuacuugggcccggcagaaagcuuaccauguucguguuccuggugcugcugccccuggugagcagccagugcgugaaccugaccacccggacccagcugccaccagccuacaccaacagcuucacccggggcgucuacuaccccgacaagguguuccggagcagcguccugcacagcacccaggaccuguuccugcccuucuucagcaacgugaccugguuccacgccaucagcggcaccaacggcaccaagcgguucgacaaccccgugcugcccuucaacgacggcguguacuucgccagcaccgagaagagcaacaucauccggggcuggaucuucggcaccacccuggacagcaagacccagagccugcugaucgugaauaacgccaccaacguggugaucaaggugugcgaguuccaguucugcaacgaccccuuccugggcguguacuaccacaagaacaacaagagcuggauggagagcgaguuccggguguacagcagcgccaacaacugcaccuucgaguacgugagccagcccuuccugauggaccuggagggcaagcagggcaacuucaagaaccugcgggaguucguguucaagaacaucgacggcuacuucaagaucuacagcaagcacaccccaaucaaccuggugcgggaucugccccagggcuucucagcccuggagccccugguggaccugcccaucggcaucaacaucacccgguuccagacccugcuggcccugcaccggagcuaccugaccccaggcgacagcagcagcggguggacagcaggcgcggcugcuuacuacgugggcuaccugcagccccggaccuuccugcugaaguacaacgagaacggcaccaucaccgacgccguggacugcgcccuggacccucugagcgagaccaagugcacccugaagagcuucaccguggagaagggcaucuaccagaccagcaacuuccgggugcagcccaccgagagcaucgugcgguuccccaacaucaccaaccugugccccuucggcgagguguucaacgccacccgguucgccagcguguacgccuggaaccggaagcggaucagcaacugcguggccgacuacagcgugcuguacaacagcgccagcuucagcaccuucaagugcuacggcgugagccccaccaagcugaacgaccugugcuucaccaacguguacgccgacagcuucgugauccguggcgacgaggugcggcagaucgcacccggccagacaggcaagaucgccgacuacaacuacaagcugcccgacgacuucaccggcugcgugaucgccuggaacagcaacaaccucgacagcaaggugggcggcaacuacaacuaccuguaccggcuguuccggaagagcaaccugaagcccuucgagcgggacaucagcaccgagaucuaccaagccggcuccaccccuugcaacggcguggagggcuucaacugcuacuucccucugcagagcuacggcuuccagcccaccaacggcgugggcuaccagcccuaccgggugguggugcugagcuucgagcugcugcacgccccagccaccguguguggccccaagaagagcaccaaccuggugaagaacaagugcgugaacuucaacuucaacggccuuaccggcaccggcgugcugaccgagagcaacaagaaauuccugcccuuucagcaguucggccgggacaucgccgacaccaccgacgcugugcgggauccccagacccuggagauccuggacaucaccccuugcagcuucggcggcgugagcgugaucaccccaggcaccaacaccagcaaccagguggccgugcuguaccagggcgugaacugcaccgaggugcccguggccauccacgccgaccagcugacacccaccuggcgggucuacagcaccggcagcaacguguuccagacccgggccgguugccugaucggcgccgagcacgugaacaacagcuacgagugcgacauccccaucggcgccggcaucugugccagcuaccagacccagaccaauucaccccggagggcaaggagcguggccagccagagcaucaucgccuacaccaugagccugggcgccgagaacagcguggccuacagcaacaacagcaucgccauccccaccaacuucaccaucagcgugaccaccgagauucugcccgugagcaugaccaagaccagcguggacugcaccauguacaucugcggcgacagcaccgagugcagcaaccugcugcugcaguacggcagcuucugcacccagcugaaccgggcccugaccggcaucgccguggagcaggacaagaacacccaggagguguucgcccaggugaagcagaucuacaagaccccucccaucaaggacuucggcggcuucaacuucagccagauccugcccgaccccagcaagcccagcaagcggagcuucaucgaggaccugcuguucaacaaggugacccuagccgacgccggcuucaucaagcaguacggcgacugccucggcgacauagccgcccgggaccugaucugcgcccagaaguucaacggccugaccgugcugccuccccugcugaccgacgagaugaucgcccaguacaccagcgcccuguuagccggaaccaucaccagcggcuggacuuucggcgcuggagccgcucugcagauccccuucgccaugcagauggccuaccgguucaacggcaucggcgugacccagaacgugcuguacgagaaccagaagcugaucgccaaccaguucaacagcgccaucggcaagauccaggacagccugagcagcaccgcuagcgcccugggcaagcugcaggacguggugaaccagaacgcccaggcccugaacacccuggugaagcagcugagcagcaacuucggcgccaucagcagcgugcugaacgacauccugagccggcuggacccucccgaggccgaggugcagaucgaccggcugaucacuggccggcugcagagccugcagaccuacgugacccagcagcugauccgggccgccgagauucgggccagcgccaaccuggccgccaccaagaugagcgagugcgugcugggccagagcaagcggguggacuucugcggcaagggcuaccaccugaugagcuuuccccagagcgcaccccacggagugguguuccugcacgugaccuacgugcccgcccaggagaagaacuucaccaccgccccagccaucugccacgacggcaaggcccacuuuccccgggagggcguguucgugagcaacggcacccacugguucgugacccagcggaacuucuacgagccccagaucaucaccaccgacaacaccuucgugagcggcaacugcgacguggugaucggcaucgugaacaacaccguguacgauccccugcagcccgagcuggacagcuucaaggaggagcuggacaaguacuucaagaaucacaccagccccgacguggaccugggcgacaucagcggcaucaacgccagcguggugaacauccagaaggagaucgaucggcugaacgagguggccaagaaccugaacgagagccugaucgaccugcaggagcugggcaaguacgagcaguacaucaaguggcccugguacaucuggcugggcuucaucgccggccugaucgccaucgugauggugaccaucaugcugugcugcaugaccagcugcugcagcugccugaagggcuguugcagcugcggcagcugcugcaaguucgacgaggacgacagcgagcccgugcugaagggcgugaagcugcacuacaccugaggacuaguguccaccugucccuccugggcugcuggauugucucguuuuccugccaaauaaacaggaucagcgcuuuacagaucucaaaggcucuuuucagagccaccaaaaaaaaaaaaaaaaaaaaaaaaaaaaaaaaaaaaaaaaaaaaaaaaaaaaaaaaaaaaaaaaaaaaaaaaaaaaaaaaaaaaaaaaaaaaaaaaaaaaa

SEQ ID NO: 24000 - RNA, 4129 nt, Artificial Sequence
  SARS-CoV-2/Wuhan/WIV05/2019__EPI_ISL_402128 spike protein mRNA gc (1-1273)(K986P_V987P_Y453F_D614G)
aggagacccgugacccggaaguuguacggcuacgcgacuuucccucccacaaacccucgcgcccuuccuuuccuacuugggcccggcagaaagcuuaccauguucguguuccuggugcugcugccccuggugagcagccagugcgugaaccugaccacccggacccagcugccaccagccuacaccaacagcuucacccggggcgucuacuaccccgacaagguguuccggagcagcguccugcacagcacccaggaccuguuccugcccuucuucagcaacgugaccugguuccacgccauccacgugagcggcaccaacggcaccaagcgguucgacaaccccgugcugcccuucaacgacggcguguacuucgccagcaccgagaagagcaacaucauccggggcuggaucuucggcaccacccuggacagcaagacccagagccugcugaucgugaauaacgccaccaacguggugaucaaggugugcgaguuccaguucugcaacgaccccuuccugggcguguacuaccacaagaacaacaagagcuggauggagagcgaguuccggguguacagcagcgccaacaacugcaccuucgaguacgugagccagcccuuccugauggaccuggagggcaagcagggcaacuucaagaaccugcgggaguucguguucaagaacaucgacggcuacuucaagaucuacagcaagcacaccccaaucaaccuggugcgggaucugccccagggcuucucagcccuggagccccugguggaccugcccaucggcaucaacaucacccgguuccagacccugcuggcccugcaccggagcuaccugaccccaggcgacagcagcagcggguggacagcaggcgcggcugcuuacuacgugggcuaccugcagccccggaccuuccugcugaaguacaacgagaacggcaccaucaccgacgccguggacugcgcccuggacccucugagcgagaccaagugcacccugaagagcuucaccguggagaagggcaucuaccagaccagcaacuuccgggugcagcccaccgagagcaucgugcgguuccccaacaucaccaaccugugccccuucggcgagguguucaacgccacccgguucgccagcguguacgccuggaaccggaagcggaucagcaacugcguggccgacuacagcgugcuguacaacagcgccagcuucagcaccuucaagugcuacggcgugagccccaccaagcugaacgaccugugcuucaccaacguguacgccgacagcuucgugauccguggcgacgaggugcggcagaucgcacccggccagacaggcaagaucgccgacuacaacuacaagcugcccgacgacuucaccggcugcgugaucgccuggaacagcaacaaccucgacagcaaggugggcggcaacuacaacuaccuguuccggcuguuccggaagagcaaccugaagcccuucgagcgggacaucagcaccgagaucuaccaagccggcuccaccccuugcaacggcguggagggcuucaacugcuacuucccucugcagagcuacggcuuccagcccaccaacggcgugggcuaccagcccuaccgggugguggugcugagcuucgagcugcugcacgccccagccaccguguguggccccaagaagagcaccaaccuggugaagaacaagugcgugaacuucaacuucaacggccuuaccggcaccggcgugcugaccgagagcaacaagaaauuccugcccuuucagcaguucggccgggacaucgccgacaccaccgacgcugugcgggauccccagacccuggagauccuggacaucaccccuugcagcuucggcggcgugagcgugaucaccccaggcaccaacaccagcaaccagguggccgugcuguaccagggcgugaacugcaccgaggugcccguggccauccacgccgaccagcugacacccaccuggcgggucuacagcaccggcagcaacguguuccagacccgggccgguugccugaucggcgccgagcacgugaacaacagcuacgagugcgacauccccaucggcgccggcaucugugccagcuaccagacccagaccaauucaccccggagggcaaggagcguggccagccagagcaucaucgccuacaccaugagccugggcgccgagaacagcguggccuacagcaacaacagcaucgccauccccaccaacuucaccaucagcgugaccaccgagauucugcccgugagcaugaccaagaccagcguggacugcaccauguacaucugcggcgacagcaccgagugcagcaaccugcugcugcaguacggcagcuucugcacccagcugaaccgggcccugaccggcaucgccguggagcaggacaagaacacccaggagguguucgcccaggugaagcagaucuacaagaccccucccaucaaggacuucggcggcuucaacuucagccagauccugcccgaccccagcaagcccagcaagcggagcuucaucgaggaccugcuguucaacaaggugacccuagccgacgccggcuucaucaagcaguacggcgacugccucggcgacauagccgcccgggaccugaucugcgcccagaaguucaacggccugaccgugcugccuccccugcugaccgacgagaugaucgcccaguacaccagcgcccuguuagccggaaccaucaccagcggcuggacuuucggcgcuggagccgcucugcagauccccuucgccaugcagauggccuaccgguucaacggcaucggcgugacccagaacgugcuguacgagaaccagaagcugaucgccaaccaguucaacagcgccaucggcaagauccaggacagccugagcagcaccgcuagcgcccugggcaagcugcaggacguggugaaccagaacgcccaggcccugaacacccuggugaagcagcugagcagcaacuucggcgccaucagcagcgugcugaacgacauccugagccggcuggacccucccgaggccgaggugcagaucgaccggcugaucacuggccggcugcagagccugcagaccuacgugacccagcagcugauccgggccgccgagauucgggccagcgccaaccuggccgccaccaagaugagcgagugcgugcugggccagagcaagcggguggacuucugcggcaagggcuaccaccugaugagcuuuccccagagcgcaccccacggagugguguuccugcacgugaccuacgugcccgcccaggagaagaacuucaccaccgccccagccaucugccacgacggcaaggcccacuuuccccgggagggcguguucgugagcaacggcacccacugguucgugacccagcggaacuucuacgagccccagaucaucaccaccgacaacaccuucgugagcggcaacugcgacguggugaucggcaucgugaacaacaccguguacgauccccugcagcccgagcuggacagcuucaaggaggagcuggacaaguacuucaagaaucacaccagccccgacguggaccugggcgacaucagcggcaucaacgccagcguggugaacauccagaaggagaucgaucggcugaacgagguggccaagaaccugaacgagagccugaucgaccugcaggagcugggcaaguacgagcaguacaucaaguggcccugguacaucuggcugggcuucaucgccggccugaucgccaucgugauggugaccaucaugcugugcugcaugaccagcugcugcagcugccugaagggcuguugcagcugcggcagcugcugcaaguucgacgaggacgacagcgagcccgugcugaagggcgugaagcugcacuacaccugaggacuaguguccaccugucccuccugggcugcuggauugucucguuuuccugccaaauaaacaggaucagcgcuuuacagaucucaaaggcucuuuucagagccaccaaaaaaaaaaaaaaaaaaaaaaaaaaaaaaaaaaaaaaaaaaaaaaaaaaaaaaaaaaaaaaaaaaaaaaaaaaaaaaaaaaaaaaaaaaaaaaaaaaaaa

SEQ ID NO: 24001 - RNA, 4129 nt, Artificial Sequence
  SARS-CoV-2/Wuhan/WIV05/2019__EPI_ISL_402128 spike protein mRNA gc (1-1273)(K986P_V987P_D614G_I692V)
aggagacccgugacccggaaguuguacggcuacgcgacuuucccucccacaaacccucgcgcccuuccuuuccuacuugggcccggcagaaagcuuaccauguucguguuccuggugcugcugccccuggugagcagccagugcgugaaccugaccacccggacccagcugccaccagccuacaccaacagcuucacccggggcgucuacuaccccgacaagguguuccggagcagcguccugcacagcacccaggaccuguuccugcccuucuucagcaacgugaccugguuccacgccauccacgugagcggcaccaacggcaccaagcgguucgacaaccccgugcugcccuucaacgacggcguguacuucgccagcaccgagaagagcaacaucauccggggcuggaucuucggcaccacccuggacagcaagacccagagccugcugaucgugaauaacgccaccaacguggugaucaaggugugcgaguuccaguucugcaacgaccccuuccugggcguguacuaccacaagaacaacaagagcuggauggagagcgaguuccggguguacagcagcgccaacaacugcaccuucgaguacgugagccagcccuuccugauggaccuggagggcaagcagggcaacuucaagaaccugcgggaguucguguucaagaacaucgacggcuacuucaagaucuacagcaagcacaccccaaucaaccuggugcgggaucugccccagggcuucucagcccuggagccccugguggaccugcccaucggcaucaacaucacccgguuccagacccugcuggcccugcaccggagcuaccugaccccaggcgacagcagcagcggguggacagcaggcgcggcugcuuacuacgugggcuaccugcagccccggaccuuccugcugaaguacaacgagaacggcaccaucaccgacgccguggacugcgcccuggacccucugagcgagaccaagugcacccugaagagcuucaccguggagaagggcaucuaccagaccagcaacuuccgggugcagcccaccgagagcaucgugcgguuccccaacaucaccaaccugugccccuucggcgagguguucaacgccacccgguucgccagcguguacgccuggaaccggaagcggaucagcaacugcguggccgacuacagcgugcuguacaacagcgccagcuucagcaccuucaagugcuacggcgugagccccaccaagcugaacgaccugugcuucaccaacguguacgccgacagcuucgugauccguggcgacgaggugcggcagaucgcacccggccagacaggcaagaucgccgacuacaacuacaagcugcccgacgacuucaccggcugcgugaucgccuggaacagcaacaaccucgacagcaaggugggcggcaacuacaacuaccuguaccggcuguuccggaagagcaaccugaagcccuucgagcgggacaucagcaccgagaucuaccaagccggcuccaccccuugcaacggcguggagggcuucaacugcuacuucccucugcagagcuacggcuuccagcccaccaacggcgugggcuaccagcccuaccgggugguggugcugagcuucgagcugcugcacgccccagccaccguguguggccccaagaagagcaccaaccuggugaagaacaagugcgugaacuucaacuucaacggccuuaccggcaccggcgugcugaccgagagcaacaagaaauuccugcccuuucagcaguucggccgggacaucgccgacaccaccgacgcugugcgggauccccagacccuggagauccuggacaucaccccuugcagcuucggcggcgugagcgugaucaccccaggcaccaacaccagcaaccagguggccgugcuguaccagggcgugaacugcaccgaggugcccguggccauccacgccgaccagcugacacccaccuggcgggucuacagcaccggcagcaacguguuccagacccgggccgguugccugaucggcgccgagcacgugaacaacagcuacgagugcgacauccccaucggcgccggcaucugugccagcuaccagacccagaccaauucaccccggagggcaaggagcguggccagccagagcgugaucgccuacaccaugagccugggcgccgagaacagcguggccuacagcaacaacagcaucgccauccccaccaacuucaccaucagcgugaccaccgagauucugcccgugagcaugaccaagaccagcguggacugcaccauguacaucugcggcgacagcaccgagugcagcaaccugcugcugcaguacggcagcuucugcacccagcugaaccgggcccugaccggcaucgccguggagcaggacaagaacacccaggagguguucgcccaggugaagcagaucuacaagaccccucccaucaaggacuucggcggcuucaacuucagccagauccugcccgaccccagcaagcccagcaagcggagcuucaucgaggaccugcuguucaacaaggugacccuagccgacgccggcuucaucaagcaguacggcgacugccucggcgacauagccgcccgggaccugaucugcgcccagaaguucaacggccugaccgugcugccuccccugcugaccgacgagaugaucgcccaguacaccagcgcccuguuagccggaaccaucaccagcggcuggacuuucggcgcuggagccgcucugcagauccccuucgccaugcagauggccuaccgguucaacggcaucggcgugacccagaacgugcuguacgagaaccagaagcugaucgccaaccaguucaacagcgccaucggcaagauccaggacagccugagcagcaccgcuagcgcccugggcaagcugcaggacguggugaaccagaacgcccaggcccugaacacccuggugaagcagcugagcagcaacuucggcgccaucagcagcgugcugaacgacauccugagccggcuggacccucccgaggccgaggugcagaucgaccggcugaucacuggccggcugcagagccugcagaccuacgugacccagcagcugauccgggccgccgagauucgggccagcgccaaccuggccgccaccaagaugagcgagugcgugcugggccagagcaagcggguggacuucugcggcaagggcuaccaccugaugagcuuuccccagagcgcaccccacggagugguguuccugcacgugaccuacgugcccgcccaggagaagaacuucaccaccgccccagccaucugccacgacggcaaggcccacuuuccccgggagggcguguucgugagcaacggcacccacugguucgugacccagcggaacuucuacgagccccagaucaucaccaccgacaacaccuucgugagcggcaacugcgacguggugaucggcaucgugaacaacaccguguacgauccccugcagcccgagcuggacagcuucaaggaggagcuggacaaguacuucaagaaucacaccagccccgacguggaccugggcgacaucagcggcaucaacgccagcguggugaacauccagaaggagaucgaucggcugaacgagguggccaagaaccugaacgagagccugaucgaccugcaggagcugggcaaguacgagcaguacaucaaguggcccugguacaucuggcugggcuucaucgccggccugaucgccaucgugauggugaccaucaugcugugcugcaugaccagcugcugcagcugccugaagggcuguugcagcugcggcagcugcugcaaguucgacgaggacgacagcgagcccgugcugaagggcgugaagcugcacuacaccugaggacuaguguccaccugucccuccugggcugcuggauugucucguuuuccugccaaauaaacaggaucagcgcuuuacagaucucaaaggcucuuuucagagccaccaaaaaaaaaaaaaaaaaaaaaaaaaaaaaaaaaaaaaaaaaaaaaaaaaaaaaaaaaaaaaaaaaaaaaaaaaaaaaaaaaaaaaaaaaaaaaaaaaaaaa

SEQ ID NO: 24002 - RNA, 4129 nt, Artificial Sequence
  SARS-CoV-2/Wuhan/WIV05/2019__EPI_ISL_402128 spike protein mRNA gc (1-1273)(K986P_V987P_D614G_M1229I)
aggagacccgugacccggaaguuguacggcuacgcgacuuucccucccacaaacccucgcgcccuuccuuuccuacuugggcccggcagaaagcuuaccauguucguguuccuggugcugcugccccuggugagcagccagugcgugaaccugaccacccggacccagcugccaccagccuacaccaacagcuucacccggggcgucuacuaccccgacaagguguuccggagcagcguccugcacagcacccaggaccuguuccugcccuucuucagcaacgugaccugguuccacgccauccacgugagcggcaccaacggcaccaagcgguucgacaaccccgugcugcccuucaacgacggcguguacuucgccagcaccgagaagagcaacaucauccggggcuggaucuucggcaccacccuggacagcaagacccagagccugcugaucgugaauaacgccaccaacguggugaucaaggugugcgaguuccaguucugcaacgaccccuuccugggcguguacuaccacaagaacaacaagagcuggauggagagcgaguuccggguguacagcagcgccaacaacugcaccuucgaguacgugagccagcccuuccugauggaccuggagggcaagcagggcaacuucaagaaccugcgggaguucguguucaagaacaucgacggcuacuucaagaucuacagcaagcacaccccaaucaaccuggugcgggaucugccccagggcuucucagcccuggagccccugguggaccugcccaucggcaucaacaucacccgguuccagacccugcuggcccugcaccggagcuaccugaccccaggcgacagcagcagcggguggacagcaggcgcggcugcuuacuacgugggcuaccugcagccccggaccuuccugcugaaguacaacgagaacggcaccaucaccgacgccguggacugcgcccuggacccucugagcgagaccaagugcacccugaagagcuucaccguggagaagggcaucuaccagaccagcaacuuccgggugcagcccaccgagagcaucgugcgguuccccaacaucaccaaccugugccccuucggcgagguguucaacgccacccgguucgccagcguguacgccuggaaccggaagcggaucagcaacugcguggccgacuacagcgugcuguacaacagcgccagcuucagcaccuucaagugcuacggcgugagccccaccaagcugaacgaccugugcuucaccaacguguacgccgacagcuucgugauccguggcgacgaggugcggcagaucgcacccggccagacaggcaagaucgccgacuacaacuacaagcugcccgacgacuucaccggcugcgugaucgccuggaacagcaacaaccucgacagcaaggugggcggcaacuacaacuaccuguaccggcuguuccggaagagcaaccugaagcccuucgagcgggacaucagcaccgagaucuaccaagccggcuccaccccuugcaacggcguggagggcuucaacugcuacuucccucugcagagcuacggcuuccagcccaccaacggcgugggcuaccagcccuaccgggugguggugcugagcuucgagcugcugcacgccccagccaccguguguggccccaagaagagcaccaaccuggugaagaacaagugcgugaacuucaacuucaacggccuuaccggcaccggcgugcugaccgagagcaacaagaaauuccugcccuuucagcaguucggccgggacaucgccgacaccaccgacgcugugcgggauccccagacccuggagauccuggacaucaccccuugcagcuucggcggcgugagcgugaucaccccaggcaccaacaccagcaaccagguggccgugcuguaccagggcgugaacugcaccgaggugcccguggccauccacgccgaccagcugacacccaccuggcgggucuacagcaccggcagcaacguguuccagacccgggccgguugccugaucggcgccgagcacgugaacaacagcuacgagugcgacauccccaucggcgccggcaucugugccagcuaccagacccagaccaauucaccccggagggcaaggagcguggccagccagagcaucaucgccuacaccaugagccugggcgccgagaacagcguggccuacagcaacaacagcaucgccauccccaccaacuucaccaucagcgugaccaccgagauucugcccgugagcaugaccaagaccagcguggacugcaccauguacaucugcggcgacagcaccgagugcagcaaccugcugcugcaguacggcagcuucugcacccagcugaaccgggcccugaccggcaucgccguggagcaggacaagaacacccaggagguguucgcccaggugaagcagaucuacaagaccccucccaucaaggacuucggcggcuucaacuucagccagauccugcccgaccccagcaagcccagcaagcggagcuucaucgaggaccugcuguucaacaaggugacccuagccgacgccggcuucaucaagcaguacggcgacugccucggcgacauagccgcccgggaccugaucugcgcccagaaguucaacggccugaccgugcugccuccccugcugaccgacgagaugaucgcccaguacaccagcgcccuguuagccggaaccaucaccagcggcuggacuuucggcgcuggagccgcucugcagauccccuucgccaugcagauggccuaccgguucaacggcaucggcgugacccagaacgugcuguacgagaaccagaagcugaucgccaaccaguucaacagcgccaucggcaagauccaggacagccugagcagcaccgcuagcgcccugggcaagcugcaggacguggugaaccagaacgcccaggcccugaacacccuggugaagcagcugagcagcaacuucggcgccaucagcagcgugcugaacgacauccugagccggcuggacccucccgaggccgaggugcagaucgaccggcugaucacuggccggcugcagagccugcagaccuacgugacccagcagcugauccgggccgccgagauucgggccagcgccaaccuggccgccaccaagaugagcgagugcgugcugggccagagcaagcggguggacuucugcggcaagggcuaccaccugaugagcuuuccccagagcgcaccccacggagugguguuccugcacgugaccuacgugcccgcccaggagaagaacuucaccaccgccccagccaucugccacgacggcaaggcccacuuuccccgggagggcguguucgugagcaacggcacccacugguucgugacccagcggaacuucuacgagccccagaucaucaccaccgacaacaccuucgugagcggcaacugcgacguggugaucggcaucgugaacaacaccguguacgauccccugcagcccgagcuggacagcuucaaggaggagcuggacaaguacuucaagaaucacaccagccccgacguggaccugggcgacaucagcggcaucaacgccagcguggugaacauccagaaggagaucgaucggcugaacgagguggccaagaaccugaacgagagccugaucgaccugcaggagcugggcaaguacgagcaguacaucaaguggcccugguacaucuggcugggcuucaucgccggccugaucgccaucgugaucgugaccaucaugcugugcugcaugaccagcugcugcagcugccugaagggcuguugcagcugcggcagcugcugcaaguucgacgaggacgacagcgagcccgugcugaagggcgugaagcugcacuacaccugaggacuaguguccaccugucccuccugggcugcuggauugucucguuuuccugccaaauaaacaggaucagcgcuuuacagaucucaaaggcucuuuucagagccaccaaaaaaaaaaaaaaaaaaaaaaaaaaaaaaaaaaaaaaaaaaaaaaaaaaaaaaaaaaaaaaaaaaaaaaaaaaaaaaaaaaaaaaaaaaaaaaaaaaaaa

SEQ ID NO: 24003 - RNA, 4123 nt, Artificial Sequence
  SARS-CoV-2/Wuhan/WIV05/2019__EPI_ISL_402128 spike protein mRNA gc (1-1273)(K986P_V987P_H69del_V70del_A222V_Y453F_S477N_D614G_I692V)
aggagacccgugacccggaaguuguacggcuacgcgacuuucccucccacaaacccucgcgcccuuccuuuccuacuugggcccggcagaaagcuuaccauguucguguuccuggugcugcugccccuggugagcagccagugcgugaaccugaccacccggacccagcugccaccagccuacaccaacagcuucacccggggcgucuacuaccccgacaagguguuccggagcagcguccugcacagcacccaggaccuguuccugcccuucuucagcaacgugaccugguuccacgccaucagcggcaccaacggcaccaagcgguucgacaaccccgugcugcccuucaacgacggcguguacuucgccagcaccgagaagagcaacaucauccggggcuggaucuucggcaccacccuggacagcaagacccagagccugcugaucgugaauaacgccaccaacguggugaucaaggugugcgaguuccaguucugcaacgaccccuuccugggcguguacuaccacaagaacaacaagagcuggauggagagcgaguuccggguguacagcagcgccaacaacugcaccuucgaguacgugagccagcccuuccugauggaccuggagggcaagcagggcaacuucaagaaccugcgggaguucguguucaagaacaucgacggcuacuucaagaucuacagcaagcacaccccaaucaaccuggugcgggaucugccccagggcuucucagugcuggagccccugguggaccugcccaucggcaucaacaucacccgguuccagacccugcuggcccugcaccggagcuaccugaccccaggcgacagcagcagcggguggacagcaggcgcggcugcuuacuacgugggcuaccugcagccccggaccuuccugcugaaguacaacgagaacggcaccaucaccgacgccguggacugcgcccuggacccucugagcgagaccaagugcacccugaagagcuucaccguggagaagggcaucuaccagaccagcaacuuccgggugcagcccaccgagagcaucgugcgguuccccaacaucaccaaccugugccccuucggcgagguguucaacgccacccgguucgccagcguguacgccuggaaccggaagcggaucagcaacugcguggccgacuacagcgugcuguacaacagcgccagcuucagcaccuucaagugcuacggcgugagccccaccaagcugaacgaccugugcuucaccaacguguacgccgacagcuucgugauccguggcgacgaggugcggcagaucgcacccggccagacaggcaagaucgccgacuacaacuacaagcugcccgacgacuucaccggcugcgugaucgccuggaacagcaacaaccucgacagcaaggugggcggcaacuacaacuaccuguuccggcuguuccggaagagcaaccugaagcccuucgagcgggacaucagcaccgagaucuaccaagccggcaacaccccuugcaacggcguggagggcuucaacugcuacuucccucugcagagcuacggcuuccagcccaccaacggcgugggcuaccagcccuaccgggugguggugcugagcuucgagcugcugcacgccccagccaccguguguggccccaagaagagcaccaaccuggugaagaacaagugcgugaacuucaacuucaacggccuuaccggcaccggcgugcugaccgagagcaacaagaaauuccugcccuuucagcaguucggccgggacaucgccgacaccaccgacgcugugcgggauccccagacccuggagauccuggacaucaccccuugcagcuucggcggcgugagcgugaucaccccaggcaccaacaccagcaaccagguggccgugcuguaccagggcgugaacugcaccgaggugcccguggccauccacgccgaccagcugacacccaccuggcgggucuacagcaccggcagcaacguguuccagacccgggccgguugccugaucggcgccgagcacgugaacaacagcuacgagugcgacauccccaucggcgccggcaucugugccagcuaccagacccagaccaauucaccccggagggcaaggagcguggccagccagagcgugaucgccuacaccaugagccugggcgccgagaacagcguggccuacagcaacaacagcaucgccauccccaccaacuucaccaucagcgugaccaccgagauucugcccgugagcaugaccaagaccagcguggacugcaccauguacaucugcggcgacagcaccgagugcagcaaccugcugcugcaguacggcagcuucugcacccagcugaaccgggcccugaccggcaucgccguggagcaggacaagaacacccaggagguguucgcccaggugaagcagaucuacaagaccccucccaucaaggacuucggcggcuucaacuucagccagauccugcccgaccccagcaagcccagcaagcggagcuucaucgaggaccugcuguucaacaaggugacccuagccgacgccggcuucaucaagcaguacggcgacugccucggcgacauagccgcccgggaccugaucugcgcccagaaguucaacggccugaccgugcugccuccccugcugaccgacgagaugaucgcccaguacaccagcgcccuguuagccggaaccaucaccagcggcuggacuuucggcgcuggagccgcucugcagauccccuucgccaugcagauggccuaccgguucaacggcaucggcgugacccagaacgugcuguacgagaaccagaagcugaucgccaaccaguucaacagcgccaucggcaagauccaggacagccugagcagcaccgcuagcgcccugggcaagcugcaggacguggugaaccagaacgcccaggcccugaacacccuggugaagcagcugagcagcaacuucggcgccaucagcagcgugcugaacgacauccugagccggcuggacccucccgaggccgaggugcagaucgaccggcugaucacuggccggcugcagagccugcagaccuacgugacccagcagcugauccgggccgccgagauucgggccagcgccaaccuggccgccaccaagaugagcgagugcgugcugggccagagcaagcggguggacuucugcggcaagggcuaccaccugaugagcuuuccccagagcgcaccccacggagugguguuccugcacgugaccuacgugcccgcccaggagaagaacuucaccaccgccccagccaucugccacgacggcaaggcccacuuuccccgggagggcguguucgugagcaacggcacccacugguucgugacccagcggaacuucuacgagccccagaucaucaccaccgacaacaccuucgugagcggcaacugcgacguggugaucggcaucgugaacaacaccguguacgauccccugcagcccgagcuggacagcuucaaggaggagcuggacaaguacuucaagaaucacaccagccccgacguggaccugggcgacaucagcggcaucaacgccagcguggugaacauccagaaggagaucgaucggcugaacgagguggccaagaaccugaacgagagccugaucgaccugcaggagcugggcaaguacgagcaguacaucaaguggcccugguacaucuggcugggcuucaucgccggccugaucgccaucgugauggugaccaucaugcugugcugcaugaccagcugcugcagcugccugaagggcuguugcagcugcggcagcugcugcaaguucgacgaggacgacagcgagcccgugcugaagggcgugaagcugcacuacaccugaggacuaguguccaccugucccuccugggcugcuggauugucucguuuuccugccaaauaaacaggaucagcgcuuuacagaucucaaaggcucuuuucagagccaccaaaaaaaaaaaaaaaaaaaaaaaaaaaaaaaaaaaaaaaaaaaaaaaaaaaaaaaaaaaaaaaaaaaaaaaaaaaaaaaaaaaaaaaaaaaaaaaaaaaaa

SEQ ID NO: 24004 - RNA, 4123 nt, Artificial Sequence
  SARS-CoV-2/Wuhan/WIV05/2019__EPI_ISL_402128 spike protein mRNA gc (1-1273)(K986P_V987P_H69del_V70del_Y453F_D614G_I692V_M1229I)
aggagacccgugacccggaaguuguacggcuacgcgacuuucccucccacaaacccucgcgcccuuccuuuccuacuugggcccggcagaaagcuuaccauguucguguuccuggugcugcugccccuggugagcagccagugcgugaaccugaccacccggacccagcugccaccagccuacaccaacagcuucacccggggcgucuacuaccccgacaagguguuccggagcagcguccugcacagcacccaggaccuguuccugcccuucuucagcaacgugaccugguuccacgccaucagcggcaccaacggcaccaagcgguucgacaaccccgugcugcccuucaacgacggcguguacuucgccagcaccgagaagagcaacaucauccggggcuggaucuucggcaccacccuggacagcaagacccagagccugcugaucgugaauaacgccaccaacguggugaucaaggugugcgaguuccaguucugcaacgaccccuuccugggcguguacuaccacaagaacaacaagagcuggauggagagcgaguuccggguguacagcagcgccaacaacugcaccuucgaguacgugagccagcccuuccugauggaccuggagggcaagcagggcaacuucaagaaccugcgggaguucguguucaagaacaucgacggcuacuucaagaucuacagcaagcacaccccaaucaaccuggugcgggaucugccccagggcuucucagcccuggagccccugguggaccugcccaucggcaucaacaucacccgguuccagacccugcuggcccugcaccggagcuaccugaccccaggcgacagcagcagcggguggacagcaggcgcggcugcuuacuacgugggcuaccugcagccccggaccuuccugcugaaguacaacgagaacggcaccaucaccgacgccguggacugcgcccuggacccucugagcgagaccaagugcacccugaagagcuucaccguggagaagggcaucuaccagaccagcaacuuccgggugcagcccaccgagagcaucgugcgguuccccaacaucaccaaccugugccccuucggcgagguguucaacgccacccgguucgccagcguguacgccuggaaccggaagcggaucagcaacugcguggccgacuacagcgugcuguacaacagcgccagcuucagcaccuucaagugcuacggcgugagccccaccaagcugaacgaccugugcuucaccaacguguacgccgacagcuucgugauccguggcgacgaggugcggcagaucgcacccggccagacaggcaagaucgccgacuacaacuacaagcugcccgacgacuucaccggcugcgugaucgccuggaacagcaacaaccucgacagcaaggugggcggcaacuacaacuaccuguuccggcuguuccggaagagcaaccugaagcccuucgagcgggacaucagcaccgagaucuaccaagccggcuccaccccuugcaacggcguggagggcuucaacugcuacuucccucugcagagcuacggcuuccagcccaccaacggcgugggcuaccagcccuaccgggugguggugcugagcuucgagcugcugcacgccccagccaccguguguggccccaagaagagcaccaaccuggugaagaacaagugcgugaacuucaacuucaacggccuuaccggcaccggcgugcugaccgagagcaacaagaaauuccugcccuuucagcaguucggccgggacaucgccgacaccaccgacgcugugcgggauccccagacccuggagauccuggacaucaccccuugcagcuucggcggcgugagcgugaucaccccaggcaccaacaccagcaaccagguggccgugcuguaccagggcgugaacugcaccgaggugcccguggccauccacgccgaccagcugacacccaccuggcgggucuacagcaccggcagcaacguguuccagacccgggccgguugccugaucggcgccgagcacgugaacaacagcuacgagugcgacauccccaucggcgccggcaucugugccagcuaccagacccagaccaauucaccccggagggcaaggagcguggccagccagagcgugaucgccuacaccaugagccugggcgccgagaacagcguggccuacagcaacaacagcaucgccauccccaccaacuucaccaucagcgugaccaccgagauucugcccgugagcaugaccaagaccagcguggacugcaccauguacaucugcggcgacagcaccgagugcagcaaccugcugcugcaguacggcagcuucugcacccagcugaaccgggcccugaccggcaucgccguggagcaggacaagaacacccaggagguguucgcccaggugaagcagaucuacaagaccccucccaucaaggacuucggcggcuucaacuucagccagauccugcccgaccccagcaagcccagcaagcggagcuucaucgaggaccugcuguucaacaaggugacccuagccgacgccggcuucaucaagcaguacggcgacugccucggcgacauagccgcccgggaccugaucugcgcccagaaguucaacggccugaccgugcugccuccccugcugaccgacgagaugaucgcccaguacaccagcgcccuguuagccggaaccaucaccagcggcuggacuuucggcgcuggagccgcucugcagauccccuucgccaugcagauggccuaccgguucaacggcaucggcgugacccagaacgugcuguacgagaaccagaagcugaucgccaaccaguucaacagcgccaucggcaagauccaggacagccugagcagcaccgcuagcgcccugggcaagcugcaggacguggugaaccagaacgcccaggcccugaacacccuggugaagcagcugagcagcaacuucggcgccaucagcagcgugcugaacgacauccugagccggcuggacccucccgaggccgaggugcagaucgaccggcugaucacuggccggcugcagagccugcagaccuacgugacccagcagcugauccgggccgccgagauucgggccagcgccaaccuggccgccaccaagaugagcgagugcgugcugggccagagcaagcggguggacuucugcggcaagggcuaccaccugaugagcuuuccccagagcgcaccccacggagugguguuccugcacgugaccuacgugcccgcccaggagaagaacuucaccaccgccccagccaucugccacgacggcaaggcccacuuuccccgggagggcguguucgugagcaacggcacccacugguucgugacccagcggaacuucuacgagccccagaucaucaccaccgacaacaccuucgugagcggcaacugcgacguggugaucggcaucgugaacaacaccguguacgauccccugcagcccgagcuggacagcuucaaggaggagcuggacaaguacuucaagaaucacaccagccccgacguggaccugggcgacaucagcggcaucaacgccagcguggugaacauccagaaggagaucgaucggcugaacgagguggccaagaaccugaacgagagccugaucgaccugcaggagcugggcaaguacgagcaguacaucaaguggcccugguacaucuggcugggcuucaucgccggccugaucgccaucgugaucgugaccaucaugcugugcugcaugaccagcugcugcagcugccugaagggcuguugcagcugcggcagcugcugcaaguucgacgaggacgacagcgagcccgugcugaagggcgugaagcugcacuacaccugaggacuaguguccaccugucccuccugggcugcuggauugucucguuuuccugccaaauaaacaggaucagcgcuuuacagaucucaaaggcucuuuucagagccaccaaaaaaaaaaaaaaaaaaaaaaaaaaaaaaaaaaaaaaaaaaaaaaaaaaaaaaaaaaaaaaaaaaaaaaaaaaaaaaaaaaaaaaaaaaaaaaaaaaaaa

SEQ ID NO: 24005 - RNA, 4120 nt, Artificial Sequence
  SARS-CoV-2/Wuhan/WIV05/2019__EPI_ISL_402128 spike protein mRNA gc (1-1273)(K986P_V987P_K986P_V987P_H69del_V70del_Y144del_N501Y_A570 D_D614G_P681H_T716I_S982A_D1118H)
aggagacccgugacccggaaguuguacggcuacgcgacuuucccucccacaaacccucgcgcccuuccuuuccuacuugggcccggcagaaagcuuaccauguucguguuccuggugcugcugccccuggugagcagccagugcgugaaccugaccacccggacccagcugccaccagccuacaccaacagcuucacccggggcgucuacuaccccgacaagguguuccggagcagcguccugcacagcacccaggaccuguuccugcccuucuucagcaacgugaccugguuccacgccaucagcggcaccaacggcaccaagcgguucgacaaccccgugcugcccuucaacgacggcguguacuucgccagcaccgagaagagcaacaucauccggggcuggaucuucggcaccacccuggacagcaagacccagagccugcugaucgugaauaacgccaccaacguggugaucaaggugugcgaguuccaguucugcaacgaccccuuccugggcguguaccacaagaacaacaagagcuggauggagagcgaguuccggguguacagcagcgccaacaacugcaccuucgaguacgugagccagcccuuccugauggaccuggagggcaagcagggcaacuucaagaaccugcgggaguucguguucaagaacaucgacggcuacuucaagaucuacagcaagcacaccccaaucaaccuggugcgggaucugccccagggcuucucagcccuggagccccugguggaccugcccaucggcaucaacaucacccgguuccagacccugcuggcccugcaccggagcuaccugaccccaggcgacagcagcagcggguggacagcaggcgcggcugcuuacuacgugggcuaccugcagccccggaccuuccugcugaaguacaacgagaacggcaccaucaccgacgccguggacugcgcccuggacccucugagcgagaccaagugcacccugaagagcuucaccguggagaagggcaucuaccagaccagcaacuuccgggugcagcccaccgagagcaucgugcgguuccccaacaucaccaaccugugccccuucggcgagguguucaacgccacccgguucgccagcguguacgccuggaaccggaagcggaucagcaacugcguggccgacuacagcgugcuguacaacagcgccagcuucagcaccuucaagugcuacggcgugagccccaccaagcugaacgaccugugcuucaccaacguguacgccgacagcuucgugauccguggcgacgaggugcggcagaucgcacccggccagacaggcaagaucgccgacuacaacuacaagcugcccgacgacuucaccggcugcgugaucgccuggaacagcaacaaccucgacagcaaggugggcggcaacuacaacuaccuguaccggcuguuccggaagagcaaccugaagcccuucgagcgggacaucagcaccgagaucuaccaagccggcuccaccccuugcaacggcguggagggcuucaacugcuacuucccucugcagagcuacggcuuccagcccaccuacggcgugggcuaccagcccuaccgggugguggugcugagcuucgagcugcugcacgccccagccaccguguguggccccaagaagagcaccaaccuggugaagaacaagugcgugaacuucaacuucaacggccuuaccggcaccggcgugcugaccgagagcaacaagaaauuccugcccuuucagcaguucggccgggacaucgacgacaccaccgacgcugugcgggauccccagacccuggagauccuggacaucaccccuugcagcuucggcggcgugagcgugaucaccccaggcaccaacaccagcaaccagguggccgugcuguaccagggcgugaacugcaccgaggugcccguggccauccacgccgaccagcugacacccaccuggcgggucuacagcaccggcagcaacguguuccagacccgggccgguugccugaucggcgccgagcacgugaacaacagcuacgagugcgacauccccaucggcgccggcaucugugccagcuaccagacccagaccaauucacaccggagggcaaggagcguggccagccagagcaucaucgccuacaccaugagccugggcgccgagaacagcguggccuacagcaacaacagcaucgccauccccaucaacuucaccaucagcgugaccaccgagauucugcccgugagcaugaccaagaccagcguggacugcaccauguacaucugcggcgacagcaccgagugcagcaaccugcugcugcaguacggcagcuucugcacccagcugaaccgggcccugaccggcaucgccguggagcaggacaagaacacccaggagguguucgcccaggugaagcagaucuacaagaccccucccaucaaggacuucggcggcuucaacuucagccagauccugcccgaccccagcaagcccagcaagcggagcuucaucgaggaccugcuguucaacaaggugacccuagccgacgccggcuucaucaagcaguacggcgacugccucggcgacauagccgcccgggaccugaucugcgcccagaaguucaacggccugaccgugcugccuccccugcugaccgacgagaugaucgcccaguacaccagcgcccuguuagccggaaccaucaccagcggcuggacuuucggcgcuggagccgcucugcagauccccuucgccaugcagauggccuaccgguucaacggcaucggcgugacccagaacgugcuguacgagaaccagaagcugaucgccaaccaguucaacagcgccaucggcaagauccaggacagccugagcagcaccgcuagcgcccugggcaagcugcaggacguggugaaccagaacgcccaggcccugaacacccuggugaagcagcugagcagcaacuucggcgccaucagcagcgugcugaacgacauccuggcccggcuggacccucccgaggccgaggugcagaucgaccggcugaucacuggccggcugcagagccugcagaccuacgugacccagcagcugauccgggccgccgagauucgggccagcgccaaccuggccgccaccaagaugagcgagugcgugcugggccagagcaagcggguggacuucugcggcaagggcuaccaccugaugagcuuuccccagagcgcaccccacggagugguguuccugcacgugaccuacgugcccgcccaggagaagaacuucaccaccgccccagccaucugccacgacggcaaggcccacuuuccccgggagggcguguucgugagcaacggcacccacugguucgugacccagcggaacuucuacgagccccagaucaucaccacccacaacaccuucgugagcggcaacugcgacguggugaucggcaucgugaacaacaccguguacgauccccugcagcccgagcuggacagcuucaaggaggagcuggacaaguacuucaagaaucacaccagccccgacguggaccugggcgacaucagcggcaucaacgccagcguggugaacauccagaaggagaucgaucggcugaacgagguggccaagaaccugaacgagagccugaucgaccugcaggagcugggcaaguacgagcaguacaucaaguggcccugguacaucuggcugggcuucaucgccggccugaucgccaucgugauggugaccaucaugcugugcugcaugaccagcugcugcagcugccugaagggcuguugcagcugcggcagcugcugcaaguucgacgaggacgacagcgagcccgugcugaagggcgugaagcugcacuacaccugaggacuaguguccaccugucccuccugggcugcuggauugucucguuuuccugccaaauaaacaggaucagcgcuuuacagaucucaaaggcucuuuucagagccaccaaaaaaaaaaaaaaaaaaaaaaaaaaaaaaaaaaaaaaaaaaaaaaaaaaaaaaaaaaaaaaaaaaaaaaaaaaaaaaaaaaaaaaaaaaaaaaaaaaaaa

SEQ ID NO: 24006 - RNA, 4129 nt, Artificial Sequence
  SARS-CoV-2/Wuhan/WIV05/2019__EPI_ISL_402128 spike protein mRNA gc (1-1273)(K986P_V987P_K986P_V987P_K417N_E484K_N501Y_D614G)
aggagacccgugacccggaaguuguacggcuacgcgacuuucccucccacaaacccucgcgcccuuccuuuccuacuugggcccggcagaaagcuuaccauguucguguuccuggugcugcugccccuggugagcagccagugcgugaaccugaccacccggacccagcugccaccagccuacaccaacagcuucacccggggcgucuacuaccccgacaagguguuccggagcagcguccugcacagcacccaggaccuguuccugcccuucuucagcaacgugaccugguuccacgccauccacgugagcggcaccaacggcaccaagcgguucgacaaccccgugcugcccuucaacgacggcguguacuucgccagcaccgagaagagcaacaucauccggggcuggaucuucggcaccacccuggacagcaagacccagagccugcugaucgugaauaacgccaccaacguggugaucaaggugugcgaguuccaguucugcaacgaccccuuccugggcguguacuaccacaagaacaacaagagcuggauggagagcgaguuccggguguacagcagcgccaacaacugcaccuucgaguacgugagccagcccuuccugauggaccuggagggcaagcagggcaacuucaagaaccugcgggaguucguguucaagaacaucgacggcuacuucaagaucuacagcaagcacaccccaaucaaccuggugcgggaucugccccagggcuucucagcccuggagccccugguggaccugcccaucggcaucaacaucacccgguuccagacccugcuggcccugcaccggagcuaccugaccccaggcgacagcagcagcggguggacagcaggcgcggcugcuuacuacgugggcuaccugcagccccggaccuuccugcugaaguacaacgagaacggcaccaucaccgacgccguggacugcgcccuggacccucugagcgagaccaagugcacccugaagagcuucaccguggagaagggcaucuaccagaccagcaacuuccgggugcagcccaccgagagcaucgugcgguuccccaacaucaccaaccugugccccuucggcgagguguucaacgccacccgguucgccagcguguacgccuggaaccggaagcggaucagcaacugcguggccgacuacagcgugcuguacaacagcgccagcuucagcaccuucaagugcuacggcgugagccccaccaagcugaacgaccugugcuucaccaacguguacgccgacagcuucgugauccguggcgacgaggugcggcagaucgcacccggccagacaggcaacaucgccgacuacaacuacaagcugcccgacgacuucaccggcugcgugaucgccuggaacagcaacaaccucgacagcaaggugggcggcaacuacaacuaccuguaccggcuguuccggaagagcaaccugaagcccuucgagcgggacaucagcaccgagaucuaccaagccggcuccaccccuugcaacggcgugaagggcuucaacugcuacuucccucugcagagcuacggcuuccagcccaccuacggcgugggcuaccagcccuaccgggugguggugcugagcuucgagcugcugcacgccccagccaccguguguggccccaagaagagcaccaaccuggugaagaacaagugcgugaacuucaacuucaacggccuuaccggcaccggcgugcugaccgagagcaacaagaaauuccugcccuuucagcaguucggccgggacaucgccgacaccaccgacgcugugcgggauccccagacccuggagauccuggacaucaccccuugcagcuucggcggcgugagcgugaucaccccaggcaccaacaccagcaaccagguggccgugcuguaccagggcgugaacugcaccgaggugcccguggccauccacgccgaccagcugacacccaccuggcgggucuacagcaccggcagcaacguguuccagacccgggccgguugccugaucggcgccgagcacgugaacaacagcuacgagugcgacauccccaucggcgccggcaucugugccagcuaccagacccagaccaauucaccccggagggcaaggagcguggccagccagagcaucaucgccuacaccaugagccugggcgccgagaacagcguggccuacagcaacaacagcaucgccauccccaccaacuucaccaucagcgugaccaccgagauucugcccgugagcaugaccaagaccagcguggacugcaccauguacaucugcggcgacagcaccgagugcagcaaccugcugcugcaguacggcagcuucugcacccagcugaaccgggcccugaccggcaucgccguggagcaggacaagaacacccaggagguguucgcccaggugaagcagaucuacaagaccccucccaucaaggacuucggcggcuucaacuucagccagauccugcccgaccccagcaagcccagcaagcggagcuucaucgaggaccugcuguucaacaaggugacccuagccgacgccggcuucaucaagcaguacggcgacugccucggcgacauagccgcccgggaccugaucugcgcccagaaguucaacggccugaccgugcugccuccccugcugaccgacgagaugaucgcccaguacaccagcgcccuguuagccggaaccaucaccagcggcuggacuuucggcgcuggagccgcucugcagauccccuucgccaugcagauggccuaccgguucaacggcaucggcgugacccagaacgugcuguacgagaaccagaagcugaucgccaaccaguucaacagcgccaucggcaagauccaggacagccugagcagcaccgcuagcgcccugggcaagcugcaggacguggugaaccagaacgcccaggcccugaacacccuggugaagcagcugagcagcaacuucggcgccaucagcagcgugcugaacgacauccugagccggcuggacccucccgaggccgaggugcagaucgaccggcugaucacuggccggcugcagagccugcagaccuacgugacccagcagcugauccgggccgccgagauucgggccagcgccaaccuggccgccaccaagaugagcgagugcgugcugggccagagcaagcggguggacuucugcggcaagggcuaccaccugaugagcuuuccccagagcgcaccccacggagugguguuccugcacgugaccuacgugcccgcccaggagaagaacuucaccaccgccccagccaucugccacgacggcaaggcccacuuuccccgggagggcguguucgugagcaacggcacccacugguucgugacccagcggaacuucuacgagccccagaucaucaccaccgacaacaccuucgugagcggcaacugcgacguggugaucggcaucgugaacaacaccguguacgauccccugcagcccgagcuggacagcuucaaggaggagcuggacaaguacuucaagaaucacaccagccccgacguggaccugggcgacaucagcggcaucaacgccagcguggugaacauccagaaggagaucgaucggcugaacgagguggccaagaaccugaacgagagccugaucgaccugcaggagcugggcaaguacgagcaguacaucaaguggcccugguacaucuggcugggcuucaucgccggccugaucgccaucgugauggugaccaucaugcugugcugcaugaccagcugcugcagcugccugaagggcuguugcagcugcggcagcugcugcaaguucgacgaggacgacagcgagcccgugcugaagggcgugaagcugcacuacaccugaggacuaguguccaccugucccuccugggcugcuggauugucucguuuuccugccaaauaaacaggaucagcgcuuuacagaucucaaaggcucuuuucagagccaccaaaaaaaaaaaaaaaaaaaaaaaaaaaaaaaaaaaaaaaaaaaaaaaaaaaaaaaaaaaaaaaaaaaaaaaaaaaaaaaaaaaaaaaaaaaaaaaaaaaaa

SEQ ID NO: 24007 - RNA, 4120 nt, Artificial Sequence
  SARS-CoV-2/Wuhan/WIV05/2019__EPI_ISL_402128 spike protein mRNA gc (1-1273)(K986P_V987P_K986P_V987P_L18F_D80A_D215G_L242del_A243del_ L244del_R246I_K417N_E484K_N501Y_D614G_A701V)
aggagacccgugacccggaaguuguacggcuacgcgacuuucccucccacaaacccucgcgcccuuccuuuccuacuugggcccggcagaaagcuuaccauguucguguuccuggugcugcugccccuggugagcagccagugcgugaacuucaccacccggacccagcugccaccagccuacaccaacagcuucacccggggcgucuacuaccccgacaagguguuccggagcagcguccugcacagcacccaggaccuguuccugcccuucuucagcaacgugaccugguuccacgccauccacgugagcggcaccaacggcaccaagcgguucgccaaccccgugcugcccuucaacgacggcguguacuucgccagcaccgagaagagcaacaucauccggggcuggaucuucggcaccacccuggacagcaagacccagagccugcugaucgugaauaacgccaccaacguggugaucaaggugugcgaguuccaguucugcaacgaccccuuccugggcguguacuaccacaagaacaacaagagcuggauggagagcgaguuccggguguacagcagcgccaacaacugcaccuucgaguacgugagccagcccuuccugauggaccuggagggcaagcagggcaacuucaagaaccugcgggaguucguguucaagaacaucgacggcuacuucaagaucuacagcaagcacaccccaaucaaccuggugcggggccugccccagggcuucucagcccuggagccccugguggaccugcccaucggcaucaacaucacccgguuccagacccugcacaucagcuaccugaccccaggcgacagcagcagcggguggacagcaggcgcggcugcuuacuacgugggcuaccugcagccccggaccuuccugcugaaguacaacgagaacggcaccaucaccgacgccguggacugcgcccuggacccucugagcgagaccaagugcacccugaagagcuucaccguggagaagggcaucuaccagaccagcaacuuccgggugcagcccaccgagagcaucgugcgguuccccaacaucaccaaccugugccccuucggcgagguguucaacgccacccgguucgccagcguguacgccuggaaccggaagcggaucagcaacugcguggccgacuacagcgugcuguacaacagcgccagcuucagcaccuucaagugcuacggcgugagccccaccaagcugaacgaccugugcuucaccaacguguacgccgacagcuucgugauccguggcgacgaggugcggcagaucgcacccggccagacaggcaacaucgccgacuacaacuacaagcugcccgacgacuucaccggcugcgugaucgccuggaacagcaacaaccucgacagcaaggugggcggcaacuacaacuaccuguaccggcuguuccggaagagcaaccugaagcccuucgagcgggacaucagcaccgagaucuaccaagccggcuccaccccuugcaacggcgugaagggcuucaacugcuacuucccucugcagagcuacggcuuccagcccaccuacggcgugggcuaccagcccuaccgggugguggugcugagcuucgagcugcugcacgccccagccaccguguguggccccaagaagagcaccaaccuggugaagaacaagugcgugaacuucaacuucaacggccuuaccggcaccggcgugcugaccgagagcaacaagaaauuccugcccuuucagcaguucggccgggacaucgccgacaccaccgacgcugugcgggauccccagacccuggagauccuggacaucaccccuugcagcuucggcggcgugagcgugaucaccccaggcaccaacaccagcaaccagguggccgugcuguaccagggcgugaacugcaccgaggugcccguggccauccacgccgaccagcugacacccaccuggcgggucuacagcaccggcagcaacguguuccagacccgggccgguugccugaucggcgccgagcacgugaacaacagcuacgagugcgacauccccaucggcgccggcaucugugccagcuaccagacccagaccaauucaccccggagggcaaggagcguggccagccagagcaucaucgccuacaccaugagccugggcguggagaacagcguggccuacagcaacaacagcaucgccauccccaccaacuucaccaucagcgugaccaccgagauucugcccgugagcaugaccaagaccagcguggacugcaccauguacaucugcggcgacagcaccgagugcagcaaccugcugcugcaguacggcagcuucugcacccagcugaaccgggcccugaccggcaucgccguggagcaggacaagaacacccaggagguguucgcccaggugaagcagaucuacaagaccccucccaucaaggacuucggcggcuucaacuucagccagauccugcccgaccccagcaagcccagcaagcggagcuucaucgaggaccugcuguucaacaaggugacccuagccgacgccggcuucaucaagcaguacggcgacugccucggcgacauagccgcccgggaccugaucugcgcccagaaguucaacggccugaccgugcugccuccccugcugaccgacgagaugaucgcccaguacaccagcgcccuguuagccggaaccaucaccagcggcuggacuuucggcgcuggagccgcucugcagauccccuucgccaugcagauggccuaccgguucaacggcaucggcgugacccagaacgugcuguacgagaaccagaagcugaucgccaaccaguucaacagcgccaucggcaagauccaggacagccugagcagcaccgcuagcgcccugggcaagcugcaggacguggugaaccagaacgcccaggcccugaacacccuggugaagcagcugagcagcaacuucggcgccaucagcagcgugcugaacgacauccugagccggcuggacccucccgaggccgaggugcagaucgaccggcugaucacuggccggcugcagagccugcagaccuacgugacccagcagcugauccgggccgccgagauucgggccagcgccaaccuggccgccaccaagaugagcgagugcgugcugggccagagcaagcggguggacuucugcggcaagggcuaccaccugaugagcuuuccccagagcgcaccccacggagugguguuccugcacgugaccuacgugcccgcccaggagaagaacuucaccaccgccccagccaucugccacgacggcaaggcccacuuuccccgggagggcguguucgugagcaacggcacccacugguucgugacccagcggaacuucuacgagccccagaucaucaccaccgacaacaccuucgugagcggcaacugcgacguggugaucggcaucgugaacaacaccguguacgauccccugcagcccgagcuggacagcuucaaggaggagcuggacaaguacuucaagaaucacaccagccccgacguggaccugggcgacaucagcggcaucaacgccagcguggugaacauccagaaggagaucgaucggcugaacgagguggccaagaaccugaacgagagccugaucgaccugcaggagcugggcaaguacgagcaguacaucaaguggcccugguacaucuggcugggcuucaucgccggccugaucgccaucgugauggugaccaucaugcugugcugcaugaccagcugcugcagcugccugaagggcuguugcagcugcggcagcugcugcaaguucgacgaggacgacagcgagcccgugcugaagggcgugaagcugcacuacaccugaggacuaguguccaccugucccuccugggcugcuggauugucucguuuuccugccaaauaaacaggaucagcgcuuuacagaucucaaaggcucuuuucagagccaccaaaaaaaaaaaaaaaaaaaaaaaaaaaaaaaaaaaaaaaaaaaaaaaaaaaaaaaaaaaaaaaaaaaaaaaaaaaaaaaaaaaaaaaaaaaaaaaaaaaaa

SEQ ID NO: 24008 - RNA, 4129 nt, Artificial Sequence
  SARS-CoV-2/Wuhan/WIV05/2019__EPI_ISL_402128 spike protein mRNA gc (1-1273)(K986P_V987P_K986P_V987P_E484K_D614G)
aggagacccgugacccggaaguuguacggcuacgcgacuuucccucccacaaacccucgcgcccuuccuuuccuacuugggcccggcagaaagcuuaccauguucguguuccuggugcugcugccccuggugagcagccagugcgugaaccugaccacccggacccagcugccaccagccuacaccaacagcuucacccggggcgucuacuaccccgacaagguguuccggagcagcguccugcacagcacccaggaccuguuccugcccuucuucagcaacgugaccugguuccacgccauccacgugagcggcaccaacggcaccaagcgguucgacaaccccgugcugcccuucaacgacggcguguacuucgccagcaccgagaagagcaacaucauccggggcuggaucuucggcaccacccuggacagcaagacccagagccugcugaucgugaauaacgccaccaacguggugaucaaggugugcgaguuccaguucugcaacgaccccuuccugggcguguacuaccacaagaacaacaagagcuggauggagagcgaguuccggguguacagcagcgccaacaacugcaccuucgaguacgugagccagcccuuccugauggaccuggagggcaagcagggcaacuucaagaaccugcgggaguucguguucaagaacaucgacggcuacuucaagaucuacagcaagcacaccccaaucaaccuggugcgggaucugccccagggcuucucagcccuggagccccugguggaccugcccaucggcaucaacaucacccgguuccagacccugcuggcccugcaccggagcuaccugaccccaggcgacagcagcagcggguggacagcaggcgcggcugcuuacuacgugggcuaccugcagccccggaccuuccugcugaaguacaacgagaacggcaccaucaccgacgccguggacugcgcccuggacccucugagcgagaccaagugcacccugaagagcuucaccguggagaagggcaucuaccagaccagcaacuuccgggugcagcccaccgagagcaucgugcgguuccccaacaucaccaaccugugccccuucggcgagguguucaacgccacccgguucgccagcguguacgccuggaaccggaagcggaucagcaacugcguggccgacuacagcgugcuguacaacagcgccagcuucagcaccuucaagugcuacggcgugagccccaccaagcugaacgaccugugcuucaccaacguguacgccgacagcuucgugauccguggcgacgaggugcggcagaucgcacccggccagacaggcaagaucgccgacuacaacuacaagcugcccgacgacuucaccggcugcgugaucgccuggaacagcaacaaccucgacagcaaggugggcggcaacuacaacuaccuguaccggcuguuccggaagagcaaccugaagcccuucgagcgggacaucagcaccgagaucuaccaagccggcuccaccccuugcaacggcgugaagggcuucaacugcuacuucccucugcagagcuacggcuuccagcccaccaacggcgugggcuaccagcccuaccgggugguggugcugagcuucgagcugcugcacgccccagccaccguguguggccccaagaagagcaccaaccuggugaagaacaagugcgugaacuucaacuucaacggccuuaccggcaccggcgugcugaccgagagcaacaagaaauuccugcccuuucagcaguucggccgggacaucgccgacaccaccgacgcugugcgggauccccagacccuggagauccuggacaucaccccuugcagcuucggcggcgugagcgugaucaccccaggcaccaacaccagcaaccagguggccgugcuguaccagggcgugaacugcaccgaggugcccguggccauccacgccgaccagcugacacccaccuggcgggucuacagcaccggcagcaacguguuccagacccgggccgguugccugaucggcgccgagcacgugaacaacagcuacgagugcgacauccccaucggcgccggcaucugugccagcuaccagacccagaccaauucaccccggagggcaaggagcguggccagccagagcaucaucgccuacaccaugagccugggcgccgagaacagcguggccuacagcaacaacagcaucgccauccccaccaacuucaccaucagcgugaccaccgagauucugcccgugagcaugaccaagaccagcguggacugcaccauguacaucugcggcgacagcaccgagugcagcaaccugcugcugcaguacggcagcuucugcacccagcugaaccgggcccugaccggcaucgccguggagcaggacaagaacacccaggagguguucgcccaggugaagcagaucuacaagaccccucccaucaaggacuucggcggcuucaacuucagccagauccugcccgaccccagcaagcccagcaagcggagcuucaucgaggaccugcuguucaacaaggugacccuagccgacgccggcuucaucaagcaguacggcgacugccucggcgacauagccgcccgggaccugaucugcgcccagaaguucaacggccugaccgugcugccuccccugcugaccgacgagaugaucgcccaguacaccagcgcccuguuagccggaaccaucaccagcggcuggacuuucggcgcuggagccgcucugcagauccccuucgccaugcagauggccuaccgguucaacggcaucggcgugacccagaacgugcuguacgagaaccagaagcugaucgccaaccaguucaacagcgccaucggcaagauccaggacagccugagcagcaccgcuagcgcccugggcaagcugcaggacguggugaaccagaacgcccaggcccugaacacccuggugaagcagcugagcagcaacuucggcgccaucagcagcgugcugaacgacauccugagccggcuggacccucccgaggccgaggugcagaucgaccggcugaucacuggccggcugcagagccugcagaccuacgugacccagcagcugauccgggccgccgagauucgggccagcgccaaccuggccgccaccaagaugagcgagugcgugcugggccagagcaagcggguggacuucugcggcaagggcuaccaccugaugagcuuuccccagagcgcaccccacggagugguguuccugcacgugaccuacgugcccgcccaggagaagaacuucaccaccgccccagccaucugccacgacggcaaggcccacuuuccccgggagggcguguucgugagcaacggcacccacugguucgugacccagcggaacuucuacgagccccagaucaucaccaccgacaacaccuucgugagcggcaacugcgacguggugaucggcaucgugaacaacaccguguacgauccccugcagcccgagcuggacagcuucaaggaggagcuggacaaguacuucaagaaucacaccagccccgacguggaccugggcgacaucagcggcaucaacgccagcguggugaacauccagaaggagaucgaucggcugaacgagguggccaagaaccugaacgagagccugaucgaccugcaggagcugggcaaguacgagcaguacaucaaguggcccugguacaucuggcugggcuucaucgccggccugaucgccaucgugauggugaccaucaugcugugcugcaugaccagcugcugcagcugccugaagggcuguugcagcugcggcagcugcugcaaguucgacgaggacgacagcgagcccgugcugaagggcgugaagcugcacuacaccugaggacuaguguccaccugucccuccugggcugcuggauugucucguuuuccugccaaauaaacaggaucagcgcuuuacagaucucaaaggcucuuuucagagccaccaaaaaaaaaaaaaaaaaaaaaaaaaaaaaaaaaaaaaaaaaaaaaaaaaaaaaaaaaaaaaaaaaaaaaaaaaaaaaaaaaaaaaaaaaaaaaaaaaaaaa

SEQ ID NO: 24009 - RNA, 4129 nt, Artificial Sequence
  SARS-CoV-2/Wuhan/WIV05/2019__EPI_ISL_402128 spike protein mRNA gc (1-1273)(K986P_V987P_K986P_V987P_L18F_T20N_P26S_D138Y_R190S_K417T _E484K_N501Y_D614G_H655Y_T1027I)
aggagacccgugacccggaaguuguacggcuacgcgacuuucccucccacaaacccucgcgcccuuccuuuccuacuugggcccggcagaaagcuuaccauguucguguuccuggugcugcugccccuggugagcagccagugcgugaacuucaccaaccggacccagcugccaagcgccuacaccaacagcuucacccggggcgucuacuaccccgacaagguguuccggagcagcguccugcacagcacccaggaccuguuccugcccuucuucagcaacgugaccugguuccacgccauccacgugagcggcaccaacggcaccaagcgguucgacaaccccgugcugcccuucaacgacggcguguacuucgccagcaccgagaagagcaacaucauccggggcuggaucuucggcaccacccuggacagcaagacccagagccugcugaucgugaauaacgccaccaacguggugaucaaggugugcgaguuccaguucugcaacuaccccuuccugggcguguacuaccacaagaacaacaagagcuggauggagagcgaguuccggguguacagcagcgccaacaacugcaccuucgaguacgugagccagcccuuccugauggaccuggagggcaagcagggcaacuucaagaaccugagcgaguucguguucaagaacaucgacggcuacuucaagaucuacagcaagcacaccccaaucaaccuggugcgggaucugccccagggcuucucagcccuggagccccugguggaccugcccaucggcaucaacaucacccgguuccagacccugcuggcccugcaccggagcuaccugaccccaggcgacagcagcagcggguggacagcaggcgcggcugcuuacuacgugggcuaccugcagccccggaccuuccugcugaaguacaacgagaacggcaccaucaccgacgccguggacugcgcccuggacccucugagcgagaccaagugcacccugaagagcuucaccguggagaagggcaucuaccagaccagcaacuuccgggugcagcccaccgagagcaucgugcgguuccccaacaucaccaaccugugccccuucggcgagguguucaacgccacccgguucgccagcguguacgccuggaaccggaagcggaucagcaacugcguggccgacuacagcgugcuguacaacagcgccagcuucagcaccuucaagugcuacggcgugagccccaccaagcugaacgaccugugcuucaccaacguguacgccgacagcuucgugauccguggcgacgaggugcggcagaucgcacccggccagacaggcaccaucgccgacuacaacuacaagcugcccgacgacuucaccggcugcgugaucgccuggaacagcaacaaccucgacagcaaggugggcggcaacuacaacuaccuguaccggcuguuccggaagagcaaccugaagcccuucgagcgggacaucagcaccgagaucuaccaagccggcuccaccccuugcaacggcgugaagggcuucaacugcuacuucccucugcagagcuacggcuuccagcccaccuacggcgugggcuaccagcccuaccgggugguggugcugagcuucgagcugcugcacgccccagccaccguguguggccccaagaagagcaccaaccuggugaagaacaagugcgugaacuucaacuucaacggccuuaccggcaccggcgugcugaccgagagcaacaagaaauuccugcccuuucagcaguucggccgggacaucgccgacaccaccgacgcugugcgggauccccagacccuggagauccuggacaucaccccuugcagcuucggcggcgugagcgugaucaccccaggcaccaacaccagcaaccagguggccgugcuguaccagggcgugaacugcaccgaggugcccguggccauccacgccgaccagcugacacccaccuggcgggucuacagcaccggcagcaacguguuccagacccgggccgguugccugaucggcgccgaguacgugaacaacagcuacgagugcgacauccccaucggcgccggcaucugugccagcuaccagacccagaccaauucaccccggagggcaaggagcguggccagccagagcaucaucgccuacaccaugagccugggcgccgagaacagcguggccuacagcaacaacagcaucgccauccccaccaacuucaccaucagcgugaccaccgagauucugcccgugagcaugaccaagaccagcguggacugcaccauguacaucugcggcgacagcaccgagugcagcaaccugcugcugcaguacggcagcuucugcacccagcugaaccgggcccugaccggcaucgccguggagcaggacaagaacacccaggagguguucgcccaggugaagcagaucuacaagaccccucccaucaaggacuucggcggcuucaacuucagccagauccugcccgaccccagcaagcccagcaagcggagcuucaucgaggaccugcuguucaacaaggugacccuagccgacgccggcuucaucaagcaguacggcgacugccucggcgacauagccgcccgggaccugaucugcgcccagaaguucaacggccugaccgugcugccuccccugcugaccgacgagaugaucgcccaguacaccagcgcccuguuagccggaaccaucaccagcggcuggacuuucggcgcuggagccgcucugcagauccccuucgccaugcagauggccuaccgguucaacggcaucggcgugacccagaacgugcuguacgagaaccagaagcugaucgccaaccaguucaacagcgccaucggcaagauccaggacagccugagcagcaccgcuagcgcccugggcaagcugcaggacguggugaaccagaacgcccaggcccugaacacccuggugaagcagcugagcagcaacuucggcgccaucagcagcgugcugaacgacauccugagccggcuggacccucccgaggccgaggugcagaucgaccggcugaucacuggccggcugcagagccugcagaccuacgugacccagcagcugauccgggccgccgagauucgggccagcgccaaccuggccgccaucaagaugagcgagugcgugcugggccagagcaagcggguggacuucugcggcaagggcuaccaccugaugagcuuuccccagagcgcaccccacggagugguguuccugcacgugaccuacgugcccgcccaggagaagaacuucaccaccgccccagccaucugccacgacggcaaggcccacuuuccccgggagggcguguucgugagcaacggcacccacugguucgugacccagcggaacuucuacgagccccagaucaucaccaccgacaacaccuucgugagcggcaacugcgacguggugaucggcaucgugaacaacaccguguacgauccccugcagcccgagcuggacagcuucaaggaggagcuggacaaguacuucaagaaucacaccagccccgacguggaccugggcgacaucagcggcaucaacgccagcguggugaacauccagaaggagaucgaucggcugaacgagguggccaagaaccugaacgagagccugaucgaccugcaggagcugggcaaguacgagcaguacaucaaguggcccugguacaucuggcugggcuucaucgccggccugaucgccaucgugauggugaccaucaugcugugcugcaugaccagcugcugcagcugccugaagggcuguugcagcugcggcagcugcugcaaguucgacgaggacgacagcgagcccgugcugaagggcgugaagcugcacuacaccugaggacuaguguccaccugucccuccugggcugcuggauugucucguuuuccugccaaauaaacaggaucagcgcuuuacagaucucaaaggcucuuuucagagccaccaaaaaaaaaaaaaaaaaaaaaaaaaaaaaaaaaaaaaaaaaaaaaaaaaaaaaaaaaaaaaaaaaaaaaaaaaaaaaaaaaaaaaaaaaaaaaaaaaaaaa

SEQ ID NO: 24010 - RNA, 4129 nt, Artificial Sequence
  SARS-CoV-2/Wuhan/WIV05/2019__EPI_ISL_402128 spike protein mRNA gc (1-1273)(K986P_V987P_K986P_V987P_S13I_W152C_L452R_D614G)
aggagacccgugacccggaaguuguacggcuacgcgacuuucccucccacaaacccucgcgcccuuccuuuccuacuugggcccggcagaaagcuuaccauguucguguuccuggugcugcugccccuggugagcauccagugcgugaaccugaccacccggacccagcugccaccagccuacaccaacagcuucacccggggcgucuacuaccccgacaagguguuccggagcagcguccugcacagcacccaggaccuguuccugcccuucuucagcaacgugaccugguuccacgccauccacgugagcggcaccaacggcaccaagcgguucgacaaccccgugcugcccuucaacgacggcguguacuucgccagcaccgagaagagcaacaucauccggggcuggaucuucggcaccacccuggacagcaagacccagagccugcugaucgugaauaacgccaccaacguggugaucaaggugugcgaguuccaguucugcaacgaccccuuccugggcguguacuaccacaagaacaacaagagcugcauggagagcgaguuccggguguacagcagcgccaacaacugcaccuucgaguacgugagccagcccuuccugauggaccuggagggcaagcagggcaacuucaagaaccugcgggaguucguguucaagaacaucgacggcuacuucaagaucuacagcaagcacaccccaaucaaccuggugcgggaucugccccagggcuucucagcccuggagccccugguggaccugcccaucggcaucaacaucacccgguuccagacccugcuggcccugcaccggagcuaccugaccccaggcgacagcagcagcggguggacagcaggcgcggcugcuuacuacgugggcuaccugcagccccggaccuuccugcugaaguacaacgagaacggcaccaucaccgacgccguggacugcgcccuggacccucugagcgagaccaagugcacccugaagagcuucaccguggagaagggcaucuaccagaccagcaacuuccgggugcagcccaccgagagcaucgugcgguuccccaacaucaccaaccugugccccuucggcgagguguucaacgccacccgguucgccagcguguacgccuggaaccggaagcggaucagcaacugcguggccgacuacagcgugcuguacaacagcgccagcuucagcaccuucaagugcuacggcgugagccccaccaagcugaacgaccugugcuucaccaacguguacgccgacagcuucgugauccguggcgacgaggugcggcagaucgcacccggccagacaggcaagaucgccgacuacaacuacaagcugcccgacgacuucaccggcugcgugaucgccuggaacagcaacaaccucgacagcaaggugggcggcaacuacaacuaccgcuaccggcuguuccggaagagcaaccugaagcccuucgagcgggacaucagcaccgagaucuaccaagccggcuccaccccuugcaacggcguggagggcuucaacugcuacuucccucugcagagcuacggcuuccagcccaccaacggcgugggcuaccagcccuaccgggugguggugcugagcuucgagcugcugcacgccccagccaccguguguggccccaagaagagcaccaaccuggugaagaacaagugcgugaacuucaacuucaacggccuuaccggcaccggcgugcugaccgagagcaacaagaaauuccugcccuuucagcaguucggccgggacaucgccgacaccaccgacgcugugcgggauccccagacccuggagauccuggacaucaccccuugcagcuucggcggcgugagcgugaucaccccaggcaccaacaccagcaaccagguggccgugcuguaccagggcgugaacugcaccgaggugcccguggccauccacgccgaccagcugacacccaccuggcgggucuacagcaccggcagcaacguguuccagacccgggccgguugccugaucggcgccgagcacgugaacaacagcuacgagugcgacauccccaucggcgccggcaucugugccagcuaccagacccagaccaauucaccccggagggcaaggagcguggccagccagagcaucaucgccuacaccaugagccugggcgccgagaacagcguggccuacagcaacaacagcaucgccauccccaccaacuucaccaucagcgugaccaccgagauucugcccgugagcaugaccaagaccagcguggacugcaccauguacaucugcggcgacagcaccgagugcagcaaccugcugcugcaguacggcagcuucugcacccagcugaaccgggcccugaccggcaucgccguggagcaggacaagaacacccaggagguguucgcccaggugaagcagaucuacaagaccccucccaucaaggacuucggcggcuucaacuucagccagauccugcccgaccccagcaagcccagcaagcggagcuucaucgaggaccugcuguucaacaaggugacccuagccgacgccggcuucaucaagcaguacggcgacugccucggcgacauagccgcccgggaccugaucugcgcccagaaguucaacggccugaccgugcugccuccccugcugaccgacgagaugaucgcccaguacaccagcgcccuguuagccggaaccaucaccagcggcuggacuuucggcgcuggagccgcucugcagauccccuucgccaugcagauggccuaccgguucaacggcaucggcgugacccagaacgugcuguacgagaaccagaagcugaucgccaaccaguucaacagcgccaucggcaagauccaggacagccugagcagcaccgcuagcgcccugggcaagcugcaggacguggugaaccagaacgcccaggcccugaacacccuggugaagcagcugagcagcaacuucggcgccaucagcagcgugcugaacgacauccugagccggcuggacccucccgaggccgaggugcagaucgaccggcugaucacuggccggcugcagagccugcagaccuacgugacccagcagcugauccgggccgccgagauucgggccagcgccaaccuggccgccaccaagaugagcgagugcgugcugggccagagcaagcggguggacuucugcggcaagggcuaccaccugaugagcuuuccccagagcgcaccccacggagugguguuccugcacgugaccuacgugcccgcccaggagaagaacuucaccaccgccccagccaucugccacgacggcaaggcccacuuuccccgggagggcguguucgugagcaacggcacccacugguucgugacccagcggaacuucuacgagccccagaucaucaccaccgacaacaccuucgugagcggcaacugcgacguggugaucggcaucgugaacaacaccguguacgauccccugcagcccgagcuggacagcuucaaggaggagcuggacaaguacuucaagaaucacaccagccccgacguggaccugggcgacaucagcggcaucaacgccagcguggugaacauccagaaggagaucgaucggcugaacgagguggccaagaaccugaacgagagccugaucgaccugcaggagcugggcaaguacgagcaguacaucaaguggcccugguacaucuggcugggcuucaucgccggccugaucgccaucgugauggugaccaucaugcugugcugcaugaccagcugcugcagcugccugaagggcuguugcagcugcggcagcugcugcaaguucgacgaggacgacagcgagcccgugcugaagggcgugaagcugcacuacaccugaggacuaguguccaccugucccuccugggcugcuggauugucucguuuuccugccaaauaaacaggaucagcgcuuuacagaucucaaaggcucuuuucagagccaccaaaaaaaaaaaaaaaaaaaaaaaaaaaaaaaaaaaaaaaaaaaaaaaaaaaaaaaaaaaaaaaaaaaaaaaaaaaaaaaaaaaaaaaaaaaaaaaaaaaaa

SEQ ID NO: 24011 - RNA, 4129 nt, Artificial Sequence
  SARS-CoV-2/Wuhan/WIV05/2019__EPI_ISL_402128 spike protein mRNA gc (1-1273)(K986P_V987P)
aggagacccgugacccggaaguuguacggcuacgcgacuuucccucccacaaacccucgcgcccuuccuuuccuacuugggcccggcagaaagcuuaccauguucguguuccuggugcugcugccccuggugagcagccagugcgugaaccugaccacccggacccagcugcccccugccuacaccaacagcuucacccggggcguguacuaccccgacaagguguuccggagcagcgugcugcacagcacccaggaccuguuccugcccuucuucagcaacgugaccugguuccacgccauccacgugagcggcaccaacggcaccaagcgguucgacaacccagugcugcccuucaacgacggcguguacuucgccagcaccgagaagucaaacaucauccggggcuggaucuucggcaccacccuggacagcaagacacagagccugcugaucgugaacaacgccaccaacguggugaucaaggugugcgaguuucaguucugcaacgaccccuuccugggcguguacuaccacaagaacaacaagagcuggauggagagcgaguuccgggucuacagcagcgcuaacaauugcaccuucgaguacgugagccagcccuuccugauggaccucgagggcaagcagggcaacuucaagaaccugcgggaguucguguucaagaacaucgauggcuacuucaagaucuacagcaagcacacccccaucaaccuggugcgggaccugccccagggauucagcgcccuggagccucugguggaccugcccaucggcaucaacaucaccagguuccagacccugcuggcccugcaccggagcuaccugacccccggcgacagcagcagcggcuggaccgccggcgccgccgcauacuacgugggcuaccugcagccacggaccuuccugcugaaguacaacgagaacggcaccaucaccgacgccguggacugcgcccuggacccccugagcgagaccaagugcacccuaaagagcuucaccguggagaagggcaucuaccagaccagcaacuuccgggugcagcccacugagagcaucgugcgguuccccaacauuaccaaccugugucccuucggcgagguguucaacgccacccgguucgccagcguguacgccuggaaccggaagcggaucagcaacugcguggccgacuacagcgugcuguacaacagcgccagcuucagcaccuucaagugcuacggcgugagcccuaccaagcugaacgaccugugcuucaccaacguguacgcugacagcuucgugauccggggcgacgaggugcggcagaucgcccccggccagaccggcaagaucgccgacuacaacuacaagcugcccgacgacuucaccggcugcgugaucgccuggaacagcaacaaccuggacagcaaggugggcggcaacuacaacuaccuguaccggcuguuccguaagagcaaccugaagccauucgagcgggacaucagcaccgagaucuaccaggccggcagcacccccugcaacgguguggagggcuuuaacugcuacuucccccugcagagcuacggcuuccagcccaccaacggcgugggcuaccagcccuaccgggugguggugcugagcuucgagcugcugcacgcccccgccaccgugugcggcccuaaaaagagcaccaaccuggugaagaacaagugcgugaacuucaauuucaacggccugaccggcaccggcgugcugaccgagagcaacaagaaguuccugcccuuccagcaguucggccgggauaucgccgacaccaccgacgcagugcgggacccccagacccuggagauccuggacaucaccccaugcagcuucggcggcgugagcgucaucacccccggcacaaacaccagcaaccagguggccgugcuguaccaggacgugaacugcaccgaggugcccguggccauccacgccgaccagcugacccccaccuggcggguguacagcaccggaagcaacguguuccagacccgggccggcugccugaucggcgccgagcacgugaacaacuccuacgagugcgacauccccaucggcgcuggcaucugcgccagcuaccagacccagaccaacagcccccggcgggcccggagcguggccagccagagcaucaucgccuacaccaugagcuuaggcgccgagaacagcguggccuacagcaacaacagcaucgcgaucccuaccaacuucaccaucagcgugaccaccgagauacugcccgugagcaugaccaagaccagcguggacuguaccauguacaucugcggcgacagcaccgagugcagcaaccugcugcugcaguacggcagcuucugcacccagcugaaccgggcccugaccggcaucgccguggagcaggacaagaacacccaagagguguucgcccaggugaagcagaucuacaagacucccccaaucaaggacuucggcggcuucaacuucagccagauccugcccgaccccagcaagcccagcaagcggagcuucaucgaggaccugcuguucaacaaggugacccuggccgacgccggcuucaucaagcaguacggcgauugccugggcgacaucgccgcucgggaccugaucugcgcccagaaguucaacgggcugaccgugcugcccccucugcugaccgacgagaugaucgcccaguacaccagcgcccugcuugccggcaccaucaccagcggcuggaccuucggcgccggcgcagcccugcagauccccuucgccaugcagauggccuaccgguucaacggcaucggcgugacccagaacgugcuguacgagaaccagaagcugaucgccaaccaguucaacagcgccaucggcaagauccaggacagccugagcagcaccgccagcgcccugggcaagcugcaggacguggugaaccagaacgcucaggcccugaacacccuggugaagcagcugagcagcaacuucggcgccaucagcucagugcugaaugacauccugagcaggcuggaucccccagaggccgaggugcagaucgaccggcugaucaccggccggcugcagagccugcagaccuacgugacccagcagcugauccgggccgccgagauccgggccagcgccaaccuggcagccaccaagaugagcgagugcgugcugggccagagcaagcggguggacuuuugcggcaagggcuaccaccugaugagcuucccccagagcgcuccccacggcgugguguuccuccacgugacauacguccccgcccaggagaagaacuucaccaccgcccccgccauuugccacgacggcaaggcccacuucccccgggagggcguguucgugagcaacggaacccacugguucgugacccagcggaacuucuacgagccucagaucaucaccaccgacaacaccuucgugagcggcaacugcgacguggugaucggcaucgugaacaacaccguguacgacccccugcagcccgagcuggacagcuucaaggaggagcuggacaaguacuucaagaaccacaccagcccagacguggaccugggcgacaucagcggcaucaacgccagcguggugaacauccagaaggagaucgaccggcugaacgagguggccaagaaccugaacgagagccugaucgaccugcaggagcugggcaaguacgagcaguacaucaaguggcccugguacaucuggcugggcuucaucgccggccugaucgccaucgugauggugaccaucaugcugugcugcaugaccagcugcuguagcugccugaagggcugcugcagcugcggcagcugcugcaaguucgacgaggacgacagcgagcccgugcugaagggcgugaagcugcacuacaccugaggacuaguguccaccugucccuccugggcugcuggauugucucguuuuccugccaaauaaacaggaucagcgcuuuacagaucucaaaggcucuuuucagagccaccaaaaaaaaaaaaaaaaaaaaaaaaaaaaaaaaaaaaaaaaaaaaaaaaaaaaaaaaaaaaaaaaaaaaaaaaaaaaaaaaaaaaaaaaaaaaaaaaaaaaa

SEQ ID NO: 24012 - RNA, 4129 nt, Artificial Sequence
  SARS-CoV-2/Wuhan/WIV05/2019__EPI_ISL_402128 spike protein mRNA gc (1-1273)(K986P_V987P_ D614G)
aggagacccgugacccggaaguuguacggcuacgcgacuuucccucccacaaacccucgcgcccuuccuuuccuacuugggcccggcagaaagcuuaccauguucguguuccuggugcugcugccccuggugagcagccagugcgugaaccugaccacccggacccagcugcccccugccuacaccaacagcuucacccggggcguguacuaccccgacaagguguuccggagcagcgugcugcacagcacccaggaccuguuccugcccuucuucagcaacgugaccugguuccacgccauccacgugagcggcaccaacggcaccaagcgguucgacaacccagugcugcccuucaacgacggcguguacuucgccagcaccgagaagucaaacaucauccggggcuggaucuucggcaccacccuggacagcaagacacagagccugcugaucgugaacaacgccaccaacguggugaucaaggugugcgaguuucaguucugcaacgaccccuuccugggcguguacuaccacaagaacaacaagagcuggauggagagcgaguuccgggucuacagcagcgcuaacaauugcaccuucgaguacgugagccagcccuuccugauggaccucgagggcaagcagggcaacuucaagaaccugcgggaguucguguucaagaacaucgauggcuacuucaagaucuacagcaagcacacccccaucaaccuggugcgggaccugccccagggauucagcgcccuggagccucugguggaccugcccaucggcaucaacaucaccagguuccagacccugcuggcccugcaccggagcuaccugacccccggcgacagcagcagcggcuggaccgccggcgccgccgcauacuacgugggcuaccugcagccacggaccuuccugcugaaguacaacgagaacggcaccaucaccgacgccguggacugcgcccuggacccccugagcgagaccaagugcacccuaaagagcuucaccguggagaagggcaucuaccagaccagcaacuuccgggugcagcccacugagagcaucgugcgguuccccaacauuaccaaccugugucccuucggcgagguguucaacgccacccgguucgccagcguguacgccuggaaccggaagcggaucagcaacugcguggccgacuacagcgugcuguacaacagcgccagcuucagcaccuucaagugcuacggcgugagcccuaccaagcugaacgaccugugcuucaccaacguguacgcugacagcuucgugauccggggcgacgaggugcggcagaucgcccccggccagaccggcaagaucgccgacuacaacuacaagcugcccgacgacuucaccggcugcgugaucgccuggaacagcaacaaccuggacagcaaggugggcggcaacuacaacuaccuguaccggcuguuccguaagagcaaccugaagccauucgagcgggacaucagcaccgagaucuaccaggccggcagcacccccugcaacgguguggagggcuuuaacugcuacuucccccugcagagcuacggcuuccagcccaccaacggcgugggcuaccagcccuaccgggugguggugcugagcuucgagcugcugcacgcccccgccaccgugugcggcccuaaaaagagcaccaaccuggugaagaacaagugcgugaacuucaauuucaacggccugaccggcaccggcgugcugaccgagagcaacaagaaguuccugcccuuccagcaguucggccgggauaucgccgacaccaccgacgcagugcgggacccccagacccuggagauccuggacaucaccccaugcagcuucggcggcgugagcgucaucacccccggcacaaacaccagcaaccagguggccgugcuguaccagggagugaacugcaccgaggugcccguggccauccacgccgaccagcugacccccaccuggcggguguacagcaccggcagcaacguguuccagacccgggccggcugccugaucggcgccgagcacgugaacaacuccuacgagugcgacauccccaucggcgcuggcaucugcgccagcuaccagacccagaccaacagcccccggcgggcccggagcguggccagccagagcaucaucgccuacaccaugagcuuaggcgccgagaacagcguggccuacagcaacaacagcaucgcgaucccuaccaacuucaccaucagcgugaccaccgagauacugcccgugagcaugaccaagaccagcguggacuguaccauguacaucugcggcgacagcaccgagugcagcaaccugcugcugcaguacggcagcuucugcacccagcugaaccgggcccugaccggcaucgccguggagcaggacaagaacacccaagagguguucgcccaggugaagcagaucuacaagacucccccaaucaaggacuucggcggcuucaacuucagccagauccugcccgaccccagcaagcccagcaagcggagcuucaucgaggaccugcuguucaacaaggugacccuggccgacgccggcuucaucaagcaguacggcgacugccugggggauaucgccgcucgggaccugaucugcgcccagaaguucaacggccugaccgugcugcccccucugcugaccgacgagaugaucgcccaguacaccagcgcccugcuugccggcaccaucaccagcggcuggaccuucggcgccggcgcagcccugcagauccccuucgccaugcagauggccuaccgguucaacggcaucggcgugacccagaacgugcuguacgagaaccagaagcugaucgccaaccaguucaacagcgccaucggcaagauccaggacagccugagcagcaccgccagcgcccugggcaagcugcaggacguggugaaccagaacgcucaggcccugaacacccuggugaagcagcugagcagcaacuucggcgccaucagcucagugcugaaugacauccugagcaggcuggaucccccagaggccgaggugcagaucgaccggcugaucaccggccggcugcagagccugcagaccuacgugacccagcagcugauccgggccgccgagauccgggccagcgccaaccuggcagccaccaagaugagcgagugcgugcugggccagagcaagcggguggacuuuugcggcaagggcuaccaccugaugagcuucccccagagcgcuccccacggcgugguguuccuccacgugacauacguccccgcccaggagaagaacuucaccaccgcccccgccauuugccacgacggcaaggcccacuucccccgggagggaguguucgugagcaacggcacccacugguucgugacccagcggaacuucuacgagccucagaucaucaccaccgacaacaccuucgugagcggcaacugcgacguggugaucggcaucgugaacaacaccguguacgacccccugcagcccgagcuggacagcuucaaggaggagcuggacaaguacuucaagaaccacaccagcccagacguggaccugggcgacaucagcggcaucaacgccagcguggugaacauccagaaggagaucgaccggcugaacgagguggccaagaaccugaacgagagccugaucgaccugcaggagcugggcaaguacgagcaguacaucaaguggcccugguacaucuggcugggcuucaucgccggccugaucgccaucgugauggugaccaucaugcugugcugcaugaccagcugcuguagcugccugaagggcugcugcagcugcggcagcugcugcaaguucgacgaggacgacagcgagcccgugcugaagggcgugaagcugcacuacaccugaggacuaguguccaccugucccuccugggcugcuggauugucucguuuuccugccaaauaaacaggaucagcgcuuuacagaucucaaaggcucuuuucagagccaccaaaaaaaaaaaaaaaaaaaaaaaaaaaaaaaaaaaaaaaaaaaaaaaaaaaaaaaaaaaaaaaaaaaaaaaaaaaaaaaaaaaaaaaaaaaaaaaaaaaaa

SEQ ID NO: 24013 - RNA, 4129 nt, Artificial Sequence
  SARS-CoV-2/Wuhan/WIV05/2019__EPI_ISL_402128 spike protein mRNA gc (1-1273)(K986P_V987P_A222V_D614G)
aggagacccgugacccggaaguuguacggcuacgcgacuuucccucccacaaacccucgcgcccuuccuuuccuacuugggcccggcagaaagcuuaccauguucguguuccuggugcugcugccccuggugagcagccagugcgugaaccugaccacccggacccagcugcccccugccuacaccaacagcuucacccggggcguguacuaccccgacaagguguuccggagcagcgugcugcacagcacccaggaccuguuccugcccuucuucagcaacgugaccugguuccacgccauccacgugagcggcaccaacggcaccaagcgguucgacaacccagugcugcccuucaacgacggcguguacuucgccagcaccgagaagucaaacaucauccggggcuggaucuucggcaccacccuggacagcaagacacagagccugcugaucgugaacaacgccaccaacguggugaucaaggugugcgaguuucaguucugcaacgaccccuuccugggcguguacuaccacaagaacaacaagagcuggauggagagcgaguuccgggucuacagcagcgcuaacaauugcaccuucgaguacgugagccagcccuuccugauggaccucgagggcaagcagggcaacuucaagaaccugcgggaguucguguucaagaacaucgauggcuacuucaagaucuacagcaagcacacccccaucaaccuggugcgggaccugccccagggauucagcgugcuggagccucugguggaccugcccaucggcaucaacaucaccagguuccagacccugcuggcccugcaccggagcuaccugacccccggcgacagcagcagcggcuggaccgccggcgccgccgccuacuacgugggcuaccugcagccacggaccuuccugcugaaguacaacgagaacggcaccaucaccgacgcaguggacugcgcccuggacccccugagcgagaccaagugcacccuaaagagcuucaccguggagaagggcaucuaccagaccagcaacuuccgggugcagcccacugagagcaucgugcgguuccccaacauuaccaaccugugucccuucggcgagguguucaacgccacccgguucgccagcguguacgccuggaaccggaagcggaucagcaacugcguggccgacuacagcgugcuguacaacagcgccagcuucagcaccuucaagugcuacggcgugagcccuaccaagcugaacgaccugugcuucaccaacguguacgccgacagcuucgugauccggggcgacgaggugcggcagaucgcucccggccagaccggcaagaucgccgacuacaacuacaagcugcccgacgacuucaccggcugcgugaucgccuggaacagcaacaaccuggacagcaaggugggcggcaacuacaacuaccuguaccggcuguuccguaagagcaaccugaagccauucgagcgggacaucagcaccgagaucuaccaggccggcagcacccccugcaacgguguggagggcuuuaacugcuacuucccccugcagagcuacggcuuccagcccaccaacggcgugggcuaccagcccuaccgggugguggugcugagcuucgagcugcugcacgcccccgccaccgugugcggcccuaaaaagagcaccaaccuggugaagaacaagugcgugaacuucaauuucaacggccugaccggcaccggcgugcugaccgagagcaacaagaaguuccugcccuuccagcaguucggccgggauaucgccgacaccaccgacgccgugcgggacccccagacccuggagauccuggacaucaccccaugcagcuucggcggcgucagcgugaucacccccggcacaaacaccagcaaccagguggcagugcuguaccagggagugaacugcaccgaggugcccguggccauccacgccgaccagcugacccccaccuggcggguguacagcaccggcagcaacguguuccagacccgggccggcugccugaucggcgccgagcacgugaacaacuccuacgagugcgacauccccaucggcgccggcaucugcgcuagcuaccagacccagaccaacagcccccggcgggcccggagcguggccagccagagcaucaucgccuacaccaugagcuuaggcgccgagaacagcguggccuacagcaacaacagcaucgccaucccuaccaacuucaccaucagcgugaccaccgagauacugcccgugagcaugaccaagaccagcguggacuguaccauguacaucugcggcgacagcaccgagugcagcaaccugcugcugcaguacggcagcuucugcacccagcugaaccgggcgcugaccggcaucgccguggagcaggacaagaacacccaagagguguucgcccaggugaagcagaucuacaagacucccccaaucaaggacuucggcggcuucaacuucagccagauccugcccgaccccagcaagcccagcaagcggagcuucaucgaggaccugcuguucaacaaggugacccuggccgacgccggcuucaucaagcaguacggcgacugccugggggauaucgccgcccgggaccugaucugcgcucagaaguucaacggccugaccgugcugcccccucugcugaccgacgagaugaucgcccaguacaccagcgcccugcuugccggcaccaucaccagcggcuggaccuucggcgccggcgccgcacugcagauccccuucgccaugcagauggccuaccgguucaacggcaucggcgugacccagaacgugcuguacgagaaccagaagcugaucgccaaccaguucaacagcgccaucggcaagauccaggacagccugagcagcaccgccagcgcccugggcaagcugcaggacguggugaaccagaacgcccaggcucugaacacccuggugaagcagcugagcagcaacuucggcgccaucagcucagugcugaaugacauccugagcaggcuggaucccccagaggccgaggugcagaucgaccggcugaucaccggccggcugcagagccugcagaccuacgugacccagcagcugauccgggccgccgagauccgggccagcgccaaccuggccgcaaccaagaugagcgagugcgugcugggccagagcaagcggguggacuuuugcggcaagggcuaccaccugaugagcuucccccagagcgcuccccacggcgugguguuccuccacgucacauacgugcccgcccaggagaagaacuucaccaccgcccccgccauuugccacgacggcaaggcccacuucccccgggagggaguguucgugagcaacggcacccacugguucgugacccagcggaacuucuacgagccucagaucaucaccaccgacaacaccuucgugagcggcaacugcgacguggugaucggcaucgugaacaacaccguguacgacccccugcagcccgagcuggacagcuucaaggaggagcuggacaaguacuucaagaaccacaccagcccagacguggaccugggcgacaucagcggcaucaacgccagcguggugaacauccagaaggagaucgaccggcugaacgagguggccaagaaccugaacgagagccugaucgaccugcaggagcugggcaaguacgagcaguacaucaaguggcccugguacaucuggcugggcuucaucgccggccugaucgccaucgugauggugaccaucaugcugugcugcaugaccagcugcuguagcugccugaagggcugcugcagcugcggcagcugcugcaaguucgacgaggacgacagcgagcccgugcugaagggcgugaagcugcacuacaccugaggacuaguguccaccugucccuccugggcugcuggauugucucguuuuccugccaaauaaacaggaucagcgcuuuacagaucucaaaggcucuuuucagagccaccaaaaaaaaaaaaaaaaaaaaaaaaaaaaaaaaaaaaaaaaaaaaaaaaaaaaaaaaaaaaaaaaaaaaaaaaaaaaaaaaaaaaaaaaaaaaaaaaaaaaa

SEQ ID NO: 24014 - RNA, 4129 nt, Artificial Sequence
  SARS-CoV-2/Wuhan/WIV05/2019__EPI_ISL_402128 spike protein mRNA gc (1-1273)(K986P_V987P_N439K_D614G)
aggagacccgugacccggaaguuguacggcuacgcgacuuucccucccacaaacccucgcgcccuuccuuuccuacuugggcccggcagaaagcuuaccauguucguguuccuggugcugcugccccuggugagcagccagugcgugaaccugaccacccggacccagcugcccccugccuacaccaacagcuucacccggggcguguacuaccccgacaagguguuccggagcagcgugcugcacagcacccaggaccuguuccugcccuucuucagcaacgugaccugguuccacgccauccacgugagcggcaccaacggcaccaagcgguucgacaacccagugcugcccuucaacgacggcguguacuucgccagcaccgagaagucaaacaucauccggggcuggaucuucggcaccacccuggacagcaagacacagagccugcugaucgugaacaacgccaccaacguggugaucaaggugugcgaguuucaguucugcaacgaccccuuccugggcguguacuaccacaagaacaacaagagcuggauggagagcgaguuccgggucuacagcagcgcuaacaauugcaccuucgaguacgugagccagcccuuccugauggaccucgagggcaagcagggcaacuucaagaaccugcgggaguucguguucaagaacaucgauggcuacuucaagaucuacagcaagcacacccccaucaaccuggugcgggaccugccccagggauucagcgcccuggagccucugguggaccugcccaucggcaucaacaucaccagguuccagacccugcuggcccugcaccggagcuaccugacccccggcgacagcagcagcggcuggaccgccggcgccgccgcauacuacgugggcuaccugcagccacggaccuuccugcugaaguacaacgagaacggcaccaucaccgacgccguggacugcgcccuggacccccugagcgagaccaagugcacccuaaagagcuucaccguggagaagggcaucuaccagaccagcaacuuccgggugcagcccacugagagcaucgugcgguuccccaacauuaccaaccugugucccuucggcgagguguucaacgccacccgguucgccagcguguacgccuggaaccggaagcggaucagcaacugcguggccgacuacagcgugcuguacaacagcgccagcuucagcaccuucaagugcuacggcgugagcccuaccaagcugaacgaccugugcuucaccaacguguacgcugacagcuucgugauccggggcgacgaggugcggcagaucgcccccggccagaccggcaagaucgccgacuacaacuacaagcugcccgacgacuucaccggcugcgugaucgccuggaacagcaagaaccuggacagcaaggugggcggcaacuacaacuaccuguaccggcuguuccguaagagcaaccugaagccauucgagcgggacaucagcaccgagaucuaccaggccggcagcacccccugcaacgguguggagggcuuuaacugcuacuucccccugcagagcuacggcuuccagcccaccaacggcgugggcuaccagcccuaccgggugguggugcugagcuucgagcugcugcacgcccccgccaccgugugcggcccuaaaaagagcaccaaccuggugaagaacaagugcgugaacuucaacuucaauggccugaccggcaccggcgugcugaccgagagcaacaagaaguuccugcccuuccagcaguucggccgggauaucgccgacaccaccgacgcagugcgggacccccagacccuggagauccuggacaucaccccaugcagcuucggcggcgugagcgucaucacccccggcacaaacaccagcaaccagguggccgugcuguaccagggagugaacugcaccgaggugcccguggccauccacgccgaccagcugacccccaccuggcggguguacagcaccggcagcaacguguuccagacccgggccggcugccugaucggcgccgagcacgugaacaacuccuacgagugcgacauccccaucggcgcuggcaucugcgccagcuaccagacccagaccaacagcccccggcgggcccggagcguggccagccagagcaucaucgccuacaccaugagcuuaggcgccgagaacagcguggccuacagcaacaacagcaucgcgaucccuaccaacuucaccaucagcgugaccaccgagauacugcccgugagcaugaccaagaccagcguggacuguaccauguacaucugcggcgacagcaccgagugcagcaaccugcugcugcaguacggcagcuucugcacccagcugaaccgggcccugaccggcaucgccguggagcaggacaagaacacccaagagguguucgcccaggugaagcagaucuacaagacucccccaaucaaggacuucggcggcuucaacuucagccagauccugcccgaccccagcaagcccagcaagcggagcuucaucgaggaccugcuguucaacaaggugacccuggccgacgccggcuucaucaagcaguacggcgacugccugggggauaucgccgcucgggaccugaucugcgcccagaaguucaacggccugaccgugcugcccccucugcugaccgacgagaugaucgcccaguacaccagcgcccugcuugccggcaccaucaccagcggcuggaccuucggcgccggcgcagcccugcagauccccuucgccaugcagauggccuaccgguucaacggcaucggcgugacccagaacgugcuguacgagaaccagaagcugaucgccaaccaguucaacagcgccaucggcaagauccaggacagccugagcagcaccgccagcgcccugggcaagcugcaggacguggugaaccagaacgcucaggcccugaacacccuggugaagcagcugagcagcaacuucggcgccaucagcucagugcugaacgacauccugagcaggcuggaucccccagaggccgaggugcagaucgaccggcugaucaccggccggcugcagagccugcagaccuacgugacccagcagcugauccgggccgccgagauccgggccagcgccaaucuggcagccaccaagaugagcgagugcgugcugggccagagcaagcggguggacuuuugcggcaagggcuaccaccugaugagcuucccccagagcgcuccccacggcgugguguuccuccacgugacauacguccccgcccaggagaagaacuucaccaccgcccccgccauuugccacgacggcaaggcccacuucccccgggagggaguguucgugagcaacggcacccacugguucgugacccagcggaacuucuacgagccucagaucaucaccaccgacaacaccuucgugagcggcaacugcgacguggugaucggcaucgugaacaacaccguguacgacccccugcagcccgagcuggacagcuucaaggaggagcuggacaaguacuucaagaaccacaccagcccagacguggaccugggcgacaucagcggcaucaacgccagcguggugaacauccagaaggagaucgaccggcugaacgagguggccaagaaccugaacgagagccugaucgaccugcaggagcugggcaaguacgagcaguacaucaaguggcccugguacaucuggcugggcuucaucgccggccugaucgccaucgugauggugaccaucaugcugugcugcaugaccagcugcuguagcugccugaagggcugcugcagcugcggcagcugcugcaaguucgacgaggacgacagcgagcccgugcugaagggcgugaagcugcacuacaccugaggacuaguguccaccugucccuccugggcugcuggauugucucguuuuccugccaaauaaacaggaucagcgcuuuacagaucucaaaggcucuuuucagagccaccaaaaaaaaaaaaaaaaaaaaaaaaaaaaaaaaaaaaaaaaaaaaaaaaaaaaaaaaaaaaaaaaaaaaaaaaaaaaaaaaaaaaaaaaaaaaaaaaaaaaa

SEQ ID NO: 24015 - RNA, 4129 nt, Artificial Sequence
  SARS-CoV-2/Wuhan/WIV05/2019__EPI_ISL_402128 spike protein mRNA gc (1-1273)(K986P_V987P_S477N_D614G)
aggagacccgugacccggaaguuguacggcuacgcgacuuucccucccacaaacccucgcgcccuuccuuuccuacuugggcccggcagaaagcuuaccauguucguguuccuggugcugcugccccuggugagcagccagugcgugaaccugaccacccggacccagcugcccccugccuacaccaacagcuucacccggggcguguacuaccccgacaagguguuccggagcagcgugcugcacagcacccaggaccuguuccugcccuucuucagcaacgugaccugguuccacgccauccacgugagcggcaccaacggcaccaagcgguucgacaacccagugcugcccuucaacgacggcguguacuucgccagcaccgagaagucaaacaucauccggggcuggaucuucggcaccacccuggacagcaagacacagagccugcugaucgugaacaacgccaccaacguggugaucaaggugugcgaguuucaguucugcaacgaccccuuccugggcguguacuaccacaagaacaacaagagcuggauggagagcgaguuccgggucuacagcagcgcuaacaauugcaccuucgaguacgugagccagcccuuccugauggaccucgagggcaagcagggcaacuucaagaaccugcgggaguucguguucaagaacaucgauggcuacuucaagaucuacagcaagcacacccccaucaaccuggugcgggaccugccccagggauucagcgcccuggagccucugguggaccugcccaucggcaucaacaucaccagguuccagacccugcuggcccugcaccggagcuaccugacccccggcgacagcagcagcggcuggaccgccggcgccgccgcauacuacgugggcuaccugcagccacggaccuuccugcugaaguacaacgagaacggcaccaucaccgacgccguggacugcgcccuggacccccugagcgagaccaagugcacccuaaagagcuucaccguggagaagggcaucuaccagaccagcaacuuccgggugcagcccacugagagcaucgugcgguuccccaacauuaccaaccugugucccuucggcgagguguucaacgccacccgguucgccagcguguacgccuggaaccggaagcggaucagcaacugcguggccgacuacagcgugcuguacaacagcgccagcuucagcaccuucaagugcuacggcgugagcccuaccaagcugaacgaccugugcuucaccaacguguacgcugacagcuucgugauccggggcgacgaggugcggcagaucgcccccggccagaccggcaagaucgccgacuacaacuacaagcugcccgacgacuucaccggcugcgugaucgccuggaacagcaacaaccuggacagcaaggugggcggcaacuacaacuaccuguaccggcuguuccguaagagcaaccugaagccauucgagcgggacaucagcaccgagaucuaccaggccggcaacacccccugcaacgguguggagggcuuuaacugcuacuucccccugcagagcuacggcuuccagcccaccaacggcgugggcuaccagcccuaccgggugguggugcugagcuucgagcugcugcacgcccccgccaccgugugcggcccuaaaaagagcaccaaccuggugaagaacaagugcgugaauuucaacuucaacggccugaccggcaccggcgugcugaccgagagcaacaagaaguuccugcccuuccagcaguucggccgggauaucgccgacaccaccgacgcagugcgggacccccagacccuggagauccuggacaucaccccaugcagcuucggcggcgugagcgucaucacccccggcacaaacaccagcaaccagguggccgugcuguaccagggagugaacugcaccgaggugcccguggccauccacgccgaccagcugacccccaccuggcggguguacagcaccggcagcaacguguuccagacccgggccggcugccugaucggcgccgagcacgugaacaacagcuacgagugcgacauccccaucggcgcuggcaucugcgccuccuaccagacccagaccaacagcccccggcgggcccggagcguggccagccagagcaucaucgccuacaccaugagcuuaggcgccgagaacagcguggccuacagcaacaacagcaucgcgaucccuaccaacuucaccaucagcgugaccaccgagauacugcccgugagcaugaccaagaccagcguggacuguaccauguacaucugcggcgacagcaccgagugcagcaaccugcugcugcaguacggcagcuucugcacccagcugaaccgggcccugaccggcaucgccguggagcaggacaagaacacccaagagguguucgcccaggugaagcagaucuacaagacucccccaaucaaggacuucggcggcuucaacuucagccagauccugcccgaccccagcaagcccagcaagcggagcuucaucgaggaccugcuguucaacaaggugacccuggccgacgccggcuucaucaagcaguacggcgacugccugggggauaucgccgcucgggaccugaucugcgcccagaaguucaacggccugaccgugcugcccccucugcugaccgacgagaugaucgcccaguacaccagcgcccugcuugccggcaccaucaccagcggcuggaccuucggcgccggcgcagcccugcagauccccuucgccaugcagauggccuaccgguucaacggcaucggcgugacccagaacgugcuguacgagaaccagaagcugaucgccaaccaguucaacagcgccaucggcaagauccaggacagccugagcagcaccgccagcgcccugggcaagcugcaggacguggugaaccagaacgcucaggcccugaacacccuggugaagcagcugagcagcaauuucggcgccaucagcagcgugcugaacgacauccugucaaggcuggaucccccagaggccgaggugcagaucgaccggcugaucaccggccggcugcagagccugcagaccuacgugacccagcagcugauccgggccgccgagauccgggccagcgccaaccuggcagccaccaagaugagcgagugcgugcugggccagagcaagcggguggacuuuugcggcaagggcuaccaccugaugagcuucccccagagcgcuccccacggcgugguguuccuccacgugacauacguccccgcccaggagaagaacuucaccaccgcccccgccauuugccacgacggcaaggcccacuucccccgggagggaguguucgugagcaacggcacccacugguucgugacccagcggaacuucuacgagccucagaucaucaccaccgacaacaccuucgugagcggcaacugcgacguggugaucggcaucgugaacaacaccguguacgacccccugcagcccgagcuggacagcuucaaggaggagcuggacaaguacuucaagaaccacaccagcccagacguggaccugggcgacaucagcggcaucaacgccagcguggugaacauccagaaggagaucgaccggcugaacgagguggccaagaaccugaacgagagccugaucgaccugcaggagcugggcaaguacgagcaguacaucaaguggcccugguacaucuggcugggcuucaucgccggccugaucgccaucgugauggugaccaucaugcugugcugcaugaccagcugcuguagcugccugaagggcugcugcagcugcggcagcugcugcaaguucgacgaggacgacagcgagcccgugcugaagggcgugaagcugcacuacaccugaggacuaguguccaccugucccuccugggcugcuggauugucucguuuuccugccaaauaaacaggaucagcgcuuuacagaucucaaaggcucuuuucagagccaccaaaaaaaaaaaaaaaaaaaaaaaaaaaaaaaaaaaaaaaaaaaaaaaaaaaaaaaaaaaaaaaaaaaaaaaaaaaaaaaaaaaaaaaaaaaaaaaaaaaaa

SEQ ID NO: 24016 - RNA, 4129 nt, Artificial Sequence
  SARS-CoV-2/Wuhan/WIV05/2019__EPI_ISL_402128 spike protein mRNA gc (1-1273)(K986P_V987P_N501Y_D614G)
aggagacccgugacccggaaguuguacggcuacgcgacuuucccucccacaaacccucgcgcccuuccuuuccuacuugggcccggcagaaagcuuaccauguucguguuccuggugcugcugccccuggugagcagccagugcgugaaccugaccacccggacccagcugcccccugccuacaccaacagcuucacccggggcguguacuaccccgacaagguguuccggagcagcgugcugcacagcacccaggaccuguuccugcccuucuucagcaacgugaccugguuccacgccauccacgugagcggcaccaacggcaccaagcgguucgacaacccagugcugcccuucaacgacggcguguacuucgccagcaccgagaagucaaacaucauccggggcuggaucuucggcaccacccuggacagcaagacacagagccugcugaucgugaacaacgccaccaacguggugaucaaggugugcgaguuucaguucugcaacgaccccuuccugggcguguacuaccacaagaacaacaagagcuggauggagagcgaguuccgggucuacagcagcgcuaacaauugcaccuucgaguacgugagccagcccuuccugauggaccucgagggcaagcagggcaacuucaagaaccugcgggaguucguguucaagaacaucgauggcuacuucaagaucuacagcaagcacacccccaucaaccuggugcgggaccugccccagggauucagcgcccuggagccucugguggaccugcccaucggcaucaacaucaccagguuccagacccugcuggcccugcaccggagcuaccugacccccggcgacagcagcagcggcuggaccgccggcgccgccgcauacuacgugggcuaccugcagccacggaccuuccugcugaaguacaacgagaacggcaccaucaccgacgccguggacugcgcccuggacccccugagcgagaccaagugcacccuaaagagcuucaccguggagaagggcaucuaccagaccagcaacuuccgggugcagcccacugagagcaucgugcgguuccccaacauuaccaaccugugucccuucggcgagguguucaacgccacccgguucgccagcguguacgccuggaaccggaagcggaucagcaacugcguggccgacuacagcgugcuguacaacagcgccagcuucagcaccuucaagugcuacggcgugagcccuaccaagcugaacgaccugugcuucaccaacguguacgcugacagcuucgugauccggggcgacgaggugcggcagaucgcccccggccagaccggcaagaucgccgacuacaacuacaagcugcccgacgacuucaccggcugcgugaucgccuggaacagcaacaaccuggacagcaaggugggcggcaacuacaacuaccuguaccggcuguuccguaagagcaaccugaagccauucgagcgggacaucagcaccgagaucuaccaggccggcagcacccccugcaacgguguggagggcuuuaacugcuacuucccccugcagagcuacggcuuccagcccaccuacggcgugggcuaccagcccuaccgggugguggugcugagcuucgagcugcugcacgcccccgccaccgugugcggcccuaaaaagagcaccaaccuggugaagaacaagugcgugaacuucaacuucaauggccugaccggcaccggcgugcugaccgagagcaacaagaaguuccugcccuuccagcaguucggccgggauaucgccgacaccaccgacgcagugcgggacccccagacccuggagauccuggacaucaccccaugcagcuucggcggcgugagcgucaucacccccggcacaaacaccagcaaccagguggccgugcuguaccagggagugaacugcaccgaggugcccguggccauccacgccgaccagcugacccccaccuggcggguguacagcaccggcagcaacguguuccagacccgggccggcugccugaucggcgccgagcacgugaacaacuccuacgagugcgacauccccaucggcgcuggcaucugcgccagcuaccagacccagaccaacagcccccggcgggcccggagcguggccagccagagcaucaucgccuacaccaugagcuuaggcgccgagaacagcguggccuacagcaacaacagcaucgcgaucccuaccaacuucaccaucagcgugaccaccgagauacugcccgugagcaugaccaagaccagcguggacuguaccauguacaucugcggcgacagcaccgagugcagcaaccugcugcugcaguacggcagcuucugcacccagcugaaccgggcccugaccggcaucgccguggagcaggacaagaacacccaagagguguucgcccaggugaagcagaucuacaagacucccccaaucaaggacuucggcggcuucaacuucagccagauccugcccgaccccagcaagcccagcaagcggagcuucaucgaggaccugcuguucaacaaggugacccuggccgacgccggcuucaucaagcaguacggcgacugccugggggauaucgccgcucgggaccugaucugcgcccagaaguucaacggccugaccgugcugcccccucugcugaccgacgagaugaucgcccaguacaccagcgcccugcuugccggcaccaucaccagcggcuggaccuucggcgccggcgcagcccugcagauccccuucgccaugcagauggccuaccgguucaacggcaucggcgugacccagaacgugcuguacgagaaccagaagcugaucgccaaccaguucaacagcgccaucggcaagauccaggacagccugagcagcaccgccagcgcccugggcaagcugcaggacguggugaaccagaacgcucaggcccugaacacccuggugaagcagcugagcagcaacuucggcgccaucagcucagugcugaacgacauccugagcaggcuggaucccccagaggccgaggugcagaucgaccggcugaucaccggccggcugcagagccugcagaccuacgugacccagcagcugauccgggccgccgagauccgggccagcgccaaucuggcagccaccaagaugagcgagugcgugcugggccagagcaagcggguggacuuuugcggcaagggcuaccaccugaugagcuucccccagagcgcuccccacggcgugguguuccuccacgugacauacguccccgcccaggagaagaacuucaccaccgcccccgccauuugccacgacggcaaggcccacuucccccgggagggaguguucgugagcaacggcacccacugguucgugacccagcggaacuucuacgagccucagaucaucaccaccgacaacaccuucgugagcggcaacugcgacguggugaucggcaucgugaacaacaccguguacgacccccugcagcccgagcuggacagcuucaaggaggagcuggacaaguacuucaagaaccacaccagcccagacguggaccugggcgacaucagcggcaucaacgccagcguggugaacauccagaaggagaucgaccggcugaacgagguggccaagaaccugaacgagagccugaucgaccugcaggagcugggcaaguacgagcaguacaucaaguggcccugguacaucuggcugggcuucaucgccggccugaucgccaucgugauggugaccaucaugcugugcugcaugaccagcugcuguagcugccugaagggcugcugcagcugcggcagcugcugcaaguucgacgaggacgacagcgagcccgugcugaagggcgugaagcugcacuacaccugaggacuaguguccaccugucccuccugggcugcuggauugucucguuuuccugccaaauaaacaggaucagcgcuuuacagaucucaaaggcucuuuucagagccaccaaaaaaaaaaaaaaaaaaaaaaaaaaaaaaaaaaaaaaaaaaaaaaaaaaaaaaaaaaaaaaaaaaaaaaaaaaaaaaaaaaaaaaaaaaaaaaaaaaaaa

SEQ ID NO: 24017 - RNA, 4123 nt, Artificial Sequence
  SARS-CoV-2/Wuhan/WIV05/2019__EPI_ISL_402128 spike protein mRNA gc (1-1273)(K986P_V987P_H69del_V70del_D614G)
aggagacccgugacccggaaguuguacggcuacgcgacuuucccucccacaaacccucgcgcccuuccuuuccuacuugggcccggcagaaagcuuaccauguucguguuccuggugcugcugccccuggugagcagccagugcgugaaccugaccacccggacccagcugcccccugccuacaccaacagcuucacccggggcguguacuaccccgacaagguguuccggagcagcgugcugcacagcacccaggaccuguuccugcccuucuucagcaacgugaccugguuccacgccaucagcggcaccaacggcaccaagcgguucgacaacccagugcugcccuucaacgacggcguguacuucgccagcaccgagaagucaaacaucauccggggcuggaucuucggcaccacccuggacagcaagacacagagccugcugaucgugaacaacgccaccaacguggugaucaaggugugcgaguuucaguucugcaacgaccccuuccugggcguguacuaccacaagaacaacaagagcuggauggagagcgaguuccggguguacagcagcgcuaacaauugcaccuucgaguacgucagccagcccuuccugauggaccucgagggcaagcagggcaacuucaagaaccugcgggaguucguguucaagaacaucgauggcuacuucaagaucuacagcaagcacacccccaucaaccuggugcgggaccugccccagggauucagcgcccuggagccucugguggaccugcccaucggcaucaacaucaccagguuccagacccugcuggcccugcaccggagcuaccugacccccggcgacagcagcagcggcuggaccgccggcgccgccgcauacuacgugggcuaccugcagccacggaccuuccugcugaaguacaacgagaacggcaccaucaccgacgccguggacugcgcccuggacccccugagcgagaccaagugcacccuaaagagcuucaccguggagaagggcaucuaccagaccagcaacuuccgggugcagcccacugagagcaucgugcgguuccccaacauuaccaaccugugucccuucggcgagguguucaacgccacccgguucgccagcguguacgccuggaaccggaagcggaucagcaacugcguggccgacuacagcgugcuguacaacagcgccagcuucagcaccuucaagugcuacggcgugagcccuaccaagcugaacgaccugugcuucaccaacguguacgcugacagcuucgugauccggggcgacgaggugcggcagaucgcccccggccagaccggcaagaucgccgacuacaacuacaagcugcccgacgacuucaccggcugcgugaucgccuggaacagcaacaaccuggacagcaaggugggcggcaacuacaacuaccuguaccggcuguuccguaagagcaaccugaagccauucgagcgggacaucagcaccgagaucuaccaggccggcagcacccccugcaacgguguggagggcuuuaacugcuacuucccccugcagagcuacggcuuccagcccaccaacggcgugggcuaccagcccuaccgggugguggugcugagcuucgagcugcugcacgcccccgccaccgugugcggcccuaaaaagagcaccaaccuggugaagaacaagugcgugaacuucaauuucaacggccugaccggcaccggcgugcugaccgagagcaacaagaaguuccugcccuuccagcaguucggccgggauaucgccgacaccaccgacgcagugcgggacccccagacccuggagauccuggacaucaccccaugcagcuucggcggcgugagcgugaucacccccggcacaaacaccagcaaccaggucgccgugcuguaccagggagugaacugcaccgaggugcccguggccauccacgccgaccagcugacccccaccuggcggguguacagcaccggcagcaacguguuccagacccgggccggcugccugaucggcgccgagcacgugaacaacuccuacgagugcgacauccccaucggcgcuggcaucugcgccagcuaccagacccagaccaacagcccccggcgggcccggagcguggccagccagagcaucaucgccuacaccaugagcuuaggcgccgagaacagcguggccuacagcaacaacagcaucgcgaucccuaccaacuucaccaucagcgugaccaccgagauacugcccgugagcaugaccaagaccagcguggacuguaccauguacaucugcggcgacagcaccgagugcagcaaccugcugcugcaguacggcagcuucugcacccagcugaaccgggcccugaccggcaucgccguggagcaggacaagaacacccaagagguguucgcccaggugaagcagaucuacaagacucccccaaucaaggacuucggcggcuucaacuucagccagauccugcccgaccccagcaagcccagcaagcggagcuucaucgaggaccugcuguucaacaaggugacccuggccgacgccggcuucaucaagcaguacggcgacugccugggggauaucgccgcucgggaccugaucugcgcccagaaguucaacggccugaccgugcugcccccucugcugaccgacgagaugaucgcccaguacaccagcgcccugcuugccggcaccaucaccagcggcuggaccuucggcgccggcgcagcccugcagauccccuucgccaugcagauggccuaccgguucaacggcaucggcgugacccagaacgugcuguacgagaaccagaagcugaucgccaaccaguucaacagcgccaucggcaagauccaggacagccugagcagcaccgccagcgcccugggcaagcugcaggacguggugaaccagaacgcucaggcccugaacacccuggugaagcagcugagcagcaacuucggcgccaucagcucagugcugaaugacauccugagcaggcuggaucccccagaggccgaggugcagaucgaccggcugaucaccggccggcugcagagccugcagaccuacgugacccagcagcugauccgggccgccgagauccgggccagcgccaaccuggcagccaccaagaugagcgagugcgugcugggccagagcaagcggguggacuuuugcggcaagggcuaccaccugaugagcuucccccagagcgcuccccacggcgugguguuccuccacgugacauacgugcccgcccaggagaagaacuucaccaccgcccccgccauuugccacgacggcaaggcccacuucccccgggagggagucuucgugagcaacggcacccacugguucgugacccagcggaacuucuacgagccucagaucaucaccaccgacaacaccuucgugagcggcaacugcgacguggugaucggcaucgugaacaacaccguguacgacccccugcagcccgagcuggacagcuucaaggaggagcuggacaaguacuucaagaaccacaccagcccagacguggaccugggcgacaucagcggcaucaacgccagcguggugaacauccagaaggagaucgaccggcugaacgagguggccaagaaccugaacgagagccugaucgaccugcaggagcugggcaaguacgagcaguacaucaaguggcccugguacaucuggcugggcuucaucgccggccugaucgccaucgugauggugaccaucaugcugugcugcaugaccagcugcuguagcugccugaagggcugcugcagcugcggcagcugcugcaaguucgacgaggacgacagcgagcccgugcugaagggcgugaagcugcacuacaccugaggacuaguguccaccugucccuccugggcugcuggauugucucguuuuccugccaaauaaacaggaucagcgcuuuacagaucucaaaggcucuuuucagagccaccaaaaaaaaaaaaaaaaaaaaaaaaaaaaaaaaaaaaaaaaaaaaaaaaaaaaaaaaaaaaaaaaaaaaaaaaaaaaaaaaaaaaaaaaaaaaaaaaaaaaa

SEQ ID NO: 24018 - RNA, 4129 nt, Artificial Sequence
  SARS-CoV-2/Wuhan/WIV05/2019__EPI_ISL_402128 spike protein mRNA gc (1-1273)(K986P_V987P_Y453F_D614G)
aggagacccgugacccggaaguuguacggcuacgcgacuuucccucccacaaacccucgcgcccuuccuuuccuacuugggcccggcagaaagcuuaccauguucguguuccuggugcugcugccccuggugagcagccagugcgugaaccugaccacccggacccagcugcccccugccuacaccaacagcuucacccggggcguguacuaccccgacaagguguuccggagcagcgugcugcacagcacccaggaccuguuccugcccuucuucagcaacgugaccugguuccacgccauccacgugagcggcaccaacggcaccaagcgguucgacaacccagugcugcccuucaacgacggcguguacuucgccagcaccgagaagucaaacaucauccggggcuggaucuucggcaccacccuggacagcaagacacagagccugcugaucgugaacaacgccaccaacguggugaucaaggugugcgaguuucaguucugcaacgaccccuuccugggcguguacuaccacaagaacaacaagagcuggauggagagcgaguuccgggucuacagcagcgcuaacaauugcaccuucgaguacgugagccagcccuuccugauggaccucgagggcaagcagggcaacuucaagaaccugcgggaguucguguucaagaacaucgauggcuacuucaagaucuacagcaagcacacccccaucaaccuggugcgggaccugccccagggauucagcgcccuggagccucugguggaccugcccaucggcaucaacaucaccagguuccagacccugcuggcccugcaccggagcuaccugacccccggcgacagcagcagcggcuggaccgccggcgccgccgcauacuacgugggcuaccugcagccacggaccuuccugcugaaguacaacgagaacggcaccaucaccgacgccguggacugcgcccuggacccccugagcgagaccaagugcacccuaaagagcuucaccguggagaagggcaucuaccagaccagcaacuuccgggugcagcccacugagagcaucgugcgguuccccaacauuaccaaccugugucccuucggcgagguguucaacgccacccgguucgccagcguguacgccuggaaccggaagcggaucagcaacugcguggccgacuacagcgugcuguacaacagcgccagcuucagcaccuucaagugcuacggcgugagcccuaccaagcugaacgaccugugcuucaccaacguguacgcugacagcuucgugauccggggcgacgaggugcggcagaucgcccccggccagaccggcaagaucgccgacuacaacuacaagcugcccgacgacuucaccggcugcgugaucgccuggaacagcaacaaccuggacagcaaggugggcggcaacuacaacuaccuguuccggcuguuccguaagagcaaccugaagccauuugagcgggacaucagcaccgagaucuaccaggccggcagcacccccugcaacgguguggagggcuucaacugcuacuucccccugcagagcuacggcuuccagcccaccaacggcgugggcuaccagcccuaccgggugguggugcugagcuucgagcugcugcacgcccccgccaccgugugcggcccuaaaaagagcaccaaccuggugaagaacaagugcgugaacuucaauuucaacggccugaccggcaccggcgugcugaccgagagcaacaagaaguuccugcccuuccagcaguucggccgggauaucgccgacaccaccgacgcagugcgggacccccagacccuggagauccuggacaucaccccaugcagcuucggcggcgugagcgucaucacccccggcacaaacaccagcaaccagguggccgugcuguaccagggagugaacugcaccgaggugcccguggccauccacgccgaccagcugacccccaccuggcggguguacagcaccggcagcaacguguuccagacccgggccggcugccugaucggcgccgagcacgugaacaacuccuacgagugcgacauccccaucggcgcuggcaucugcgccagcuaccagacccagaccaacagcccccggcgggcccggagcguggccagccagagcaucaucgccuacaccaugagcuuaggcgccgagaacagcguggccuacagcaacaacagcaucgcgaucccuaccaacuucaccaucagcgugaccaccgagauacugcccgugagcaugaccaagaccagcguggacuguaccauguacaucugcggcgacagcaccgagugcagcaaccugcugcugcaguacggcagcuucugcacccagcugaaccgggcccugaccggcaucgccguggagcaggacaagaacacccaagagguguucgcccaggugaagcagaucuacaagacucccccaaucaaggacuucggcggcuucaacuucagccagauccugcccgaccccagcaagcccagcaagcggagcuucaucgaggaccugcuguucaacaaggugacccuggccgacgccggcuucaucaagcaguacggcgacugccugggggauaucgccgcucgggaccugaucugcgcccagaaguucaacggccugaccgugcugcccccucugcugaccgacgagaugaucgcccaguacaccagcgcccugcuugccggcaccaucaccagcggcuggaccuucggcgccggcgcagcccugcagauccccuucgccaugcagauggccuaccgguucaacggcaucggcgugacccagaacgugcuguacgagaaccagaagcugaucgccaaccaguucaacagcgccaucggcaagauccaggacagccugagcagcaccgccagcgcccugggcaagcugcaggacguggugaaccagaacgcucaggcccugaacacccuggugaagcagcugagcagcaacuuuggcgccaucagcucagugcugaaugacauccugagcaggcuggaucccccagaggccgaggugcagaucgaccggcugaucaccggccggcugcagagccugcagaccuacgugacccagcagcugauccgggccgccgagauccgggccagcgccaaccuggcagccaccaagaugagcgagugcgugcugggccagagcaagcggguggacuucugcggcaagggcuaccaccugaugagcuucccccagagcgcuccccacggcgugguguuccuccacgugacauacguccccgcccaggagaagaacuucaccaccgcccccgccauuugccacgacggcaaggcccacuucccccgggagggaguguucgugagcaacggcacccacugguucgugacccagcggaacuucuacgagccucagaucaucaccaccgacaacaccuucgugagcggcaacugcgacguggugaucggcaucgugaacaacaccguguacgacccccugcagcccgagcuggacagcuucaaggaggagcuggacaaguacuucaagaaccacaccagcccagacguggaccugggcgacaucagcggcaucaacgccagcguggugaacauccagaaggagaucgaccggcugaacgagguggccaagaaccugaacgagagccugaucgaccugcaggagcugggcaaguacgagcaguacaucaaguggcccugguacaucuggcugggcuucaucgccggccugaucgccaucgugauggugaccaucaugcugugcugcaugaccagcugcuguagcugccugaagggcugcugcagcugcggcagcugcugcaaguucgacgaggacgacagcgagcccgugcugaagggcgugaagcugcacuacaccugaggacuaguguccaccugucccuccugggcugcuggauugucucguuuuccugccaaauaaacaggaucagcgcuuuacagaucucaaaggcucuuuucagagccaccaaaaaaaaaaaaaaaaaaaaaaaaaaaaaaaaaaaaaaaaaaaaaaaaaaaaaaaaaaaaaaaaaaaaaaaaaaaaaaaaaaaaaaaaaaaaaaaaaaaaa

SEQ ID NO: 24019 - RNA, 4129 nt, Artificial Sequence
  SARS-CoV-2/Wuhan/WIV05/2019__EPI_ISL_402128 spike protein mRNA gc (1-1273)(K986P_V987P_D614G_I692V)
aggagacccgugacccggaaguuguacggcuacgcgacuuucccucccacaaacccucgcgcccuuccuuuccuacuugggcccggcagaaagcuuaccauguucguguuccuggugcugcugccccuggugagcagccagugcgugaaccugaccacccggacccagcugcccccugccuacaccaacagcuucacccggggcguguacuaccccgacaagguguuccggagcagcgugcugcacagcacccaggaccuguuccugcccuucuucagcaacgugaccugguuccacgccauccacgugagcggcaccaacggcaccaagcgguucgacaacccagugcugcccuucaacgacggcguguacuucgccagcaccgagaagucaaacaucauccggggcuggaucuucggcaccacccuggacagcaagacacagagccugcugaucgugaacaacgccaccaacguggugaucaaggugugcgaguuucaguucugcaacgaccccuuccugggcguguacuaccacaagaacaacaagagcuggauggagagcgaguuccgggucuacagcagcgcuaacaauugcaccuucgaguacgugagccagcccuuccugauggaccucgagggcaagcagggcaacuucaagaaccugcgggaguucguguucaagaacaucgauggcuacuucaagaucuacagcaagcacacccccaucaaccuggugcgggaccugccccagggauucagcgcccuggagccucugguggaccugcccaucggcaucaacaucaccagguuccagacccugcuggcccugcaccggagcuaccugacccccggcgacagcagcagcggcuggaccgccggcgccgccgcauacuacgugggcuaccugcagccacggaccuuccugcugaaguacaacgagaacggcaccaucaccgacgccguggacugcgcccuggacccccugagcgagaccaagugcacccuaaagagcuucaccguggagaagggcaucuaccagaccagcaacuuccgggugcagcccacugagagcaucgugcgguuccccaacauuaccaaccugugucccuucggcgagguguucaacgccacccgguucgccagcguguacgccuggaaccggaagcggaucagcaacugcguggccgacuacagcgugcuguacaacagcgccagcuucagcaccuucaagugcuacggcgugagcccuaccaagcugaacgaccugugcuucaccaacguguacgcugacagcuucgugauccggggcgacgaggugcggcagaucgcccccggccagaccggcaagaucgccgacuacaacuacaagcugcccgacgacuucaccggcugcgugaucgccuggaacagcaacaaccuggacagcaaggugggcggcaacuacaacuaccuguaccggcuguuccguaagagcaaccugaagccauucgagcgggacaucagcaccgagaucuaccaggccggcagcacccccugcaacgguguggagggcuuuaacugcuacuucccccugcagagcuacggcuuccagcccaccaacggcgugggcuaccagcccuaccgggugguggugcugagcuucgagcugcugcacgcccccgccaccgugugcggcccuaaaaagagcaccaaccuggugaagaacaagugcgugaacuucaauuucaacggccugaccggcaccggcgugcugaccgagagcaacaagaaguuccugcccuuccagcaguucggccgggauaucgccgacaccaccgacgcagugcgggacccccagacccuggagauccuggacaucaccccaugcagcuucggcggcgugagcgucaucacccccggcacaaacaccagcaaccagguggccgugcuguaccagggagugaacugcaccgaggugcccguggccauccacgccgaccagcugacccccaccuggcggguguacagcaccggcagcaacguguuccagacccgggccggcugccugaucggcgccgagcacgugaacaacuccuacgagugcgacauccccaucggcgcuggcaucugcgccagcuaccagacccagaccaacagcccccggcgggcccggagcguggccagccagagcgugaucgccuacaccaugagcuuaggcgccgagaacagcguggccuacagcaacaacagcaucgcgaucccuaccaacuucaccaucagcgugaccaccgagauccugcccgugagcaugaccaagaccagcguggacuguaccauguacauaugcggcgacagcaccgagugcagcaaccugcugcugcaguacggcagcuucugcacccagcugaaccgggcccugaccggcaucgccguggagcaggacaagaacacccaagagguguucgcccaggugaagcagaucuacaagacucccccaaucaaggacuucggcggcuucaacuucagccagauccugcccgaccccagcaagcccagcaagcggagcuucaucgaggaccugcuguucaacaaggugacccuggccgacgccggcuucaucaagcaguacggcgacugccugggggauaucgccgcucgggaccugaucugcgcccagaaguucaacggccugaccgugcugcccccucugcugaccgacgagaugaucgcccaguacaccagcgcccugcuugccggcaccaucaccagcggcuggaccuucggcgccggcgcagcccugcagauccccuucgccaugcagauggccuaccgguucaacggcaucggcgugacccagaacgugcuguacgagaaccagaagcugaucgccaaccaguucaacagcgccaucggcaagauccaggacagccugagcagcaccgccagcgcccugggcaagcugcaggacguggugaaccagaacgcucaggcccugaacacccuggugaagcagcugagcagcaacuucggcgccaucagcucagugcugaaugacauccugagcaggcuggaucccccagaggccgaggugcagaucgaccggcugaucaccggccggcugcagagccugcagaccuacgugacccagcagcugauccgggccgccgagauccgggccagcgccaaccuggcagccaccaagaugagcgagugcgugcugggccagagcaagcggguggacuuuugcggcaagggcuaccaccugaugagcuucccccagagcgcuccccacggcgugguguuccuccacgucacauacgugcccgcccaggagaagaacuucaccaccgcccccgccaucugccacgacggcaaggcccacuucccccgggagggaguguucgugagcaacggcacccacugguucgugacccagcggaacuucuacgagccucagauuaucaccaccgacaacaccuucgugagcggcaacugcgacguggugaucggcaucgugaacaacaccguguacgacccccugcagcccgagcuggacagcuucaaggaggagcuggacaaguacuucaagaaccacaccagcccagacguggaccugggcgacaucagcggcaucaacgccagcguggugaacauccagaaggagaucgaccggcugaacgagguggccaagaaccugaacgagagccugaucgaccugcaggagcugggcaaguacgagcaguacaucaaguggcccugguacaucuggcugggcuucaucgccggccugaucgccaucgugauggugaccaucaugcugugcugcaugaccagcugcuguagcugccugaagggcugcugcagcugcggcagcugcugcaaguucgacgaggacgacagcgagcccgugcugaagggcgugaagcugcacuacaccugaggacuaguguccaccugucccuccugggcugcuggauugucucguuuuccugccaaauaaacaggaucagcgcuuuacagaucucaaaggcucuuuucagagccaccaaaaaaaaaaaaaaaaaaaaaaaaaaaaaaaaaaaaaaaaaaaaaaaaaaaaaaaaaaaaaaaaaaaaaaaaaaaaaaaaaaaaaaaaaaaaaaaaaaaaa

SEQ ID NO: 24020 - RNA, 4129 nt, Artificial Sequence
  SARS-CoV-2/Wuhan/WIV05/2019__EPI_ISL_402128 spike protein mRNA gc (1-1273)(K986P_V987P_D614G_M1229I)
aggagacccgugacccggaaguuguacggcuacgcgacuuucccucccacaaacccucgcgcccuuccuuuccuacuugggcccggcagaaagcuuaccauguucguguuccuggugcugcugccccuggugagcagccagugcgugaaccugaccacccggacccagcugcccccugccuacaccaacagcuucacccggggcguguacuaccccgacaagguguuccggagcagcgugcugcacagcacccaggaccuguuccugcccuucuucagcaacgugaccugguuccacgccauccacgugagcggcaccaacggcaccaagcgguucgacaacccagugcugcccuucaacgacggcguguacuucgccagcaccgagaagucaaacaucauccggggcuggaucuucggcaccacccuggacagcaagacacagagccugcugaucgugaacaacgccaccaacguggugaucaaggugugcgaguuucaguucugcaacgaccccuuccugggcguguacuaccacaagaacaacaagagcuggauggagagcgaguuccgggucuacagcagcgcuaacaauugcaccuucgaguacgugagccagcccuuccugauggaccucgagggcaagcagggcaacuucaagaaccugcgggaguucguguucaagaacaucgauggcuacuucaagaucuacagcaagcacacccccaucaaccuggugcgggaccugccccagggauucagcgcccuggagccucugguggaccugcccaucggcaucaacaucaccagguuccagacccugcuggcccugcaccggagcuaccugacccccggcgacagcagcagcggcuggaccgccggcgccgccgcauacuacgugggcuaccugcagccacggaccuuccugcugaaguacaacgagaacggcaccaucaccgacgccguggacugcgcccuggacccccugagcgagaccaagugcacccuaaagagcuucaccguggagaagggcaucuaccagaccagcaacuuccgggugcagcccacugagagcaucgugcgguuccccaacauuaccaaccugugucccuucggcgagguguucaacgccacccgguucgccagcguguacgccuggaaccggaagcggaucagcaacugcguggccgacuacagcgugcuguacaacagcgccagcuucagcaccuucaagugcuacggcgugagcccuaccaagcugaacgaccugugcuucaccaacguguacgcugacagcuucgugauccggggcgacgaggugcggcagaucgcccccggccagaccggcaagaucgccgacuacaacuacaagcugcccgacgacuucaccggcugcgugaucgccuggaacagcaacaaccuggacagcaaggugggcggcaacuacaacuaccuguaccggcuguuccguaagagcaaccugaagccauucgagcgggacaucagcaccgagaucuaccaggccggcagcacccccugcaacgguguggagggcuuuaacugcuacuucccccugcagagcuacggcuuccagcccaccaacggcgugggcuaccagcccuaccgggugguggugcugagcuucgagcugcugcacgcccccgccaccgugugcggcccuaaaaagagcaccaaccuggugaagaacaagugcgugaacuucaauuucaacggccugaccggcaccggcgugcugaccgagagcaacaagaaguuccugcccuuccagcaguucggccgggauaucgccgacaccaccgacgcagugcgggacccccagacccuggagauccuggacaucaccccaugcagcuucggcggcgugagcgucaucacccccggcacaaacaccagcaaccagguggccgugcuguaccagggagugaacugcaccgaggugcccguggccauccacgccgaccagcugacccccaccuggcggguguacagcaccggcagcaacguguuccagacccgggccggcugccugaucggcgccgagcacgugaacaacuccuacgagugcgacauccccaucggcgcuggcaucugcgccagcuaccagacccagaccaacagcccccggcgggcccggagcguggccagccagagcaucaucgccuacaccaugagcuuaggcgccgagaacagcguggccuacagcaacaacagcaucgcgaucccuaccaacuucaccaucagcgugaccaccgagauacugcccgugagcaugaccaagaccagcguggacuguaccauguacaucugcggcgacagcaccgagugcagcaaccugcugcugcaguacggcagcuucugcacccagcugaaccgggcccugaccggcaucgccguggagcaggacaagaacacccaagagguguucgcccaggugaagcagaucuacaagacucccccaaucaaggacuucggcggcuucaacuucagccagauccugcccgaccccagcaagcccagcaagcggagcuucaucgaggaccugcuguucaacaaggugacccuggccgacgccggcuucaucaagcaguacggcgacugccugggggauaucgccgcucgggaccugaucugcgcccagaaguucaacggccugaccgugcugcccccucugcugaccgacgagaugaucgcccaguacaccagcgcccugcuugccggcaccaucaccagcggcuggaccuucggcgccggcgcagcccugcagauccccuucgccaugcagauggccuaccgguucaacggcaucggcgugacccagaacgugcuguacgagaaccagaagcugaucgccaaccaguucaacagcgccaucggcaagauccaggacagccugagcagcaccgccagcgcccugggcaagcugcaggacguggugaaccagaacgcucaggcccugaacacccuggugaagcagcugagcagcaacuucggcgccaucagcucagugcugaaugacauccugagcaggcuggaucccccagaggccgaggugcagaucgaccggcugaucaccggccggcugcagagccugcagaccuacgugacccagcagcugauccgggccgccgagauccgggccagcgccaaccuggcagccaccaagaugagcgagugcgugcugggccagagcaagcggguggacuuuugcggcaagggcuaccaccugaugagcuucccccagagcgcuccccacggcgugguguuccuccacgugacauacguccccgcccaggagaagaacuucaccaccgcccccgccauuugccacgacggcaaggcccacuucccccgggagggaguguucgugagcaacggcacccacugguucgugacccagcggaacuucuacgagccucagaucaucaccaccgacaacaccuucgugagcggcaacugcgacguggugaucggcaucgugaacaacaccguguacgacccccugcagcccgagcuggacagcuucaaggaggagcuggacaaguacuucaagaaccacaccagcccagacguggaccugggcgacaucagcggcaucaacgccagcguggugaacauccagaaggagaucgaccggcugaacgagguggccaagaaccugaacgagagccugaucgaccugcaggagcugggcaaguacgagcaguacaucaaguggcccugguacaucuggcugggcuucaucgccggccugaucgccaucgugaucgugaccaucaugcugugcugcaugaccagcugcuguagcugccugaagggcugcugcagcugcggcagcugcugcaaguucgacgaggacgacagcgagcccgugcugaagggcgugaagcugcacuacaccugaggacuaguguccaccugucccuccugggcugcuggauugucucguuuuccugccaaauaaacaggaucagcgcuuuacagaucucaaaggcucuuuucagagccaccaaaaaaaaaaaaaaaaaaaaaaaaaaaaaaaaaaaaaaaaaaaaaaaaaaaaaaaaaaaaaaaaaaaaaaaaaaaaaaaaaaaaaaaaaaaaaaaaaaaaa

SEQ ID NO: 24021 - RNA, 4123 nt, Artificial Sequence
  SARS-CoV-2/Wuhan/WIV05/2019__EPI_ISL_402128 spike protein mRNA gc (1-1273)(K986P_V987P_H69del_V70del_A222V_Y453F_S477N_D614G_I692V)
aggagacccgugacccggaaguuguacggcuacgcgacuuucccucccacaaacccucgcgcccuuccuuuccuacuugggcccggcagaaagcuuaccauguucguguuccuggugcugcugccccuggugagcagccagugcgugaaccugaccacccggacccagcugcccccugccuacaccaacagcuucacccggggcguguacuaccccgacaagguguuccggagcagcgugcugcacagcacccaggaccuguuccugcccuucuucagcaacgugaccugguuccacgccaucagcggcaccaacggcaccaagcgguucgacaacccagugcugcccuucaacgacggcguguacuucgccagcaccgagaagucaaacaucauccggggcuggaucuucggcaccacccuggacagcaagacacagagccugcugaucgugaacaacgccaccaacguggugaucaaggugugcgaguuucaguucugcaacgaccccuuccugggcguguacuaccacaagaacaacaagagcuggauggagagcgaguuccggguguacagcagcgcuaacaauugcaccuucgaguacgucagccagcccuuccugauggaccucgagggcaagcagggcaacuucaagaaccugcgggaguucguguucaagaacaucgauggcuacuucaagaucuacagcaagcacacccccaucaaccuggugcgggaccugccccagggauucagcgugcuggagccucugguggaccugcccaucggcaucaacaucaccagguuccagacccugcuggcccugcaccggagcuaccugacccccggcgacagcagcagcggcuggaccgccggcgccgccgccuacuacgugggcuaccugcagccacggaccuuccugcugaaguacaacgagaacggcaccaucaccgacgcaguggacugcgcccuggacccccugagcgagaccaagugcacccuaaagagcuucaccguggagaagggcaucuaccagaccagcaacuuccgggugcagcccacugagagcaucgugcgguuccccaacauuaccaaccugugucccuucggcgagguguucaacgccacccgguucgccagcguguacgccuggaaccggaagcggaucagcaacugcguggccgacuacagcgugcuguacaacagcgccagcuucagcaccuucaagugcuacggcgugagcccuaccaagcugaacgaccugugcuucaccaacguguacgccgacagcuucgugauccggggcgacgaggugcggcagaucgcucccggccagaccggcaagaucgccgacuacaacuacaagcugcccgacgacuucaccggcugcgugaucgccuggaacagcaacaaccuggacagcaaggugggcggcaacuacaacuaccuguuccggcuguuccguaagagcaaccugaagccauuugagcgggacaucagcaccgagaucuaccaggccggcaacacccccugcaacgguguggagggcuucaacugcuacuucccccugcagagcuacggcuuccagcccaccaacggcgugggcuaccagcccuaccgggugguggugcugagcuucgagcugcugcacgcccccgccaccgugugcggcccuaaaaagagcaccaaccuggugaagaacaagugcgugaauuucaacuucaacggccugaccggcaccggcgugcugaccgagagcaacaagaaguuccugcccuuccagcaguucggccgggauaucgccgacaccaccgacgccgugcgggacccccagacccuggagauccuggacaucaccccaugcagcuucggcggcgugagcgucaucacccccggcacaaacaccagcaaccagguggcagugcuguaccagggagugaacugcaccgaggugcccguggccauccacgccgaccagcugacccccaccuggcggguguacagcaccggcagcaacguguuccagacccgggccggcugccugaucggcgccgagcacgugaacaacagcuacgagugcgacauccccaucggcgccggcaucugcgcuuccuaccagacccagaccaacagcccccggcgggcccggagcguggccagccagagcgugaucgccuacaccaugagcuuaggcgccgagaacagcguggccuacagcaacaacagcaucgccaucccuaccaacuucaccaucagcgugaccaccgagauccugcccgugagcaugaccaagaccagcguggacuguaccauguacauaugcggcgacagcaccgagugcagcaaccugcugcugcaguacggcagcuucugcacccagcugaaccgggcgcugaccggcaucgccguggagcaggacaagaacacccaagagguguucgcccaggugaagcagaucuacaagacucccccaaucaaggacuucggcggcuucaacuucagccagauccugcccgaccccagcaagcccagcaagcggagcuucaucgaggaccugcuguucaacaaggugacccuggccgacgccggcuucaucaagcaguacggcgacugccugggggauaucgccgcccgggaccugaucugcgcucagaaguucaacggccugaccgugcugcccccucugcugaccgacgagaugaucgcccaguacaccagcgcccugcuugccggcaccaucaccagcggcuggaccuucggcgccggcgccgcacugcagauccccuucgccaugcagauggccuaccgguucaacggcaucggcgugacccagaacgugcuguacgagaaccagaagcugaucgccaaccaguucaacagcgccaucggcaagauccaggacagccugagcagcaccgccagcgcccugggcaagcugcaggacguggugaaccagaacgcccaggcucugaacacccuggugaagcagcugagcagcaauuuuggcgccaucagcagcgugcugaacgacauccugucaaggcuggaucccccagaggccgaggugcagaucgaccggcugaucaccggccggcugcagagccugcagaccuacgugacccagcagcugauccgggccgccgagauccgggccagcgccaaccuggccgcaaccaagaugagcgagugcgugcugggccagagcaagcggguggacuucugcggcaagggcuaccaccugaugagcuucccccagagcgcuccccacggcgugguguuccuccacgucacauacgugcccgcccaggagaagaacuucaccaccgcccccgccaucugccacgacggcaaggcccacuucccccgggagggaguguucgugagcaacggcacccacugguucgugacccagcggaacuucuacgagccucagauuaucaccaccgacaacaccuucgugagcggcaacugcgacguggugaucggcaucgugaacaacaccguguacgacccccugcagcccgagcuggacagcuucaaggaggagcuggacaaguacuucaagaaccacaccagcccagacguggaccugggcgacaucagcggcaucaacgccagcguggugaacauccagaaggagaucgaccggcugaacgagguggccaagaaccugaacgagagccugaucgaccugcaggagcugggcaaguacgagcaguacaucaaguggcccugguacaucuggcugggcuucaucgccggccugaucgccaucgugauggugaccaucaugcugugcugcaugaccagcugcuguagcugccugaagggcugcugcagcugcggcagcugcugcaaguucgacgaggacgacagcgagcccgugcugaagggcgugaagcugcacuacaccugaggacuaguguccaccugucccuccugggcugcuggauugucucguuuuccugccaaauaaacaggaucagcgcuuuacagaucucaaaggcucuuuucagagccaccaaaaaaaaaaaaaaaaaaaaaaaaaaaaaaaaaaaaaaaaaaaaaaaaaaaaaaaaaaaaaaaaaaaaaaaaaaaaaaaaaaaaaaaaaaaaaaaaaaaaa

SEQ ID NO: 24022 - RNA, 4123 nt, Artificial Sequence
  SARS-CoV-2/Wuhan/WIV05/2019__EPI_ISL_402128 spike protein mRNA gc (1-1273)(K986P_V987P_H69del_V70del_Y453F_D614G_I692V_M1229I)
aggagacccgugacccggaaguuguacggcuacgcgacuuucccucccacaaacccucgcgcccuuccuuuccuacuugggcccggcagaaagcuuaccauguucguguuccuggugcugcugccccuggugagcagccagugcgugaaccugaccacccggacccagcugcccccugccuacaccaacagcuucacccggggcguguacuaccccgacaagguguuccggagcagcgugcugcacagcacccaggaccuguuccugcccuucuucagcaacgugaccugguuccacgccaucagcggcaccaacggcaccaagcgguucgacaacccagugcugcccuucaacgacggcguguacuucgccagcaccgagaagucaaacaucauccggggcuggaucuucggcaccacccuggacagcaagacacagagccugcugaucgugaacaacgccaccaacguggugaucaaggugugcgaguuucaguucugcaacgaccccuuccugggcguguacuaccacaagaacaacaagagcuggauggagagcgaguuccggguguacagcagcgcuaacaauugcaccuucgaguacgucagccagcccuuccugauggaccucgagggcaagcagggcaacuucaagaaccugcgggaguucguguucaagaacaucgauggcuacuucaagaucuacagcaagcacacccccaucaaccuggugcgggaccugccccagggauucagcgcccuggagccucugguggaccugcccaucggcaucaacaucaccagguuccagacccugcuggcccugcaccggagcuaccugacccccggcgacagcagcagcggcuggaccgccggcgccgccgcauacuacgugggcuaccugcagccacggaccuuccugcugaaguacaacgagaacggcaccaucaccgacgccguggacugcgcccuggacccccugagcgagaccaagugcacccuaaagagcuucaccguggagaagggcaucuaccagaccagcaacuuccgggugcagcccacugagagcaucgugcgguuccccaacauuaccaaccugugucccuucggcgagguguucaacgccacccgguucgccagcguguacgccuggaaccggaagcggaucagcaacugcguggccgacuacagcgugcuguacaacagcgccagcuucagcaccuucaagugcuacggcgugagcccuaccaagcugaacgaccugugcuucaccaacguguacgcugacagcuucgugauccggggcgacgaggugcggcagaucgcccccggccagaccggcaagaucgccgacuacaacuacaagcugcccgacgacuucaccggcugcgugaucgccuggaacagcaacaaccuggacagcaaggugggcggcaacuacaacuaccuguuccggcuguuccguaagagcaaccugaagccauuugagcgggacaucagcaccgagaucuaccaggccggcagcacccccugcaacgguguggagggcuucaacugcuacuucccccugcagagcuacggcuuccagcccaccaacggcgugggcuaccagcccuaccgggugguggugcugagcuucgagcugcugcacgcccccgccaccgugugcggcccuaaaaagagcaccaaccuggugaagaacaagugcgugaacuucaauuucaacggccugaccggcaccggcgugcugaccgagagcaacaagaaguuccugcccuuccagcaguucggccgggauaucgccgacaccaccgacgcagugcgggacccccagacccuggagauccuggacaucaccccaugcagcuucggcggcgugagcgugaucacccccggcacaaacaccagcaaccaggucgccgugcuguaccagggagugaacugcaccgaggugcccguggccauccacgccgaccagcugacccccaccuggcggguguacagcaccggcagcaacguguuccagacccgggccggcugccugaucggcgccgagcacgugaacaacuccuacgagugcgacauccccaucggcgcuggcaucugcgccagcuaccagacccagaccaacagcccccggcgggcccggagcguggccagccagagcgugaucgccuacaccaugagcuuaggcgccgagaacagcguggccuacagcaacaacagcaucgcgaucccuaccaacuucaccaucagcgugaccaccgagauccugcccgugagcaugaccaagaccagcguggacuguaccauguacauaugcggcgacagcaccgagugcagcaaccugcugcugcaguacggcagcuucugcacccagcugaaccgggcccugaccggcaucgccguggagcaggacaagaacacccaagagguguucgcccaggugaagcagaucuacaagacucccccaaucaaggacuucggcggcuucaacuucagccagauccugcccgaccccagcaagcccagcaagcggagcuucaucgaggaccugcuguucaacaaggugacccuggccgacgccggcuucaucaagcaguacggcgacugccugggggauaucgccgcucgggaccugaucugcgcccagaaguucaacggccugaccgugcugcccccucugcugaccgacgagaugaucgcccaguacaccagcgcccugcuugccggcaccaucaccagcggcuggaccuucggcgccggcgcagcccugcagauccccuucgccaugcagauggccuaccgguucaacggcaucggcgugacccagaacgugcuguacgagaaccagaagcugaucgccaaccaguucaacagcgccaucggcaagauccaggacagccugagcagcaccgccagcgcccugggcaagcugcaggacguggugaaccagaacgcucaggcccugaacacccuggugaagcagcugagcagcaacuuuggcgccaucagcucagugcugaaugacauccugagcaggcuggaucccccagaggccgaggugcagaucgaccggcugaucaccggccggcugcagagccugcagaccuacgugacccagcagcugauccgggccgccgagauccgggccagcgccaaccuggcagccaccaagaugagcgagugcgugcugggccagagcaagcggguggacuucugcggcaagggcuaccaccugaugagcuucccccagagcgcuccccacggcgugguguuccuccacgugacauacguccccgcccaggagaagaacuucaccaccgcccccgccaucugccacgacggcaaggcccacuucccccgggagggaguguucgugagcaacggcacccacugguucgugacccagcggaacuucuacgagccucagauuaucaccaccgacaacaccuucgugagcggcaacugcgacguggugaucggcaucgugaacaacaccguguacgacccccugcagcccgagcuggacagcuucaaggaggagcuggacaaguacuucaagaaccacaccagcccagacguggaccugggcgacaucagcggcaucaacgccagcguggugaacauccagaaggagaucgaccggcugaacgagguggccaagaaccugaacgagagccugaucgaccugcaggagcugggcaaguacgagcaguacaucaaguggcccugguacaucuggcugggcuucaucgccggccugaucgccaucgugaucgugaccaucaugcugugcugcaugaccagcugcuguagcugccugaagggcugcugcagcugcggcagcugcugcaaguucgacgaggacgacagcgagcccgugcugaagggcgugaagcugcacuacaccugaggacuaguguccaccugucccuccugggcugcuggauugucucguuuuccugccaaauaaacaggaucagcgcuuuacagaucucaaaggcucuuuucagagccaccaaaaaaaaaaaaaaaaaaaaaaaaaaaaaaaaaaaaaaaaaaaaaaaaaaaaaaaaaaaaaaaaaaaaaaaaaaaaaaaaaaaaaaaaaaaaaaaaaaaaa

SEQ ID NO: 24023 - RNA, 4120 nt, Artificial Sequence
  SARS-CoV-2/Wuhan/WIV05/2019__EPI_ISL_402128 spike protein mRNA gc (1-1273)(K986P_V987P_K986P_V987P_H69del_V70del_Y144del_N501Y_A570 D_D614G_P681H_T716I_S982A_D1118H)
aggagacccgugacccggaaguuguacggcuacgcgacuuucccucccacaaacccucgcgcccuuccuuuccuacuugggcccggcagaaagcuuaccauguucguguuccuggugcugcugccccuggugagcagccagugcgugaaccugaccacccggacccagcugcccccugccuacaccaacagcuucacccggggcguguacuaccccgacaagguguuccggagcagcgugcugcacagcacccaggaccuguuccugcccuucuucagcaacgugaccugguuccacgccaucagcggcaccaacggcaccaagcgguucgacaacccagugcugcccuucaacgacggcguguacuucgccagcaccgagaagucaaacaucauccggggcuggaucuucggcaccacccuggacagcaagacacagagccugcugaucgugaacaacgccaccaacguggugaucaaggugugcgaguuucaguucugcaacgaccccuuccugggcguguaccacaagaacaacaagagcuggauggagagcgaguuccggguguacagcagcgcuaacaauugcaccuucgaguacgucagccagcccuuccugauggaccucgagggcaagcagggcaacuucaagaaccugcgggaguucguguucaagaacaucgauggcuacuucaagaucuacagcaagcacacccccaucaaccuggugcgggaccugccccagggauucagcgcccuggagccucugguggaccugcccaucggcaucaacaucaccagguuccagacccugcuggcccugcaccggagcuaccugacccccggcgacagcagcagcggcuggaccgccggcgccgccgcauacuacgugggcuaccugcagccacggaccuuccugcugaaguacaacgagaacggcaccaucaccgacgccguggacugcgcccuggacccccugagcgagaccaagugcacccuaaagagcuucaccguggagaagggcaucuaccagaccagcaacuuccgggugcagcccacugagagcaucgugcgguuccccaacauuaccaaccugugucccuucggcgagguguucaacgccacccgguucgccagcguguacgccuggaaccggaagcggaucagcaacugcguggccgacuacagcgugcuguacaacagcgccagcuucagcaccuucaagugcuacggcgugagcccuaccaagcugaacgaccugugcuucaccaacguguacgcugacagcuucgugauccggggcgacgaggugcggcagaucgcccccggccagaccggcaagaucgccgacuacaacuacaagcugcccgacgacuucaccggcugcgugaucgccuggaacagcaacaaccuggacagcaaggugggcggcaacuacaacuaccuguaccggcuguuccguaagagcaaccugaagccauucgagcgggacaucagcaccgagaucuaccaggccggcagcacccccugcaacgguguggagggcuuuaacugcuacuucccccugcagagcuacggcuuccagcccaccuacggcgugggcuaccagcccuaccgggugguggugcugagcuucgagcugcugcacgcccccgccaccgugugcggcccuaaaaagagcaccaaccuggugaagaacaagugcgugaacuucaacuucaauggccugaccggcaccggcgugcugaccgagagcaacaagaaguuccugcccuuccagcaguucggccgggauaucgacgacaccaccgacgccgugcgggacccccagacccuggagauccuggacaucaccccaugcagcuucggcggcgugagcgugaucacccccggcacaaacaccagcaaccaggucgcagugcuguaccagggagugaacugcaccgaggugcccguggccauccacgccgaccagcugacccccaccuggcggguguacagcaccggcagcaacguguuccagacccgggccggcugccugaucggcgccgagcacgugaacaacuccuacgagugcgacauccccaucggcgccggcaucugcgcuagcuaccagacccagaccaacagccaccggcgggcccggagcguggccagccagagcaucaucgccuacaccaugagcuuaggcgccgagaacagcguggccuacagcaacaacagcaucgccauccccaucaacuucaccauaagcgugaccaccgagauccugccugugagcaugaccaagaccagcguggacuguaccauguacaucugcggcgacagcaccgagugcagcaaccugcugcugcaguacggcagcuucugcacccagcugaaccgggcgcugaccggcaucgccguggagcaggacaagaacacccaagagguguucgcccaggugaagcagaucuacaagaccccacccaucaaggacuucggcggcuucaacuucagccagauccugcccgaccccagcaagcccagcaagcggagcuucaucgaggaccugcuguucaacaaggugacucuggccgacgccggcuucaucaagcaguacggcgauugccugggggacaucgccgcccgggaccugaucugcgcucagaaguucaacggccugaccgugcugccuccccugcugaccgacgagaugaucgcccaguacaccagcgcccugcuugccggcaccaucaccagcggcuggaccuucggcgccggcgccgcacugcagauccccuucgccaugcagauggccuaccgguucaacggcaucggcgugacccagaacgugcuguacgagaaccagaagcugaucgccaaccaguucaacagcgccaucggcaagauccaggacagccugagcagcaccgccagcgcccugggcaagcugcaggacguggugaaccagaacgcccaggcucugaacacccuggugaagcagcugagcagcaacuucggcgccaucagcucagugcugaacgacauccuggccaggcuggacccacccgaggccgaggugcagaucgaccggcugaucaccggccggcugcagagccugcagaccuacgugacccagcagcugauccgggccgccgagauucgggccagcgccaaucuggcagccaccaagaugagcgagugcgugcugggccagagcaagcggguggacuuuugcggcaagggcuaccaccugaugagcuucccccagagcgcuccccacggcgugguguuccuccacgugaccuacgugcccgcccaggagaagaacuucacaaccgcccccgccaucugccacgacggcaaggcccacuucccccgggagggagucuucgugagcaacggcacccacugguucgugacccagcggaacuucuacgagccccagaucaucaccacccacaacaccuucgugagcggcaacugcgacguggugaucggcaucgugaacaacaccguguacgacccucugcagcccgagcuggacagcuucaaggaggagcuggacaaguacuucaagaaccacaccagccccgacguggaucugggcgacaucagcggcaucaacgccagcguggugaacauccagaaggagaucgaccggcugaacgagguggccaagaaccugaacgagagccugaucgaccugcaggagcugggcaaguacgagcaguacaucaaguggccaugguacaucuggcugggcuucaucgccggccugaucgccaucgugauggugaccaucaugcugugcugcaugaccagcugcuguagcugccugaagggcugcugcagcugcggcagcugcugcaaguucgacgaggacgacagcgagcccgugcugaagggcgugaagcugcacuacaccugaggacuaguguccaccugucccuccugggcugcuggauugucucguuuuccugccaaauaaacaggaucagcgcuuuacagaucucaaaggcucuuuucagagccaccaaaaaaaaaaaaaaaaaaaaaaaaaaaaaaaaaaaaaaaaaaaaaaaaaaaaaaaaaaaaaaaaaaaaaaaaaaaaaaaaaaaaaaaaaaaaaaaaaaaaa

SEQ ID NO: 24024 - RNA, 4129 nt, Artificial Sequence
  SARS-CoV-2/Wuhan/WIV05/2019__EPI_ISL_402128 spike protein mRNA gc (1-1273)(K986P_V987P_K986P_V987P_K417N_E484K_N501Y_D614G)
aggagacccgugacccggaaguuguacggcuacgcgacuuucccucccacaaacccucgcgcccuuccuuuccuacuugggcccggcagaaagcuuaccauguucguguuccuggugcugcugccccuggugagcagccagugcgugaaccugaccacccggacccagcugcccccugccuacaccaacagcuucacccggggcguguacuaccccgacaagguguuccggagcagcgugcugcacagcacccaggaccuguuccugcccuucuucagcaacgugaccugguuccacgccauccacgugagcggcaccaacggcaccaagcgguucgacaacccagugcugcccuucaacgacggcguguacuucgccagcaccgagaagucaaacaucauccggggcuggaucuucggcaccacccuggacagcaagacacagagccugcugaucgugaacaacgccaccaacguggugaucaaggugugcgaguuucaguucugcaacgaccccuuccugggcguguacuaccacaagaacaacaagagcuggauggagagcgaguuccgggucuacagcagcgcuaacaauugcaccuucgaguacgugagccagcccuuccugauggaccucgagggcaagcagggcaacuucaagaaccugcgggaguucguguucaagaacaucgauggcuacuucaagaucuacagcaagcacacccccaucaaccuggugcgggaccugccccagggauucagcgcccuggagccucugguggaccugcccaucggcaucaacaucaccagguuccagacccugcuggcccugcaccggagcuaccugacccccggcgacagcagcagcggcuggaccgccggcgccgccgcauacuacgugggcuaccugcagccacggaccuuccugcugaaguacaacgagaacggcaccaucaccgacgccguggacugcgcccuggacccccugagcgagaccaagugcacccuaaagagcuucaccguggagaagggcaucuaccagaccagcaacuuccgggugcagcccacugagagcaucgugcgguuccccaacauuaccaaccugugucccuucggcgagguguucaacgccacccgguucgccagcguguacgccuggaaccggaagcggaucagcaacugcguggccgacuacagcgugcuguacaacagcgccagcuucagcaccuucaagugcuacggcgugagcccuaccaagcugaacgaccugugcuucaccaacguguacgcugacagcuucgugauccggggcgacgaggugcggcagaucgcccccggccagaccggcaacaucgccgacuacaacuacaagcugcccgacgacuucaccggcugcgugaucgccuggaacagcaacaaccuggacagcaaggugggcggcaacuacaacuaccuguaccggcuguuccguaagagcaaccugaagccauucgagcgggacaucagcaccgagaucuaccaggccggcagcacccccugcaacggugugaagggcuuuaacugcuacuucccccugcagagcuacggcuuccagcccaccuacggcgugggcuaccagcccuaccgggugguggugcugagcuucgagcugcugcacgcccccgccaccgugugcggcccuaaaaagagcaccaaccuggugaagaacaagugcgugaacuucaauuucaacggccugaccggcaccggcgugcugaccgagagcaacaagaaguuccugcccuuccagcaguucggccgggauaucgccgacaccaccgacgcagugcgggacccccagacccuggagauccuggacaucaccccaugcagcuucggcggcgugagcgucaucacccccggcacaaacaccagcaaccagguggccgugcuguaccagggagugaacugcaccgaggugcccguggccauccacgccgaccagcugacccccaccuggcggguguacagcaccggcagcaacguguuccagacccgggccggcugccugaucggcgccgagcacgugaacaacuccuacgagugcgacauccccaucggcgcuggcaucugcgccagcuaccagacccagaccaacagcccccggcgggcccggagcguggccagccagagcaucaucgccuacaccaugagcuuaggcgccgagaacagcguggccuacagcaacaacagcaucgcgaucccuaccaacuucaccaucagcgugaccaccgagauacugcccgugagcaugaccaagaccagcguggacuguaccauguacaucugcggcgacagcaccgagugcagcaaccugcugcugcaguacggcagcuucugcacccagcugaaccgggcccugaccggcaucgccguggagcaggacaagaacacccaagagguguucgcccaggugaagcagaucuacaagacucccccaaucaaggacuucggcggcuucaacuucagccagauccugcccgaccccagcaagcccagcaagcggagcuucaucgaggaccugcuguucaacaaggugacccuggccgacgccggcuucaucaagcaguacggcgacugccugggggauaucgccgcucgggaccugaucugcgcccagaaguucaacggccugaccgugcugcccccucugcugaccgacgagaugaucgcccaguacaccagcgcccugcuugccggcaccaucaccagcggcuggaccuucggcgccggcgcagcccugcagauccccuucgccaugcagauggccuaccgguucaacggcaucggcgugacccagaacgugcuguacgagaaccagaagcugaucgccaaccaguucaacagcgccaucggcaagauccaggacagccugagcagcaccgccagcgcccugggcaagcugcaggacguggugaaccagaacgcucaggcccugaacacccuggugaagcagcugagcagcaacuucggcgccaucagcucagugcugaaugacauccugagcaggcuggaucccccagaggccgaggugcagaucgaccggcugaucaccggccggcugcagagccugcagaccuacgugacccagcagcugauccgggccgccgagauccgggccagcgccaaccuggcagccaccaagaugagcgagugcgugcugggccagagcaagcggguggacuuuugcggcaagggcuaccaccugaugagcuucccccagagcgcuccccacggcgugguguuccuccacgugacauacguccccgcccaggagaagaacuucaccaccgcccccgccauuugccacgacggcaaggcccacuucccccgggagggaguguucgugagcaacggcacccacugguucgugacccagcggaacuucuacgagccucagaucaucaccaccgacaacaccuucgugagcggcaacugcgacguggugaucggcaucgugaacaacaccguguacgacccccugcagcccgagcuggacagcuucaaggaggagcuggacaaguacuucaagaaccacaccagcccagacguggaccugggcgacaucagcggcaucaacgccagcguggugaacauccagaaggagaucgaccggcugaacgagguggccaagaaccugaacgagagccugaucgaccugcaggagcugggcaaguacgagcaguacaucaaguggcccugguacaucuggcugggcuucaucgccggccugaucgccaucgugauggugaccaucaugcugugcugcaugaccagcugcuguagcugccugaagggcugcugcagcugcggcagcugcugcaaguucgacgaggacgacagcgagcccgugcugaagggcgugaagcugcacuacaccugaggacuaguguccaccugucccuccugggcugcuggauugucucguuuuccugccaaauaaacaggaucagcgcuuuacagaucucaaaggcucuuuucagagccaccaaaaaaaaaaaaaaaaaaaaaaaaaaaaaaaaaaaaaaaaaaaaaaaaaaaaaaaaaaaaaaaaaaaaaaaaaaaaaaaaaaaaaaaaaaaaaaaaaaaaa

SEQ ID NO: 24025 - RNA, 4120 nt, Artificial Sequence
  SARS-CoV-2/Wuhan/WIV05/2019__EPI_ISL_402128 spike protein mRNA gc (1-1273)(K986P_V987P_K986P_V987P_L18F_D80A_D215G_L242del_A243del_ L244del_R246I_K417N_E484K_N501Y_D614G_A701V)
aggagacccgugacccggaaguuguacggcuacgcgacuuucccucccacaaacccucgcgcccuuccuuuccuacuugggcccggcagaaagcuuaccauguucguguuccuggugcugcugccccuggugagcagccagugcgugaacuucaccacccggacccagcugcccccugccuacaccaacagcuucacccggggcguguacuaccccgacaagguguuccggagcagcgugcugcacagcacccaggaccuguuccugcccuucuucagcaacgugaccugguuccacgccauccacgugagcggcaccaacggcaccaagcgguucgccaacccagugcugcccuucaacgacggcguguacuucgccagcaccgagaagucaaacaucauccggggcuggaucuuuggcaccacccuggacagcaagacacagagccugcugaucgugaacaacgcuaccaacguggugaucaaggugugcgaguuccaguucugcaacgaccccuuccugggcguguacuaccacaagaacaacaagagcuggauggagagcgaguuccgggucuacagcagcgccaacaauugcaccuucgaguacgugagccagcccuuccugauggaccuggagggcaagcagggcaacuucaagaaccuccgggaguucguguucaagaacaucgacggcuacuucaagaucuacagcaagcacacccccaucaaccuggugcggggacugccccagggcuucagcgcccuggagccucugguggaucugcccaucggcaucaacaucaccagguuccagacccugcacaucagcuaccugacccccggcgacagcagcagcggcuggaccgccggcgccgccgcauacuacgugggcuaccugcagccacggaccuuccugcugaaguacaacgagaacggcaccaucaccgacgccguggacugcgcccuggacccccugagcgagaccaagugcacccuuaagagcuucaccguggagaagggcaucuaccagaccagcaacuuccgggugcagcccacugagagcauugugcgguuccccaacaucaccaaccugugucccuucggcgagguguucaacgccacccgguucgccagcguguacgccuggaaccggaagcggaucagcaacugcguggccgacuacagcgugcuguacaacagcgccagcuucagcaccuucaagugcuacggcgugagcccuaccaagcugaacgaccugugcuucaccaacguguacgcugacagcuucgugauccggggcgacgaggugcggcagaucgcccccggccagaccggcaacaucgccgacuacaacuacaagcugcccgacgacuucaccggcugcgugaucgccuggaacagcaacaaccuggacagcaaggugggcggcaacuacaacuaccuguaccggcuauuccguaagagcaaccugaagccauuugagcgggacaucagcaccgagaucuaccaggccgguagcacccccugcaacggcgugaagggcuucaacugcuacuucccccugcagagcuacggcuuccagcccaccuacggcgugggcuaccagcccuaccgggugguggugcugagcuucgagcugcugcacgcccccgccaccgugugcggcccuaaaaagagcaccaaccuggugaagaacaagugcgugaacuucaauuucaacggccugaccggcaccggcgugcugaccgagagcaacaagaaguuccugcccuuccagcaguucggccgggacaucgccgacaccaccgaugcagugcgggacccccagacccuggagauccuggacaucaccccaugcagcuucggcggcgugagcgucaucacccccggaacaaacaccagcaaccagguggccgugcuguaccagggcgugaacugcaccgaggugcccguggccauccacgccgaccagcugacccccaccuggcggguguacagcaccggcagcaacguguuccagacccgggccggcugccugaucggcgccgagcacgugaacaacuccuacgagugcgacauccccaucggcgcuggcaucugcgccagcuaccagacccagaccaacagcccccggcgggcccggagcguggccagccagagcaucaucgccuacaccaugagccugggcguggagaacagcguggccuacagcaacaacagcaucgccaucccuaccaacuucaccauaagcgugaccaccgagauccugcccgugagcaugaccaagaccagcguggacuguaccauguacaucugcggcgacagcaccgagugcagcaaccuguuacugcaguacggcagcuucugcacccagcugaaccgggcgcugaccggcaucgccguggagcaggacaagaacacccaagagguguucgcccaggugaagcagaucuacaagacucccccaaucaaggacuucggcggcuucaacuucagccagauccugcccgaccccagcaagcccagcaagcggagcuucaucgaggaccugcuguucaacaaggugacccuggccgacgccggcuucaucaagcaguacggggacugccugggcgacaucgccgcccgggaccugaucugcgcucagaaguucaacggccugaccgugcugcccccucugcugaccgaugagaugaucgcccaguacaccagcgcccugcuggccggcaccaucaccagcggcuggaccuucggcgccggcgccgcacugcagauccccuucgccaugcagauggccuaccgguucaacggcaucggcgugacccagaacgugcuguacgagaaccagaagcugaucgccaaccaguucaacagcgccaucggcaagauccaggacagccugagcagcaccgccagcgcccugggcaagcugcaggacguggugaaccagaacgcccaggcucugaacacccuggugaagcagcugagcagcaacuuuggcgccaucagcucagugcugaaugacauccugagccggcuggaucccccagaggccgaggugcagaucgacaggcugaucaccggccggcugcagagccugcagaccuacgugacccagcagcugauccgggccgccgagauucgggccagcgccaaccuggccgcaaccaagaugagcgagugcgugcugggccagagcaagcggguggacuucugcggcaagggcuaccaccugaugagcuucccccagagcgcuccccacggcgugguguuccugcacgucacauacgugcccgcccaggagaagaacuucaccaccgcccccgccaucugccacgacggaaaggcccacuucccccgggagggcguguucgugagcaacggcacccacugguucgugacccagcggaacuucuacgagccucagaucaucaccaccgacaacaccuucgugagcggcaacugcgacguggugaucggcaucgugaacaacaccguguacgacccccugcagcccgagcuggacagcuucaaggaggagcucgacaaguacuucaagaaccacaccagcccagacguggaccugggcgacaucagcggcaucaacgccagcguggugaacauccagaaggagaucgaccggcugaacgagguggccaagaaccugaacgagagccugaucgaccugcaggagcugggcaaguacgagcaguacaucaaguggcccugguacaucuggcugggcuucaucgccggccugaucgccaucgugauggugaccaucaugcugugcugcaugaccagcugcuguagcugccugaagggcugcugcagcugcggcagcugcugcaaguucgacgaggacgacagcgagcccgugcugaagggcgugaagcugcacuacaccugaggacuaguguccaccugucccuccugggcugcuggauugucucguuuuccugccaaauaaacaggaucagcgcuuuacagaucucaaaggcucuuuucagagccaccaaaaaaaaaaaaaaaaaaaaaaaaaaaaaaaaaaaaaaaaaaaaaaaaaaaaaaaaaaaaaaaaaaaaaaaaaaaaaaaaaaaaaaaaaaaaaaaaaaaaa

SEQ ID NO: 24026 - RNA, 4129 nt, Artificial Sequence
  SARS-CoV-2/Wuhan/WIV05/2019__EPI_ISL_402128 spike protein mRNA gc (1-1273)(K986P_V987P_K986P_V987P_E484K_D614G)
aggagacccgugacccggaaguuguacggcuacgcgacuuucccucccacaaacccucgcgcccuuccuuuccuacuugggcccggcagaaagcuuaccauguucguguuccuggugcugcugccccuggugagcagccagugcgugaaccugaccacccggacccagcugcccccugccuacaccaacagcuucacccggggcguguacuaccccgacaagguguuccggagcagcgugcugcacagcacccaggaccuguuccugcccuucuucagcaacgugaccugguuccacgccauccacgugagcggcaccaacggcaccaagcgguucgacaacccagugcugcccuucaacgacggcguguacuucgccagcaccgagaagucaaacaucauccggggcuggaucuucggcaccacccuggacagcaagacacagagccugcugaucgugaacaacgccaccaacguggugaucaaggugugcgaguuucaguucugcaacgaccccuuccugggcguguacuaccacaagaacaacaagagcuggauggagagcgaguuccgggucuacagcagcgcuaacaauugcaccuucgaguacgugagccagcccuuccugauggaccucgagggcaagcagggcaacuucaagaaccugcgggaguucguguucaagaacaucgauggcuacuucaagaucuacagcaagcacacccccaucaaccuggugcgggaccugccccagggauucagcgcccuggagccucugguggaccugcccaucggcaucaacaucaccagguuccagacccugcuggcccugcaccggagcuaccugacccccggcgacagcagcagcggcuggaccgccggcgccgccgcauacuacgugggcuaccugcagccacggaccuuccugcugaaguacaacgagaacggcaccaucaccgacgccguggacugcgcccuggacccccugagcgagaccaagugcacccuaaagagcuucaccguggagaagggcaucuaccagaccagcaacuuccgggugcagcccacugagagcaucgugcgguuccccaacauuaccaaccugugucccuucggcgagguguucaacgccacccgguucgccagcguguacgccuggaaccggaagcggaucagcaacugcguggccgacuacagcgugcuguacaacagcgccagcuucagcaccuucaagugcuacggcgugagcccuaccaagcugaacgaccugugcuucaccaacguguacgcugacagcuucgugauccggggcgacgaggugcggcagaucgcccccggccagaccggcaagaucgccgacuacaacuacaagcugcccgacgacuucaccggcugcgugaucgccuggaacagcaacaaccuggacagcaaggugggcggcaacuacaacuaccuguaccggcuguuccguaagagcaaccugaagccauucgagcgggacaucagcaccgagaucuaccaggccggcagcacccccugcaacggugugaagggcuuuaacugcuacuucccccugcagagcuacggcuuccagcccaccaacggcgugggcuaccagcccuaccgggugguggugcugagcuucgagcugcugcacgcccccgccaccgugugcggcccuaaaaagagcaccaaccuggugaagaacaagugcgugaacuucaauuucaacggccugaccggcaccggcgugcugaccgagagcaacaagaaguuccugcccuuccagcaguucggccgggauaucgccgacaccaccgacgcagugcgggacccccagacccuggagauccuggacaucaccccaugcagcuucggcggcgugagcgucaucacccccggcacaaacaccagcaaccagguggccgugcuguaccagggagugaacugcaccgaggugcccguggccauccacgccgaccagcugacccccaccuggcggguguacagcaccggcagcaacguguuccagacccgggccggcugccugaucggcgccgagcacgugaacaacuccuacgagugcgacauccccaucggcgcuggcaucugcgccagcuaccagacccagaccaacagcccccggcgggcccggagcguggccagccagagcaucaucgccuacaccaugagcuuaggcgccgagaacagcguggccuacagcaacaacagcaucgcgaucccuaccaacuucaccaucagcgugaccaccgagauacugcccgugagcaugaccaagaccagcguggacuguaccauguacaucugcggcgacagcaccgagugcagcaaccugcugcugcaguacggcagcuucugcacccagcugaaccgggcccugaccggcaucgccguggagcaggacaagaacacccaagagguguucgcccaggugaagcagaucuacaagacucccccaaucaaggacuucggcggcuucaacuucagccagauccugcccgaccccagcaagcccagcaagcggagcuucaucgaggaccugcuguucaacaaggugacccuggccgacgccggcuucaucaagcaguacggcgacugccugggggauaucgccgcucgggaccugaucugcgcccagaaguucaacggccugaccgugcugcccccucugcugaccgacgagaugaucgcccaguacaccagcgcccugcuugccggcaccaucaccagcggcuggaccuucggcgccggcgcagcccugcagauccccuucgccaugcagauggccuaccgguucaacggcaucggcgugacccagaacgugcuguacgagaaccagaagcugaucgccaaccaguucaacagcgccaucggcaagauccaggacagccugagcagcaccgccagcgcccugggcaagcugcaggacguggugaaccagaacgcucaggcccugaacacccuggugaagcagcugagcagcaacuucggcgccaucagcucagugcugaaugacauccugagcaggcuggaucccccagaggccgaggugcagaucgaccggcugaucaccggccggcugcagagccugcagaccuacgugacccagcagcugauccgggccgccgagauccgggccagcgccaaccuggcagccaccaagaugagcgagugcgugcugggccagagcaagcggguggacuuuugcggcaagggcuaccaccugaugagcuucccccagagcgcuccccacggcgugguguuccuccacgugacauacguccccgcccaggagaagaacuucaccaccgcccccgccauuugccacgacggcaaggcccacuucccccgggagggaguguucgugagcaacggcacccacugguucgugacccagcggaacuucuacgagccucagaucaucaccaccgacaacaccuucgugagcggcaacugcgacguggugaucggcaucgugaacaacaccguguacgacccccugcagcccgagcuggacagcuucaaggaggagcuggacaaguacuucaagaaccacaccagcccagacguggaccugggcgacaucagcggcaucaacgccagcguggugaacauccagaaggagaucgaccggcugaacgagguggccaagaaccugaacgagagccugaucgaccugcaggagcugggcaaguacgagcaguacaucaaguggcccugguacaucuggcugggcuucaucgccggccugaucgccaucgugauggugaccaucaugcugugcugcaugaccagcugcuguagcugccugaagggcugcugcagcugcggcagcugcugcaaguucgacgaggacgacagcgagcccgugcugaagggcgugaagcugcacuacaccugaggacuaguguccaccugucccuccugggcugcuggauugucucguuuuccugccaaauaaacaggaucagcgcuuuacagaucucaaaggcucuuuucagagccaccaaaaaaaaaaaaaaaaaaaaaaaaaaaaaaaaaaaaaaaaaaaaaaaaaaaaaaaaaaaaaaaaaaaaaaaaaaaaaaaaaaaaaaaaaaaaaaaaaaaaa

SEQ ID NO: 24027 - RNA, 4129 nt, Artificial Sequence
  SARS-CoV-2/Wuhan/WIV05/2019__EPI_ISL_402128 spike protein mRNA gc (1-1273)(K986P_V987P_K986P_V987P_L18F_T20N_P26S_D138Y_R190S_K417T _E484K_N501Y_D614G_H655Y_T1027I)
aggagacccgugacccggaaguuguacggcuacgcgacuuucccucccacaaacccucgcgcccuuccuuuccuacuugggcccggcagaaagcuuaccauguucguguuccuggugcugcugccccuggugagcagccagugcgugaacuucaccaaccggacccagcugcccagcgccuacaccaacagcuucacccggggcguguacuacccugacaagguguuccggagcagcgugcugcacagcacccaggaccuguuccugcccuucuucagcaacgugaccugguuccacgccauccacgugagcggcaccaacggcaccaagcgguucgacaaccccgugcugccauucaacgacggcguguacuucgccagcaccgagaagucaaacaucauccggggcuggaucuuuggcaccacccuggacagcaagacccagagccugcugaucgugaacaacgccacaaacguggugaucaaggugugcgaguuccaguucugcaacuaccccuuccugggcguguacuaccacaagaacaacaagagcuggauggagagcgaguuccgggucuacagcagcgcuaauaacugcaccuucgaguacgugagccagcccuuccugauggaccuggagggcaagcagggcaacuucaagaaccucagcgaguucguguucaagaacaucgacggcuacuucaagaucuacagcaagcacacccccaucaaccuggugcgggaucugccccagggauucagcgcccuggagccccugguggaccugccuaucggcaucaacaucacccgguuccagacccugcuggcccugcacaggagcuaccugacccccggcgacagcagcagcggcuggaccgccggcgccgccgcauacuacgugggcuaccugcagccccggaccuuccugcugaaguacaacgagaacggcaccaucaccgacgccguggacugcgcccuggacccacugagcgagaccaagugcacccuaaagagcuucaccguggagaagggcaucuaccagaccagcaacuuccgggugcagcccaccgagagcaucgugcgguuccccaacauuacuaaccugugucccuucggcgagguguucaacgccacccgguucgccagcguguacgccuggaaccggaagcggaucagcaacugcguggccgacuacagcgugcuguacaacagcgccagcuucagcaccuucaagugcuacggcgugagccccaccaagcugaacgaccugugcuucaccaacguguacgcugacagcuucgugauccggggcgacgaggugcggcagaucgccccuggccagaccggcaccaucgccgacuacaacuacaagcugcccgacgacuucaccggcugcgugaucgccuggaacagcaacaaccuggacagcaaggugggcggcaacuacaacuaccuguaccggcuguuccguaagagcaaccugaagcccuuugagcgggacaucagcaccgagaucuaccaggccggcagcaccccaugcaacggugugaagggcuucaacugcuacuucccccugcagagcuacggcuuccagcccaccuacggcgugggcuaccagcccuaccgggugguggugcugagcuucgagcugcugcacgcccccgccaccgugugcggccccaaaaagagcaccaaccuggugaagaacaagugcgugaacuucaauuucaacggccugaccggcaccggcgugcugaccgagagcaacaagaaguuccugccuuuccagcaguucggccgggacaucgccgauaccaccgacgcagugcgggacccccagacccuggagauccuggacaucacccccugcagcuucggcggcgugagcgucaucaccccaggcacaaacaccagcaaccagguggccgugcuguaccagggagugaacugcaccgaggugcccguggccauccacgccgaccagcugacccccaccuggcggguguacuccaccggcagcaacguguuccagacccgggccggcugccugaucggcgccgaguacgugaacaacagcuacgagugcgacauccccaucggcgcuggcaucugcgccagcuaccagacccagaccaacagcccccggcgggcccggagcguggccagccagagcaucaucgccuacaccaugagccugggcgccgagaacagcguggccuacagcaacaacagcaucgcgauccccaccaacuucaccaucagcgugaccaccgagauauuaccugugagcaugaccaagaccagcguggacuguaccauguacaucugcggcgacagcaccgagugcagcaaccugcugcugcaguacggcagcuucugcacccagcugaaccgggcccugaccggcaucgccguggagcaggacaagaacacccaagagguguucgcccaggugaagcagaucuacaagacuccacccaucaaggacuucggcggcuucaacuucagccagauccugcccgaccccagcaagcccagcaagcggagcuucaucgaggaccugcuguucaacaaggugacccuggccgacgccggcuucaucaagcaguacggcgacugccugggggacaucgccgcucgggaucugaucugcgcccagaaguucaacggccugaccgugcugccuccccugcugaccgacgagaugaucgcccaguacaccagcgcccugcuggccggcaccaucaccagcggcuggaccuucggcgccggcgcagcccuucagauccccuucgccaugcagauggccuaccgguucaacggcaucggcgugacccagaacgugcuguacgagaaccagaagcugaucgccaaccaguucaacagcgccaucggcaagauccaggacagccugagcagcaccgccagcgcccugggcaagcugcaggacguggugaaccagaacgcucaggcccugaacacccuggugaagcagcugagcucaaacuuuggcgccaucagcagcgugcugaaugacauccugagccggcuggacccacccgaggccgaggugcagaucgacaggcugaucaccggccggcugcagagccugcagaccuacgugacccagcagcugauccgggccgccgagauccgggccagcgccaaccuggcagccauuaagaugagcgagugcgugcugggccagagcaagcggguggacuucugcggcaagggcuaccaccugaugagcuucccccagagcgcuccccacggcgugguguuccugcacgugaccuacguccccgcccaggagaagaacuucacaaccgcccccgccaucugccacgacggcaaggcccacuucccccgggagggaguguucgugagcaacggcacccacugguucgugacccagcggaacuucuacgagccccagaucaucaccaccgacaacaccuucgugagcggcaacugcgacguggugaucggcaucgugaacaacaccguguacgacccucuccagcccgagcuggacagcuucaaggaggagcuggacaaguacuucaagaaccacaccagccccgacguggaccugggcgauaucagcggcaucaacgccagcguggugaacauccagaaggagaucgaccggcugaacgagguggccaagaaccugaacgagagccugaucgaccugcaggagcugggcaaguacgagcaguacaucaaguggccaugguacaucuggcugggcuucaucgccggccugaucgccaucgugauggugaccaucaugcugugcugcaugaccagcugcuguagcugccugaagggcugcugcagcugcggcagcugcugcaaguucgacgaggacgacagcgagcccgugcugaagggcgugaagcugcacuacaccugaggacuaguguccaccugucccuccugggcugcuggauugucucguuuuccugccaaauaaacaggaucagcgcuuuacagaucucaaaggcucuuuucagagccaccaaaaaaaaaaaaaaaaaaaaaaaaaaaaaaaaaaaaaaaaaaaaaaaaaaaaaaaaaaaaaaaaaaaaaaaaaaaaaaaaaaaaaaaaaaaaaaaaaaaaa

SEQ ID NO: 24028 - RNA, 4129 nt, Artificial Sequence
  SARS-CoV-2/Wuhan/WIV05/2019__EPI_ISL_402128 spike protein mRNA gc (1-1273)(K986P_V987P_K986P_V987P_S13I_W152C_L452R_D614G)
aggagacccgugacccggaaguuguacggcuacgcgacuuucccucccacaaacccucgcgcccuuccuuuccuacuugggcccggcagaaagcuuaccauguucguguuccuggugcugcugccccuggugagcauccagugcgugaaccugaccacccggacccagcugcccccugccuacaccaacagcuucacccggggcguguacuaccccgacaagguguuccggagcagcgugcugcacagcacccaggaccuguuccugcccuucuucagcaacgugaccugguuccacgccauccacgugagcggcaccaacggcaccaagcgguucgacaacccagugcugcccuucaacgacggcguguacuucgccagcaccgagaagucaaacaucauccggggcuggaucuucggcaccacccuggacagcaagacacagagccugcugaucgugaacaacgccaccaacguggugaucaaggugugcgaguuucaguucugcaacgaccccuuccugggcguguacuaccacaagaacaacaagagcugcauggagagcgaguuccgggucuacagcagcgcuaacaauugcaccuucgaguacgugagccagcccuuccugauggaccucgagggcaagcagggcaacuucaagaaccugcgggaguucguguucaagaacaucgauggcuacuucaagaucuacagcaagcacacccccaucaaccuggugcgggaccugccccagggauucagcgcccuggagccucugguggaccugcccaucggcaucaacaucaccagguuccagacccugcuggcccugcaccggagcuaccugacccccggcgacagcagcagcggcuggaccgccggcgccgccgcauacuacgugggcuaccugcagccacggaccuuccugcugaaguacaacgagaacggcaccaucaccgacgccguggacugcgcccuggacccccugagcgagaccaaguguacccuaaagagcuucaccguggagaagggcaucuaccagaccagcaacuuccgggugcagcccacugagagcauugugcgguuccccaacaucaccaaccugugccccuucggcgagguguucaacgccacccgguucgccagcguguacgccuggaaccggaagcggaucagcaacugcguggccgacuacagcgugcuguacaacagcgccagcuucagcaccuucaagugcuacggcgugagcccuaccaagcugaacgaccugugcuucaccaacguguacgcugacagcuucgugauccggggcgacgaggugcggcagaucgcccccggccagaccggcaagaucgccgacuacaacuacaagcugcccgacgacuucaccggcugcgugaucgccuggaacagcaacaaccuggacagcaaggugggcggcaacuacaacuaccgguaccggcuguuccguaagagcaaccugaagccauucgagcgggacaucagcaccgagaucuaccaggccggcagcacccccugcaacgguguggagggcuuuaacugcuacuucccccugcagagcuacggcuuccagcccaccaacggcgugggcuaccagcccuaccgggugguggugcugagcuucgagcugcugcacgcccccgccaccgugugcggcccuaaaaagagcaccaaccuggugaagaacaagugcgugaacuucaauuucaacggccugaccggcaccggcgugcugaccgagagcaacaagaaguuccugcccuuccagcaguucggccgggauaucgccgacaccaccgacgcagugcgggacccccagacccuggagauccuggacaucaccccaugcagcuucggcggcgugagcgucaucacccccggcacaaacaccagcaaccagguggccgugcuguaccagggagugaacugcaccgaggugcccguggccauccacgccgaccagcugacccccaccuggcggguguacagcaccggcagcaacguguuccagacccgggccggcugccugaucggcgccgagcacgugaacaacagcuacgagugcgacauccccaucggcgcuggcaucugugccuccuaccagacccagaccaacagcccccggcgggcccggagcguggccagccagagcaucaucgccuacaccaugagccugggcgccgagaacagcguggccuacagcaacaacagcaucgcgaucccuaccaacuucaccauaagcgugaccaccgagaucuuacccgugagcaugaccaagaccagcguggacugcaccauguacaucugcggcgacagcaccgagugcagcaaccugcugcugcaguacggcagcuucugcacccagcugaaccgggcccugaccggcaucgccguggagcaggacaagaacacccaagagguguucgcccaggugaagcagaucuacaagacucccccaaucaaggacuucggcggcuucaacuucagccagauccugcccgaccccagcaagcccagcaagcggagcuucaucgaggaccugcuguucaacaaggugacccuggccgacgccggcuucaucaagcaguacggcgacugccugggggauaucgccgcucgggaccugaucugcgcccagaaguucaacggccugaccgugcugcccccucugcugaccgacgagaugaucgcccaguacaccagcgcccugcuggccggcaccaucaccagcggcuggaccuucggcgccggcgcagcccuucagauccccuucgccaugcagauggccuacagguucaacggcaucggcgugacccagaacgugcuguacgagaaccagaagcugaucgccaaccaguucaacagcgccaucggcaagauccaggacagccugagcagcaccgccagcgcccugggcaagcugcaggacguggugaaccagaacgcucaggcccugaacacccuggugaagcagcugagcagcaacuucggcgccaucagcagcgugcugaaugacauccugucacggcuggaucccccagaggccgaggugcagaucgaccggcugaucaccggccggcugcagagccugcagaccuacgugacccagcagcugauccgggccgccgagauucgggccagcgccaaccuggcagccaccaagaugagcgagugcgugcugggccagagcaagcggguggacuuuugcggcaagggcuaccaccugaugagcuucccccagagcgcuccccacggcgugguguuccugcacgugacauacguccccgcccaggagaagaacuucaccaccgcccccgccaucugccacgacggcaaggcccacuucccccgggagggaguguucgugagcaacggcacccacugguucgugacccagcggaacuucuacgagccucagaucaucaccaccgacaacaccuucgugagcggcaacugcgacguggugaucggcaucgugaacaacaccguguacgacccccuccagcccgagcuggacagcuucaaggaggagcuggacaaguacuucaagaaccacaccagcccagacguggaccugggcgacaucagcggcaucaacgccagcguggugaacauccagaaggagaucgaccggcugaacgagguggccaagaaccugaacgagagccugaucgaccugcaggagcugggcaaguacgagcaguacaucaaguggcccugguacaucuggcugggcuucaucgccggccugaucgccaucgugauggugaccaucaugcugugcugcaugaccagcuguugcagcugccugaagggcugcugcagcugcggcagcugcugcaaguucgacgaggacgacagcgagcccgugcugaagggcgugaagcugcacuacaccugaggacuaguguccaccugucccuccugggcugcuggauugucucguuuuccugccaaauaaacaggaucagcgcuuuacagaucucaaaggcucuuuucagagccaccaaaaaaaaaaaaaaaaaaaaaaaaaaaaaaaaaaaaaaaaaaaaaaaaaaaaaaaaaaaaaaaaaaaaaaaaaaaaaaaaaaaaaaaaaaaaaaaaaaaaa

SEQ ID NO: 24029 - RNA, 4129 nt, Artificial Sequence
  SARS-CoV-2/Wuhan/WIV05/2019__EPI_ISL_402128 spike protein mRNA gc mod (1-1273)(K986P_V987P)
aggagacccgugacccggaaguuguacggcuacgcgacuuucccucccacaaacccucgcgcccuuccuuuccuacuugggcccggcagaaagcuuaccauguucguguuucuggugcugcugccccugguguccagccagugugugaaccugaccaccagaacacagcugccuccagccuacaccaacagcuucaccagaggcguguacuaccccgacaagguguucagauccagcgugcugcacucuacccaggaccuguuccugccuuucuucagcaacgugaccugguuccacgccauccacguguccggcaccaauggcaccaagagauucgacaaccccgugcugcccuucaacgacgggguguacuuugccagcaccgagaaguccaacaucaucagaggcuggaucuucggcaccacacuggacagcaagacccagagccugcugaucgugaacaacgccaccaacguggucaucaaagugugcgaguuccaguucugcaacgaccccuuccugggcgucuacuaccacaagaacaacaagagcuggauggaaagcgaguuccggguguacagcagcgccaacaacugcaccuucgaguacgugucccagccuuuccugauggaccuggaaggcaagcagggcaacuucaagaaccugcgcgaguucguguucaagaacaucgacggcuacuucaaaaucuacagcaagcacaccccuaucaaccucgugcgggaucugccucagggcuucucugcucuggaaccccugguggaucugcccaucggcaucaacaucacccgguuucagacacugcuggcccugcacagaagcuaccugacaccuggcgauagcagcagcggauggacagcuggugccgccgcuuacuaugugggcuaccugcagccuagaaccuuccugcugaaguacaacgagaacggcaccaucaccgacgccguggauugugcucuggauccucugagcgagacaaagugcacccugaaguccuucaccguggaaaagggcaucuaccagaccagcaacuuccgggugcagcccaccgaauccaucgugcgguuccccaauaucaccaaucugugccccuucggcgagguguucaaugccaccagauucgccucuguguacgccuggaaccggaagcggaucagcaauugcguggccgacuacuccgugcuguacaacuccgccagcuucagcaccuucaagugcuacggcguguccccuaccaagcugaacgaccugugcuucacaaacguguacgccgacagcuucgugauccggggagaugaagugcggcagauugccccuggacagacaggcaagaucgccgacuacaacuacaagcugcccgacgacuucaccggcugugugauugccuggaacagcaacaaccuggacuccaaagucggcggcaacuacaauuaccuguaccggcuguuccggaaguccaaucugaagcccuucgagcgggacaucagcaccgaaaucuaucaggccggcagcaccccuugcaacggcguggaaggcuucaacugcuacuucccacugcaguccuacggcuuucagcccacaaauggcgugggcuaucagcccuacagagugguggugcugagcuucgaacugcugcaugcuccugccacagugugcggcccuaagaaaagcaccaaucucgugaagaacaaaugcgugaacuucaacuucaacggccugaccggcaccggcgugcugacagagagcaacaagaaguuccugccauuccagcaguuuggccgggauaucgccgauaccacagacgccguuagagauccccagacacuggaaauccuggacaucaccccaugcagcuucggcggagugucugugaucaccccuggcaccaacaccagcaaucagguggcagugcuguaccaggacgugaacuguaccgaagugcccguggccauucacgccgaucagcugacaccuacauggcggguguacuccaccggcagcaauguguuucagaccagagccggcugucugaucggagccgagcacgugaacaauagcuacgagugcgacauccccaucggcgcuggcaucugugccagcuaccagacacagacaaacagccccagacgggcuagaagcguggccagccagagcaucauugccuacacaaugucucugggcgccgagaacagcguggccuacuccaacaacucuaucgcuauccccaccaacuucaccaucagcgugaccaccgagauccugccuguguccaugaccaagaccagcguggacugcaccauguacaucugcggcgauuccaccgagugcuccaaccugcugcugcaguacggcagcuucugcacccagcugaauagagcccugacagggaucgccguggaacaggacaagaacacccaagagguguucgcccaagugaagcaaaucuacaagaccccuccuaucaaggacuucggcggcuucaauuucagccagauucugcccgauccuagcaagcccagcaagcggagcuucaucgaggaccugcuguucaacaaagugacacuggccgacgccggcuucaucaagcaguauggcgauugucugggcgacauugccgccagggaucugauuugcgcccagaaguuuaacggacugacagugcugccuccucugcugaccgaugagaugaucgcccaguacacaucugcccugcuggccggcacaaucacaagcggcuggacauuuggagcuggcgccgcucugcagauccccuuugcuaugcagauggccuaccgguucaacggcaucggagugacccagaaugugcuguacgagaaccagaagcugaucgccaaccaguucaacagcgccaucggcaagauccaggacagccugagcagcacagcaagcgcccugggaaagcugcaggacguggucaaccagaaugcccaggcacugaacacccuggucaagcagcuguccuccaacuucggcgccaucagcucugugcugaacgauauccugagcagacuggacccuccugaggccgaggugcagaucgacagacugaucacaggcagacugcagagccuccagacauacgugacccagcagcugaucagagccgccgagauuagagccucugccaaucuggccgccaccaagaugucugagugugugcugggccagagcaagagaguggacuuuugcggcaagggcuaccaccugaugagcuucccucagucugccccucacggcgugguguuucugcacgugacauaugugcccgcucaagagaagaauuucaccaccgcuccagccaucugccacgacggcaaagcccacuuuccuagagaaggcguguucguguccaacggcacccauugguucgugacacagcggaacuucuacgagccccagaucaucaccaccgacaacaccuucgugucuggcaacugcgacguugugaucggcauugugaacaauaccguguacgacccucugcagcccgagcuggacagcuucaaagaggaacuggacaaguacuuuaagaaccacacaagccccgacguggaccugggcgauaucagcggaaucaaugccagcgucgugaacauccagaaagagaucgaccggcugaacgagguggccaagaaucugaacgagagccugaucgaccugcaagaacuggggaaguacgagcaguacaucaaguggcccugguacaucuggcugggcuuuaucgccggacugauugccaucgugauggucacaaucaugcuguguugcaugaccagcugcuguagcugccugaagggcuguuguagcuguggcagcugcugcaaguucgacgaggacgauucugagcccgugcugaagggcgugaaacugcacuacaccugaggacuaguguccaccugucccuccugggcugcuggauugucucguuuuccugccaaauaaacaggaucagcgcuuuacagaucucaaaggcucuuuucagagccaccaaaaaaaaaaaaaaaaaaaaaaaaaaaaaaaaaaaaaaaaaaaaaaaaaaaaaaaaaaaaaaaaaaaaaaaaaaaaaaaaaaaaaaaaaaaaaaaaaaaaa

SEQ ID NO: 24030 - RNA, 4129 nt, Artificial Sequence
  SARS-CoV-2/Wuhan/WIV05/2019__EPI_ISL_402128 spike protein mRNA gc mod (1-1273)(K986P_V987P_ D614G)
aggagacccgugacccggaaguuguacggcuacgcgacuuucccucccacaaacccucgcgcccuuccuuuccuacuugggcccggcagaaagcuuaccauguucguguuucuggugcugcugccccugguguccagccagugugugaaccugaccaccagaacacagcugccuccagccuacaccaacagcuucaccagaggcguguacuaccccgacaagguguucagauccagcgugcugcacucuacccaggaccuguuccugccuuucuucagcaacgugaccugguuccacgccauccacguguccggcaccaauggcaccaagagauucgacaaccccgugcugcccuucaacgacgggguguacuuugccagcaccgagaaguccaacaucaucagaggcuggaucuucggcaccacacuggacagcaagacccagagccugcugaucgugaacaacgccaccaacguggucaucaaagugugcgaguuccaguucugcaacgaccccuuccugggcgucuacuaccacaagaacaacaagagcuggauggaaagcgaguuccggguguacagcagcgccaacaacugcaccuucgaguacgugucccagccuuuccugauggaccuggaaggcaagcagggcaacuucaagaaccugcgcgaguucguguucaagaacaucgacggcuacuucaaaaucuacagcaagcacaccccuaucaaccucgugcgggaucugccucagggcuucucugcucuggaaccccugguggaucugcccaucggcaucaacaucacccgguuucagacacugcuggcccugcacagaagcuaccugacaccuggcgauagcagcagcggauggacagcuggugccgccgcuuacuaugugggcuaccugcagccuagaaccuuccugcugaaguacaacgagaacggcaccaucaccgacgccguggauugugcucuggauccucugagcgagacaaagugcacccugaaguccuucaccguggaaaagggcaucuaccagaccagcaacuuccgggugcagcccaccgaauccaucgugcgguuccccaauaucaccaaucugugccccuucggcgagguguucaaugccaccagauucgccucuguguacgccuggaaccggaagcggaucagcaauugcguggccgacuacuccgugcuguacaacuccgccagcuucagcaccuucaagugcuacggcguguccccuaccaagcugaacgaccugugcuucacaaacguguacgccgacagcuucgugauccggggagaugaagugcggcagauugccccuggacagacaggcaagaucgccgacuacaacuacaagcugcccgacgacuucaccggcugugugauugccuggaacagcaacaaccuggacuccaaagucggcggcaacuacaauuaccuguaccggcuguuccggaaguccaaucugaagcccuucgagcgggacaucagcaccgaaaucuaucaggccggcagcaccccuugcaacggcguggaaggcuucaacugcuacuucccacugcaguccuacggcuuucagcccacaaauggcgugggcuaucagcccuacagagugguggugcugagcuucgaacugcugcaugcuccugccacagugugcggcccuaagaaaagcaccaaucucgugaagaacaaaugcgugaacuucaacuucaacggccugaccggcaccggcgugcugacagagagcaacaagaaguuccugccauuccagcaguuuggccgggauaucgccgauaccacagacgccguuagagauccccagacacuggaaauccuggacaucaccccaugcagcuucggcggagugucugugaucaccccuggcaccaacaccagcaaucagguggcagugcuguaccagggcgugaacuguaccgaagugcccguggccauucacgccgaucagcugacaccuacauggcggguguacuccaccggcagcaauguguuucagaccagagccggcugucugaucggagccgagcacgugaacaauagcuacgagugcgacauccccaucggcgcuggcaucugugccagcuaccagacacagacaaacagccccagacgggcuagaagcguggccagccagagcaucauugccuacacaaugucucugggcgccgagaacagcguggccuacuccaacaacucuaucgcuauccccaccaacuucaccaucagcgugaccaccgagauccugccuguguccaugaccaagaccagcguggacugcaccauguacaucugcggcgauuccaccgagugcuccaaccugcugcugcaguacggcagcuucugcacccagcugaauagagcccugacagggaucgccguggaacaggacaagaacacccaagagguguucgcccaagugaagcaaaucuacaagaccccuccuaucaaggacuucggcggcuucaauuucagccagauucugcccgauccuagcaagcccagcaagcggagcuucaucgaggaccugcuguucaacaaagugacacuggccgacgccggcuucaucaagcaguauggcgauugucugggcgacauugccgccagggaucugauuugcgcccagaaguuuaacggacugacagugcugccuccucugcugaccgaugagaugaucgcccaguacacaucugcccugcuggccggcacaaucacaagcggcuggacauuuggagcuggcgccgcucugcagauccccuuugcuaugcagauggccuaccgguucaacggcaucggagugacccagaaugugcuguacgagaaccagaagcugaucgccaaccaguucaacagcgccaucggcaagauccaggacagccugagcagcacagcaagcgcccugggaaagcugcaggacguggucaaccagaaugcccaggcacugaacacccuggucaagcagcuguccuccaacuucggcgccaucagcucugugcugaacgauauccugagcagacuggacccuccugaggccgaggugcagaucgacagacugaucacaggcagacugcagagccuccagacauacgugacccagcagcugaucagagccgccgagauuagagccucugccaaucuggccgccaccaagaugucugagugugugcugggccagagcaagagaguggacuuuugcggcaagggcuaccaccugaugagcuucccucagucugccccucacggcgugguguuucugcacgugacauaugugcccgcucaagagaagaauuucaccaccgcuccagccaucugccacgacggcaaagcccacuuuccuagagaaggcguguucguguccaacggcacccauugguucgugacacagcggaacuucuacgagccccagaucaucaccaccgacaacaccuucgugucuggcaacugcgacguugugaucggcauugugaacaauaccguguacgacccucugcagcccgagcuggacagcuucaaagaggaacuggacaaguacuuuaagaaccacacaagccccgacguggaccugggcgauaucagcggaaucaaugccagcgucgugaacauccagaaagagaucgaccggcugaacgagguggccaagaaucugaacgagagccugaucgaccugcaagaacuggggaaguacgagcaguacaucaaguggcccugguacaucuggcugggcuuuaucgccggacugauugccaucgugauggucacaaucaugcuguguugcaugaccagcugcuguagcugccugaagggcuguuguagcuguggcagcugcugcaaguucgacgaggacgauucugagcccgugcugaagggcgugaaacugcacuacaccugaggacuaguguccaccugucccuccugggcugcuggauugucucguuuuccugccaaauaaacaggaucagcgcuuuacagaucucaaaggcucuuuucagagccaccaaaaaaaaaaaaaaaaaaaaaaaaaaaaaaaaaaaaaaaaaaaaaaaaaaaaaaaaaaaaaaaaaaaaaaaaaaaaaaaaaaaaaaaaaaaaaaaaaaaaa

SEQ ID NO: 24031 - RNA, 4129 nt, Artificial Sequence
  SARS-CoV-2/Wuhan/WIV05/2019__EPI_ISL_402128 spike protein mRNA gc mod (1-1273)(K986P_V987P_A222V_D614G)
aggagacccgugacccggaaguuguacggcuacgcgacuuucccucccacaaacccucgcgcccuuccuuuccuacuugggcccggcagaaagcuuaccauguucguguuucuggugcugcugccccugguguccagccagugugugaaccugaccaccagaacacagcugccuccagccuacaccaacagcuucaccagaggcguguacuaccccgacaagguguucagauccagcgugcugcacucuacccaggaccuguuccugccuuucuucagcaacgugaccugguuccacgccauccacguguccggcaccaauggcaccaagagauucgacaaccccgugcugcccuucaacgacgggguguacuuugccagcaccgagaaguccaacaucaucagaggcuggaucuucggcaccacacuggacagcaagacccagagccugcugaucgugaacaacgccaccaacguggucaucaaagugugcgaguuccaguucugcaacgaccccuuccugggcgucuacuaccacaagaacaacaagagcuggauggaaagcgaguuccggguguacagcagcgccaacaacugcaccuucgaguacgugucccagccuuuccugauggaccuggaaggcaagcagggcaacuucaagaaccugcgcgaguucguguucaagaacaucgacggcuacuucaaaaucuacagcaagcacaccccuaucaaccucgugcgggaucugccucagggcuucucugugcuggaaccccugguggaucugcccaucggcaucaacaucacccgguuucagacacugcuggcccugcacagaagcuaccugacaccuggcgauagcagcagcggauggacagcuggugccgccgcuuacuaugugggcuaccugcagccuagaaccuuccugcugaaguacaacgagaacggcaccaucaccgacgccguggauugugcucuggauccucugagcgagacaaagugcacccugaaguccuucaccguggaaaagggcaucuaccagaccagcaacuuccgggugcagcccaccgaauccaucgugcgguuccccaauaucaccaaucugugccccuucggcgagguguucaaugccaccagauucgccucuguguacgccuggaaccggaagcggaucagcaauugcguggccgacuacuccgugcuguacaacuccgccagcuucagcaccuucaagugcuacggcguguccccuaccaagcugaacgaccugugcuucacaaacguguacgccgacagcuucgugauccggggagaugaagugcggcagauugccccuggacagacaggcaagaucgccgacuacaacuacaagcugcccgacgacuucaccggcugugugauugccuggaacagcaacaaccuggacuccaaagucggcggcaacuacaauuaccuguaccggcuguuccggaaguccaaucugaagcccuucgagcgggacaucagcaccgaaaucuaucaggccggcagcaccccuugcaacggcguggaaggcuucaacugcuacuucccacugcaguccuacggcuuucagcccacaaauggcgugggcuaucagcccuacagagugguggugcugagcuucgaacugcugcaugcuccugccacagugugcggcccuaagaaaagcaccaaucucgugaagaacaaaugcgugaacuucaacuucaacggccugaccggcaccggcgugcugacagagagcaacaagaaguuccugccauuccagcaguuuggccgggauaucgccgauaccacagacgccguuagagauccccagacacuggaaauccuggacaucaccccaugcagcuucggcggagugucugugaucaccccuggcaccaacaccagcaaucagguggcagugcuguaccagggcgugaacuguaccgaagugcccguggccauucacgccgaucagcugacaccuacauggcggguguacuccaccggcagcaauguguuucagaccagagccggcugucugaucggagccgagcacgugaacaauagcuacgagugcgacauccccaucggcgcuggcaucugugccagcuaccagacacagacaaacagccccagacgggcuagaagcguggccagccagagcaucauugccuacacaaugucucugggcgccgagaacagcguggccuacuccaacaacucuaucgcuauccccaccaacuucaccaucagcgugaccaccgagauccugccuguguccaugaccaagaccagcguggacugcaccauguacaucugcggcgauuccaccgagugcuccaaccugcugcugcaguacggcagcuucugcacccagcugaauagagcccugacagggaucgccguggaacaggacaagaacacccaagagguguucgcccaagugaagcaaaucuacaagaccccuccuaucaaggacuucggcggcuucaauuucagccagauucugcccgauccuagcaagcccagcaagcggagcuucaucgaggaccugcuguucaacaaagugacacuggccgacgccggcuucaucaagcaguauggcgauugucugggcgacauugccgccagggaucugauuugcgcccagaaguuuaacggacugacagugcugccuccucugcugaccgaugagaugaucgcccaguacacaucugcccugcuggccggcacaaucacaagcggcuggacauuuggagcuggcgccgcucugcagauccccuuugcuaugcagauggccuaccgguucaacggcaucggagugacccagaaugugcuguacgagaaccagaagcugaucgccaaccaguucaacagcgccaucggcaagauccaggacagccugagcagcacagcaagcgcccugggaaagcugcaggacguggucaaccagaaugcccaggcacugaacacccuggucaagcagcuguccuccaacuucggcgccaucagcucugugcugaacgauauccugagcagacuggacccuccugaggccgaggugcagaucgacagacugaucacaggcagacugcagagccuccagacauacgugacccagcagcugaucagagccgccgagauuagagccucugccaaucuggccgccaccaagaugucugagugugugcugggccagagcaagagaguggacuuuugcggcaagggcuaccaccugaugagcuucccucagucugccccucacggcgugguguuucugcacgugacauaugugcccgcucaagagaagaauuucaccaccgcuccagccaucugccacgacggcaaagcccacuuuccuagagaaggcguguucguguccaacggcacccauugguucgugacacagcggaacuucuacgagccccagaucaucaccaccgacaacaccuucgugucuggcaacugcgacguugugaucggcauugugaacaauaccguguacgacccucugcagcccgagcuggacagcuucaaagaggaacuggacaaguacuuuaagaaccacacaagccccgacguggaccugggcgauaucagcggaaucaaugccagcgucgugaacauccagaaagagaucgaccggcugaacgagguggccaagaaucugaacgagagccugaucgaccugcaagaacuggggaaguacgagcaguacaucaaguggcccugguacaucuggcugggcuuuaucgccggacugauugccaucgugauggucacaaucaugcuguguugcaugaccagcugcuguagcugccugaagggcuguuguagcuguggcagcugcugcaaguucgacgaggacgauucugagcccgugcugaagggcgugaaacugcacuacaccugaggacuaguguccaccugucccuccugggcugcuggauugucucguuuuccugccaaauaaacaggaucagcgcuuuacagaucucaaaggcucuuuucagagccaccaaaaaaaaaaaaaaaaaaaaaaaaaaaaaaaaaaaaaaaaaaaaaaaaaaaaaaaaaaaaaaaaaaaaaaaaaaaaaaaaaaaaaaaaaaaaaaaaaaaaa

SEQ ID NO: 24032 - RNA, 4129 nt, Artificial Sequence
  SARS-CoV-2/Wuhan/WIV05/2019__EPI_ISL_402128 spike protein mRNA gc mod (1-1273)(K986P_V987P_N439K_D614G)
aggagacccgugacccggaaguuguacggcuacgcgacuuucccucccacaaacccucgcgcccuuccuuuccuacuugggcccggcagaaagcuuaccauguucguguuucuggugcugcugccccugguguccagccagugugugaaccugaccaccagaacacagcugccuccagccuacaccaacagcuucaccagaggcguguacuaccccgacaagguguucagauccagcgugcugcacucuacccaggaccuguuccugccuuucuucagcaacgugaccugguuccacgccauccacguguccggcaccaauggcaccaagagauucgacaaccccgugcugcccuucaacgacgggguguacuuugccagcaccgagaaguccaacaucaucagaggcuggaucuucggcaccacacuggacagcaagacccagagccugcugaucgugaacaacgccaccaacguggucaucaaagugugcgaguuccaguucugcaacgaccccuuccugggcgucuacuaccacaagaacaacaagagcuggauggaaagcgaguuccggguguacagcagcgccaacaacugcaccuucgaguacgugucccagccuuuccugauggaccuggaaggcaagcagggcaacuucaagaaccugcgcgaguucguguucaagaacaucgacggcuacuucaaaaucuacagcaagcacaccccuaucaaccucgugcgggaucugccucagggcuucucugcucuggaaccccugguggaucugcccaucggcaucaacaucacccgguuucagacacugcuggcccugcacagaagcuaccugacaccuggcgauagcagcagcggauggacagcuggugccgccgcuuacuaugugggcuaccugcagccuagaaccuuccugcugaaguacaacgagaacggcaccaucaccgacgccguggauugugcucuggauccucugagcgagacaaagugcacccugaaguccuucaccguggaaaagggcaucuaccagaccagcaacuuccgggugcagcccaccgaauccaucgugcgguuccccaauaucaccaaucugugccccuucggcgagguguucaaugccaccagauucgccucuguguacgccuggaaccggaagcggaucagcaauugcguggccgacuacuccgugcuguacaacuccgccagcuucagcaccuucaagugcuacggcguguccccuaccaagcugaacgaccugugcuucacaaacguguacgccgacagcuucgugauccggggagaugaagugcggcagauugccccuggacagacaggcaagaucgccgacuacaacuacaagcugcccgacgacuucaccggcugugugauugccuggaacagcaagaaccuggacuccaaagucggcggcaacuacaauuaccuguaccggcuguuccggaaguccaaucugaagcccuucgagcgggacaucagcaccgaaaucuaucaggccggcagcaccccuugcaacggcguggaaggcuucaacugcuacuucccacugcaguccuacggcuuucagcccacaaauggcgugggcuaucagcccuacagagugguggugcugagcuucgaacugcugcaugcuccugccacagugugcggcccuaagaaaagcaccaaucucgugaagaacaaaugcgugaacuucaacuucaacggccugaccggcaccggcgugcugacagagagcaacaagaaguuccugccauuccagcaguuuggccgggauaucgccgauaccacagacgccguuagagauccccagacacuggaaauccuggacaucaccccaugcagcuucggcggagugucugugaucaccccuggcaccaacaccagcaaucagguggcagugcuguaccagggcgugaacuguaccgaagugcccguggccauucacgccgaucagcugacaccuacauggcggguguacuccaccggcagcaauguguuucagaccagagccggcugucugaucggagccgagcacgugaacaauagcuacgagugcgacauccccaucggcgcuggcaucugugccagcuaccagacacagacaaacagccccagacgggcuagaagcguggccagccagagcaucauugccuacacaaugucucugggcgccgagaacagcguggccuacuccaacaacucuaucgcuauccccaccaacuucaccaucagcgugaccaccgagauccugccuguguccaugaccaagaccagcguggacugcaccauguacaucugcggcgauuccaccgagugcuccaaccugcugcugcaguacggcagcuucugcacccagcugaauagagcccugacagggaucgccguggaacaggacaagaacacccaagagguguucgcccaagugaagcaaaucuacaagaccccuccuaucaaggacuucggcggcuucaauuucagccagauucugcccgauccuagcaagcccagcaagcggagcuucaucgaggaccugcuguucaacaaagugacacuggccgacgccggcuucaucaagcaguauggcgauugucugggcgacauugccgccagggaucugauuugcgcccagaaguuuaacggacugacagugcugccuccucugcugaccgaugagaugaucgcccaguacacaucugcccugcuggccggcacaaucacaagcggcuggacauuuggagcuggcgccgcucugcagauccccuuugcuaugcagauggccuaccgguucaacggcaucggagugacccagaaugugcuguacgagaaccagaagcugaucgccaaccaguucaacagcgccaucggcaagauccaggacagccugagcagcacagcaagcgcccugggaaagcugcaggacguggucaaccagaaugcccaggcacugaacacccuggucaagcagcuguccuccaacuucggcgccaucagcucugugcugaacgauauccugagcagacuggacccuccugaggccgaggugcagaucgacagacugaucacaggcagacugcagagccuccagacauacgugacccagcagcugaucagagccgccgagauuagagccucugccaaucuggccgccaccaagaugucugagugugugcugggccagagcaagagaguggacuuuugcggcaagggcuaccaccugaugagcuucccucagucugccccucacggcgugguguuucugcacgugacauaugugcccgcucaagagaagaauuucaccaccgcuccagccaucugccacgacggcaaagcccacuuuccuagagaaggcguguucguguccaacggcacccauugguucgugacacagcggaacuucuacgagccccagaucaucaccaccgacaacaccuucgugucuggcaacugcgacguugugaucggcauugugaacaauaccguguacgacccucugcagcccgagcuggacagcuucaaagaggaacuggacaaguacuuuaagaaccacacaagccccgacguggaccugggcgauaucagcggaaucaaugccagcgucgugaacauccagaaagagaucgaccggcugaacgagguggccaagaaucugaacgagagccugaucgaccugcaagaacuggggaaguacgagcaguacaucaaguggcccugguacaucuggcugggcuuuaucgccggacugauugccaucgugauggucacaaucaugcuguguugcaugaccagcugcuguagcugccugaagggcuguuguagcuguggcagcugcugcaaguucgacgaggacgauucugagcccgugcugaagggcgugaaacugcacuacaccugaggacuaguguccaccugucccuccugggcugcuggauugucucguuuuccugccaaauaaacaggaucagcgcuuuacagaucucaaaggcucuuuucagagccaccaaaaaaaaaaaaaaaaaaaaaaaaaaaaaaaaaaaaaaaaaaaaaaaaaaaaaaaaaaaaaaaaaaaaaaaaaaaaaaaaaaaaaaaaaaaaaaaaaaaaa

SEQ ID NO: 24033 - RNA, 4129 nt, Artificial Sequence
  SARS-CoV-2/Wuhan/WIV05/2019__EPI_ISL_402128 spike protein mRNA gc mod (1-1273)(K986P_V987P_S477N_D614G)
aggagacccgugacccggaaguuguacggcuacgcgacuuucccucccacaaacccucgcgcccuuccuuuccuacuugggcccggcagaaagcuuaccauguucguguuucuggugcugcugccccugguguccagccagugugugaaccugaccaccagaacacagcugccuccagccuacaccaacagcuucaccagaggcguguacuaccccgacaagguguucagauccagcgugcugcacucuacccaggaccuguuccugccuuucuucagcaacgugaccugguuccacgccauccacguguccggcaccaauggcaccaagagauucgacaaccccgugcugcccuucaacgacgggguguacuuugccagcaccgagaaguccaacaucaucagaggcuggaucuucggcaccacacuggacagcaagacccagagccugcugaucgugaacaacgccaccaacguggucaucaaagugugcgaguuccaguucugcaacgaccccuuccugggcgucuacuaccacaagaacaacaagagcuggauggaaagcgaguuccggguguacagcagcgccaacaacugcaccuucgaguacgugucccagccuuuccugauggaccuggaaggcaagcagggcaacuucaagaaccugcgcgaguucguguucaagaacaucgacggcuacuucaaaaucuacagcaagcacaccccuaucaaccucgugcgggaucugccucagggcuucucugcucuggaaccccugguggaucugcccaucggcaucaacaucacccgguuucagacacugcuggcccugcacagaagcuaccugacaccuggcgauagcagcagcggauggacagcuggugccgccgcuuacuaugugggcuaccugcagccuagaaccuuccugcugaaguacaacgagaacggcaccaucaccgacgccguggauugugcucuggauccucugagcgagacaaagugcacccugaaguccuucaccguggaaaagggcaucuaccagaccagcaacuuccgggugcagcccaccgaauccaucgugcgguuccccaauaucaccaaucugugccccuucggcgagguguucaaugccaccagauucgccucuguguacgccuggaaccggaagcggaucagcaauugcguggccgacuacuccgugcuguacaacuccgccagcuucagcaccuucaagugcuacggcguguccccuaccaagcugaacgaccugugcuucacaaacguguacgccgacagcuucgugauccggggagaugaagugcggcagauugccccuggacagacaggcaagaucgccgacuacaacuacaagcugcccgacgacuucaccggcugugugauugccuggaacagcaacaaccuggacuccaaagucggcggcaacuacaauuaccuguaccggcuguuccggaaguccaaucugaagcccuucgagcgggacaucagcaccgaaaucuaucaggccggcaacaccccuugcaacggcguggaaggcuucaacugcuacuucccacugcaguccuacggcuuucagcccacaaauggcgugggcuaucagcccuacagagugguggugcugagcuucgaacugcugcaugcuccugccacagugugcggcccuaagaaaagcaccaaucucgugaagaacaaaugcgugaacuucaacuucaacggccugaccggcaccggcgugcugacagagagcaacaagaaguuccugccauuccagcaguuuggccgggauaucgccgauaccacagacgccguuagagauccccagacacuggaaauccuggacaucaccccaugcagcuucggcggagugucugugaucaccccuggcaccaacaccagcaaucagguggcagugcuguaccagggcgugaacuguaccgaagugcccguggccauucacgccgaucagcugacaccuacauggcggguguacuccaccggcagcaauguguuucagaccagagccggcugucugaucggagccgagcacgugaacaauagcuacgagugcgacauccccaucggcgcuggcaucugugccagcuaccagacacagacaaacagccccagacgggcuagaagcguggccagccagagcaucauugccuacacaaugucucugggcgccgagaacagcguggccuacuccaacaacucuaucgcuauccccaccaacuucaccaucagcgugaccaccgagauccugccuguguccaugaccaagaccagcguggacugcaccauguacaucugcggcgauuccaccgagugcuccaaccugcugcugcaguacggcagcuucugcacccagcugaauagagcccugacagggaucgccguggaacaggacaagaacacccaagagguguucgcccaagugaagcaaaucuacaagaccccuccuaucaaggacuucggcggcuucaauuucagccagauucugcccgauccuagcaagcccagcaagcggagcuucaucgaggaccugcuguucaacaaagugacacuggccgacgccggcuucaucaagcaguauggcgauugucugggcgacauugccgccagggaucugauuugcgcccagaaguuuaacggacugacagugcugccuccucugcugaccgaugagaugaucgcccaguacacaucugcccugcuggccggcacaaucacaagcggcuggacauuuggagcuggcgccgcucugcagauccccuuugcuaugcagauggccuaccgguucaacggcaucggagugacccagaaugugcuguacgagaaccagaagcugaucgccaaccaguucaacagcgccaucggcaagauccaggacagccugagcagcacagcaagcgcccugggaaagcugcaggacguggucaaccagaaugcccaggcacugaacacccuggucaagcagcuguccuccaacuucggcgccaucagcucugugcugaacgauauccugagcagacuggacccuccugaggccgaggugcagaucgacagacugaucacaggcagacugcagagccuccagacauacgugacccagcagcugaucagagccgccgagauuagagccucugccaaucuggccgccaccaagaugucugagugugugcugggccagagcaagagaguggacuuuugcggcaagggcuaccaccugaugagcuucccucagucugccccucacggcgugguguuucugcacgugacauaugugcccgcucaagagaagaauuucaccaccgcuccagccaucugccacgacggcaaagcccacuuuccuagagaaggcguguucguguccaacggcacccauugguucgugacacagcggaacuucuacgagccccagaucaucaccaccgacaacaccuucgugucuggcaacugcgacguugugaucggcauugugaacaauaccguguacgacccucugcagcccgagcuggacagcuucaaagaggaacuggacaaguacuuuaagaaccacacaagccccgacguggaccugggcgauaucagcggaaucaaugccagcgucgugaacauccagaaagagaucgaccggcugaacgagguggccaagaaucugaacgagagccugaucgaccugcaagaacuggggaaguacgagcaguacaucaaguggcccugguacaucuggcugggcuuuaucgccggacugauugccaucgugauggucacaaucaugcuguguugcaugaccagcugcuguagcugccugaagggcuguuguagcuguggcagcugcugcaaguucgacgaggacgauucugagcccgugcugaagggcgugaaacugcacuacaccugaggacuaguguccaccugucccuccugggcugcuggauugucucguuuuccugccaaauaaacaggaucagcgcuuuacagaucucaaaggcucuuuucagagccaccaaaaaaaaaaaaaaaaaaaaaaaaaaaaaaaaaaaaaaaaaaaaaaaaaaaaaaaaaaaaaaaaaaaaaaaaaaaaaaaaaaaaaaaaaaaaaaaaaaaaa

SEQ ID NO: 24034 - RNA, 4129 nt, Artificial Sequence
  SARS-CoV-2/Wuhan/WIV05/2019__EPI_ISL_402128 spike protein mRNA gc mod (1-1273)(K986P_V987P_N501Y_D614G)
aggagacccgugacccggaaguuguacggcuacgcgacuuucccucccacaaacccucgcgcccuuccuuuccuacuugggcccggcagaaagcuuaccauguucguguuucuggugcugcugccccugguguccagccagugugugaaccugaccaccagaacacagcugccuccagccuacaccaacagcuucaccagaggcguguacuaccccgacaagguguucagauccagcgugcugcacucuacccaggaccuguuccugccuuucuucagcaacgugaccugguuccacgccauccacguguccggcaccaauggcaccaagagauucgacaaccccgugcugcccuucaacgacgggguguacuuugccagcaccgagaaguccaacaucaucagaggcuggaucuucggcaccacacuggacagcaagacccagagccugcugaucgugaacaacgccaccaacguggucaucaaagugugcgaguuccaguucugcaacgaccccuuccugggcgucuacuaccacaagaacaacaagagcuggauggaaagcgaguuccggguguacagcagcgccaacaacugcaccuucgaguacgugucccagccuuuccugauggaccuggaaggcaagcagggcaacuucaagaaccugcgcgaguucguguucaagaacaucgacggcuacuucaaaaucuacagcaagcacaccccuaucaaccucgugcgggaucugccucagggcuucucugcucuggaaccccugguggaucugcccaucggcaucaacaucacccgguuucagacacugcuggcccugcacagaagcuaccugacaccuggcgauagcagcagcggauggacagcuggugccgccgcuuacuaugugggcuaccugcagccuagaaccuuccugcugaaguacaacgagaacggcaccaucaccgacgccguggauugugcucuggauccucugagcgagacaaagugcacccugaaguccuucaccguggaaaagggcaucuaccagaccagcaacuuccgggugcagcccaccgaauccaucgugcgguuccccaauaucaccaaucugugccccuucggcgagguguucaaugccaccagauucgccucuguguacgccuggaaccggaagcggaucagcaauugcguggccgacuacuccgugcuguacaacuccgccagcuucagcaccuucaagugcuacggcguguccccuaccaagcugaacgaccugugcuucacaaacguguacgccgacagcuucgugauccggggagaugaagugcggcagauugccccuggacagacaggcaagaucgccgacuacaacuacaagcugcccgacgacuucaccggcugugugauugccuggaacagcaacaaccuggacuccaaagucggcggcaacuacaauuaccuguaccggcuguuccggaaguccaaucugaagcccuucgagcgggacaucagcaccgaaaucuaucaggccggcagcaccccuugcaacggcguggaaggcuucaacugcuacuucccacugcaguccuacggcuuucagcccacauacggcgugggcuaucagcccuacagagugguggugcugagcuucgaacugcugcaugcuccugccacagugugcggcccuaagaaaagcaccaaucucgugaagaacaaaugcgugaacuucaacuucaacggccugaccggcaccggcgugcugacagagagcaacaagaaguuccugccauuccagcaguuuggccgggauaucgccgauaccacagacgccguuagagauccccagacacuggaaauccuggacaucaccccaugcagcuucggcggagugucugugaucaccccuggcaccaacaccagcaaucagguggcagugcuguaccagggcgugaacuguaccgaagugcccguggccauucacgccgaucagcugacaccuacauggcggguguacuccaccggcagcaauguguuucagaccagagccggcugucugaucggagccgagcacgugaacaauagcuacgagugcgacauccccaucggcgcuggcaucugugccagcuaccagacacagacaaacagccccagacgggcuagaagcguggccagccagagcaucauugccuacacaaugucucugggcgccgagaacagcguggccuacuccaacaacucuaucgcuauccccaccaacuucaccaucagcgugaccaccgagauccugccuguguccaugaccaagaccagcguggacugcaccauguacaucugcggcgauuccaccgagugcuccaaccugcugcugcaguacggcagcuucugcacccagcugaauagagcccugacagggaucgccguggaacaggacaagaacacccaagagguguucgcccaagugaagcaaaucuacaagaccccuccuaucaaggacuucggcggcuucaauuucagccagauucugcccgauccuagcaagcccagcaagcggagcuucaucgaggaccugcuguucaacaaagugacacuggccgacgccggcuucaucaagcaguauggcgauugucugggcgacauugccgccagggaucugauuugcgcccagaaguuuaacggacugacagugcugccuccucugcugaccgaugagaugaucgcccaguacacaucugcccugcuggccggcacaaucacaagcggcuggacauuuggagcuggcgccgcucugcagauccccuuugcuaugcagauggccuaccgguucaacggcaucggagugacccagaaugugcuguacgagaaccagaagcugaucgccaaccaguucaacagcgccaucggcaagauccaggacagccugagcagcacagcaagcgcccugggaaagcugcaggacguggucaaccagaaugcccaggcacugaacacccuggucaagcagcuguccuccaacuucggcgccaucagcucugugcugaacgauauccugagcagacuggacccuccugaggccgaggugcagaucgacagacugaucacaggcagacugcagagccuccagacauacgugacccagcagcugaucagagccgccgagauuagagccucugccaaucuggccgccaccaagaugucugagugugugcugggccagagcaagagaguggacuuuugcggcaagggcuaccaccugaugagcuucccucagucugccccucacggcgugguguuucugcacgugacauaugugcccgcucaagagaagaauuucaccaccgcuccagccaucugccacgacggcaaagcccacuuuccuagagaaggcguguucguguccaacggcacccauugguucgugacacagcggaacuucuacgagccccagaucaucaccaccgacaacaccuucgugucuggcaacugcgacguugugaucggcauugugaacaauaccguguacgacccucugcagcccgagcuggacagcuucaaagaggaacuggacaaguacuuuaagaaccacacaagccccgacguggaccugggcgauaucagcggaaucaaugccagcgucgugaacauccagaaagagaucgaccggcugaacgagguggccaagaaucugaacgagagccugaucgaccugcaagaacuggggaaguacgagcaguacaucaaguggcccugguacaucuggcugggcuuuaucgccggacugauugccaucgugauggucacaaucaugcuguguugcaugaccagcugcuguagcugccugaagggcuguuguagcuguggcagcugcugcaaguucgacgaggacgauucugagcccgugcugaagggcgugaaacugcacuacaccugaggacuaguguccaccugucccuccugggcugcuggauugucucguuuuccugccaaauaaacaggaucagcgcuuuacagaucucaaaggcucuuuucagagccaccaaaaaaaaaaaaaaaaaaaaaaaaaaaaaaaaaaaaaaaaaaaaaaaaaaaaaaaaaaaaaaaaaaaaaaaaaaaaaaaaaaaaaaaaaaaaaaaaaaaaa

SEQ ID NO: 24035 - RNA, 4123 nt, Artificial Sequence
  SARS-CoV-2/Wuhan/WIV05/2019__EPI_ISL_402128 spike protein mRNA gc mod (1-1273)(K986P_V987P_H69del_V70del_D614G)
aggagacccgugacccggaaguuguacggcuacgcgacuuucccucccacaaacccucgcgcccuuccuuuccuacuugggcccggcagaaagcuuaccauguucguguuucuggugcugcugccccugguguccagccagugugugaaccugaccaccagaacacagcugccuccagccuacaccaacagcuucaccagaggcguguacuaccccgacaagguguucagauccagcgugcugcacucuacccaggaccuguuccugccuuucuucagcaacgugaccugguuccacgccaucuccggcaccaauggcaccaagagauucgacaaccccgugcugcccuucaacgacgggguguacuuugccagcaccgagaaguccaacaucaucagaggcuggaucuucggcaccacacuggacagcaagacccagagccugcugaucgugaacaacgccaccaacguggucaucaaagugugcgaguuccaguucugcaacgaccccuuccugggcgucuacuaccacaagaacaacaagagcuggauggaaagcgaguuccggguguacagcagcgccaacaacugcaccuucgaguacgugucccagccuuuccugauggaccuggaaggcaagcagggcaacuucaagaaccugcgcgaguucguguucaagaacaucgacggcuacuucaaaaucuacagcaagcacaccccuaucaaccucgugcgggaucugccucagggcuucucugcucuggaaccccugguggaucugcccaucggcaucaacaucacccgguuucagacacugcuggcccugcacagaagcuaccugacaccuggcgauagcagcagcggauggacagcuggugccgccgcuuacuaugugggcuaccugcagccuagaaccuuccugcugaaguacaacgagaacggcaccaucaccgacgccguggauugugcucuggauccucugagcgagacaaagugcacccugaaguccuucaccguggaaaagggcaucuaccagaccagcaacuuccgggugcagcccaccgaauccaucgugcgguuccccaauaucaccaaucugugccccuucggcgagguguucaaugccaccagauucgccucuguguacgccuggaaccggaagcggaucagcaauugcguggccgacuacuccgugcuguacaacuccgccagcuucagcaccuucaagugcuacggcguguccccuaccaagcugaacgaccugugcuucacaaacguguacgccgacagcuucgugauccggggagaugaagugcggcagauugccccuggacagacaggcaagaucgccgacuacaacuacaagcugcccgacgacuucaccggcugugugauugccuggaacagcaacaaccuggacuccaaagucggcggcaacuacaauuaccuguaccggcuguuccggaaguccaaucugaagcccuucgagcgggacaucagcaccgaaaucuaucaggccggcagcaccccuugcaacggcguggaaggcuucaacugcuacuucccacugcaguccuacggcuuucagcccacaaauggcgugggcuaucagcccuacagagugguggugcugagcuucgaacugcugcaugcuccugccacagugugcggcccuaagaaaagcaccaaucucgugaagaacaaaugcgugaacuucaacuucaacggccugaccggcaccggcgugcugacagagagcaacaagaaguuccugccauuccagcaguuuggccgggauaucgccgauaccacagacgccguuagagauccccagacacuggaaauccuggacaucaccccaugcagcuucggcggagugucugugaucaccccuggcaccaacaccagcaaucagguggcagugcuguaccagggcgugaacuguaccgaagugcccguggccauucacgccgaucagcugacaccuacauggcggguguacuccaccggcagcaauguguuucagaccagagccggcugucugaucggagccgagcacgugaacaauagcuacgagugcgacauccccaucggcgcuggcaucugugccagcuaccagacacagacaaacagccccagacgggcuagaagcguggccagccagagcaucauugccuacacaaugucucugggcgccgagaacagcguggccuacuccaacaacucuaucgcuauccccaccaacuucaccaucagcgugaccaccgagauccugccuguguccaugaccaagaccagcguggacugcaccauguacaucugcggcgauuccaccgagugcuccaaccugcugcugcaguacggcagcuucugcacccagcugaauagagcccugacagggaucgccguggaacaggacaagaacacccaagagguguucgcccaagugaagcaaaucuacaagaccccuccuaucaaggacuucggcggcuucaauuucagccagauucugcccgauccuagcaagcccagcaagcggagcuucaucgaggaccugcuguucaacaaagugacacuggccgacgccggcuucaucaagcaguauggcgauugucugggcgacauugccgccagggaucugauuugcgcccagaaguuuaacggacugacagugcugccuccucugcugaccgaugagaugaucgcccaguacacaucugcccugcuggccggcacaaucacaagcggcuggacauuuggagcuggcgccgcucugcagauccccuuugcuaugcagauggccuaccgguucaacggcaucggagugacccagaaugugcuguacgagaaccagaagcugaucgccaaccaguucaacagcgccaucggcaagauccaggacagccugagcagcacagcaagcgcccugggaaagcugcaggacguggucaaccagaaugcccaggcacugaacacccuggucaagcagcuguccuccaacuucggcgccaucagcucugugcugaacgauauccugagcagacuggacccuccugaggccgaggugcagaucgacagacugaucacaggcagacugcagagccuccagacauacgugacccagcagcugaucagagccgccgagauuagagccucugccaaucuggccgccaccaagaugucugagugugugcugggccagagcaagagaguggacuuuugcggcaagggcuaccaccugaugagcuucccucagucugccccucacggcgugguguuucugcacgugacauaugugcccgcucaagagaagaauuucaccaccgcuccagccaucugccacgacggcaaagcccacuuuccuagagaaggcguguucguguccaacggcacccauugguucgugacacagcggaacuucuacgagccccagaucaucaccaccgacaacaccuucgugucuggcaacugcgacguugugaucggcauugugaacaauaccguguacgacccucugcagcccgagcuggacagcuucaaagaggaacuggacaaguacuuuaagaaccacacaagccccgacguggaccugggcgauaucagcggaaucaaugccagcgucgugaacauccagaaagagaucgaccggcugaacgagguggccaagaaucugaacgagagccugaucgaccugcaagaacuggggaaguacgagcaguacaucaaguggcccugguacaucuggcugggcuuuaucgccggacugauugccaucgugauggucacaaucaugcuguguugcaugaccagcugcuguagcugccugaagggcuguuguagcuguggcagcugcugcaaguucgacgaggacgauucugagcccgugcugaagggcgugaaacugcacuacaccugaggacuaguguccaccugucccuccugggcugcuggauugucucguuuuccugccaaauaaacaggaucagcgcuuuacagaucucaaaggcucuuuucagagccaccaaaaaaaaaaaaaaaaaaaaaaaaaaaaaaaaaaaaaaaaaaaaaaaaaaaaaaaaaaaaaaaaaaaaaaaaaaaaaaaaaaaaaaaaaaaaaaaaaaaaa

SEQ ID NO: 24036 - RNA, 4129 nt, Artificial Sequence
  SARS-CoV-2/Wuhan/WIV05/2019__EPI_ISL_402128 spike protein mRNA gc mod (1-1273)(K986P_V987P_Y453F_D614G)
aggagacccgugacccggaaguuguacggcuacgcgacuuucccucccacaaacccucgcgcccuuccuuuccuacuugggcccggcagaaagcuuaccauguucguguuucuggugcugcugccccugguguccagccagugugugaaccugaccaccagaacacagcugccuccagccuacaccaacagcuucaccagaggcguguacuaccccgacaagguguucagauccagcgugcugcacucuacccaggaccuguuccugccuuucuucagcaacgugaccugguuccacgccauccacguguccggcaccaauggcaccaagagauucgacaaccccgugcugcccuucaacgacgggguguacuuugccagcaccgagaaguccaacaucaucagaggcuggaucuucggcaccacacuggacagcaagacccagagccugcugaucgugaacaacgccaccaacguggucaucaaagugugcgaguuccaguucugcaacgaccccuuccugggcgucuacuaccacaagaacaacaagagcuggauggaaagcgaguuccggguguacagcagcgccaacaacugcaccuucgaguacgugucccagccuuuccugauggaccuggaaggcaagcagggcaacuucaagaaccugcgcgaguucguguucaagaacaucgacggcuacuucaaaaucuacagcaagcacaccccuaucaaccucgugcgggaucugccucagggcuucucugcucuggaaccccugguggaucugcccaucggcaucaacaucacccgguuucagacacugcuggcccugcacagaagcuaccugacaccuggcgauagcagcagcggauggacagcuggugccgccgcuuacuaugugggcuaccugcagccuagaaccuuccugcugaaguacaacgagaacggcaccaucaccgacgccguggauugugcucuggauccucugagcgagacaaagugcacccugaaguccuucaccguggaaaagggcaucuaccagaccagcaacuuccgggugcagcccaccgaauccaucgugcgguuccccaauaucaccaaucugugccccuucggcgagguguucaaugccaccagauucgccucuguguacgccuggaaccggaagcggaucagcaauugcguggccgacuacuccgugcuguacaacuccgccagcuucagcaccuucaagugcuacggcguguccccuaccaagcugaacgaccugugcuucacaaacguguacgccgacagcuucgugauccggggagaugaagugcggcagauugccccuggacagacaggcaagaucgccgacuacaacuacaagcugcccgacgacuucaccggcugugugauugccuggaacagcaacaaccuggacuccaaagucggcggcaacuacaauuaccuguuccggcuguuccggaaguccaaucugaagcccuucgagcgggacaucagcaccgaaaucuaucaggccggcagcaccccuugcaacggcguggaaggcuucaacugcuacuucccacugcaguccuacggcuuucagcccacaaauggcgugggcuaucagcccuacagagugguggugcugagcuucgaacugcugcaugcuccugccacagugugcggcccuaagaaaagcaccaaucucgugaagaacaaaugcgugaacuucaacuucaacggccugaccggcaccggcgugcugacagagagcaacaagaaguuccugccauuccagcaguuuggccgggauaucgccgauaccacagacgccguuagagauccccagacacuggaaauccuggacaucaccccaugcagcuucggcggagugucugugaucaccccuggcaccaacaccagcaaucagguggcagugcuguaccagggcgugaacuguaccgaagugcccguggccauucacgccgaucagcugacaccuacauggcggguguacuccaccggcagcaauguguuucagaccagagccggcugucugaucggagccgagcacgugaacaauagcuacgagugcgacauccccaucggcgcuggcaucugugccagcuaccagacacagacaaacagccccagacgggcuagaagcguggccagccagagcaucauugccuacacaaugucucugggcgccgagaacagcguggccuacuccaacaacucuaucgcuauccccaccaacuucaccaucagcgugaccaccgagauccugccuguguccaugaccaagaccagcguggacugcaccauguacaucugcggcgauuccaccgagugcuccaaccugcugcugcaguacggcagcuucugcacccagcugaauagagcccugacagggaucgccguggaacaggacaagaacacccaagagguguucgcccaagugaagcaaaucuacaagaccccuccuaucaaggacuucggcggcuucaauuucagccagauucugcccgauccuagcaagcccagcaagcggagcuucaucgaggaccugcuguucaacaaagugacacuggccgacgccggcuucaucaagcaguauggcgauugucugggcgacauugccgccagggaucugauuugcgcccagaaguuuaacggacugacagugcugccuccucugcugaccgaugagaugaucgcccaguacacaucugcccugcuggccggcacaaucacaagcggcuggacauuuggagcuggcgccgcucugcagauccccuuugcuaugcagauggccuaccgguucaacggcaucggagugacccagaaugugcuguacgagaaccagaagcugaucgccaaccaguucaacagcgccaucggcaagauccaggacagccugagcagcacagcaagcgcccugggaaagcugcaggacguggucaaccagaaugcccaggcacugaacacccuggucaagcagcuguccuccaacuucggcgccaucagcucugugcugaacgauauccugagcagacuggacccuccugaggccgaggugcagaucgacagacugaucacaggcagacugcagagccuccagacauacgugacccagcagcugaucagagccgccgagauuagagccucugccaaucuggccgccaccaagaugucugagugugugcugggccagagcaagagaguggacuuuugcggcaagggcuaccaccugaugagcuucccucagucugccccucacggcgugguguuucugcacgugacauaugugcccgcucaagagaagaauuucaccaccgcuccagccaucugccacgacggcaaagcccacuuuccuagagaaggcguguucguguccaacggcacccauugguucgugacacagcggaacuucuacgagccccagaucaucaccaccgacaacaccuucgugucuggcaacugcgacguugugaucggcauugugaacaauaccguguacgacccucugcagcccgagcuggacagcuucaaagaggaacuggacaaguacuuuaagaaccacacaagccccgacguggaccugggcgauaucagcggaaucaaugccagcgucgugaacauccagaaagagaucgaccggcugaacgagguggccaagaaucugaacgagagccugaucgaccugcaagaacuggggaaguacgagcaguacaucaaguggcccugguacaucuggcugggcuuuaucgccggacugauugccaucgugauggucacaaucaugcuguguugcaugaccagcugcuguagcugccugaagggcuguuguagcuguggcagcugcugcaaguucgacgaggacgauucugagcccgugcugaagggcgugaaacugcacuacaccugaggacuaguguccaccugucccuccugggcugcuggauugucucguuuuccugccaaauaaacaggaucagcgcuuuacagaucucaaaggcucuuuucagagccaccaaaaaaaaaaaaaaaaaaaaaaaaaaaaaaaaaaaaaaaaaaaaaaaaaaaaaaaaaaaaaaaaaaaaaaaaaaaaaaaaaaaaaaaaaaaaaaaaaaaaa

SEQ ID NO: 24037 - RNA, 4129 nt, Artificial Sequence
  SARS-CoV-2/Wuhan/WIV05/2019__EPI_ISL_402128 spike protein mRNA gc mod (1-1273)(K986P_V987P_D614G_I692V)
aggagacccgugacccggaaguuguacggcuacgcgacuuucccucccacaaacccucgcgcccuuccuuuccuacuugggcccggcagaaagcuuaccauguucguguuucuggugcugcugccccugguguccagccagugugugaaccugaccaccagaacacagcugccuccagccuacaccaacagcuucaccagaggcguguacuaccccgacaagguguucagauccagcgugcugcacucuacccaggaccuguuccugccuuucuucagcaacgugaccugguuccacgccauccacguguccggcaccaauggcaccaagagauucgacaaccccgugcugcccuucaacgacgggguguacuuugccagcaccgagaaguccaacaucaucagaggcuggaucuucggcaccacacuggacagcaagacccagagccugcugaucgugaacaacgccaccaacguggucaucaaagugugcgaguuccaguucugcaacgaccccuuccugggcgucuacuaccacaagaacaacaagagcuggauggaaagcgaguuccggguguacagcagcgccaacaacugcaccuucgaguacgugucccagccuuuccugauggaccuggaaggcaagcagggcaacuucaagaaccugcgcgaguucguguucaagaacaucgacggcuacuucaaaaucuacagcaagcacaccccuaucaaccucgugcgggaucugccucagggcuucucugcucuggaaccccugguggaucugcccaucggcaucaacaucacccgguuucagacacugcuggcccugcacagaagcuaccugacaccuggcgauagcagcagcggauggacagcuggugccgccgcuuacuaugugggcuaccugcagccuagaaccuuccugcugaaguacaacgagaacggcaccaucaccgacgccguggauugugcucuggauccucugagcgagacaaagugcacccugaaguccuucaccguggaaaagggcaucuaccagaccagcaacuuccgggugcagcccaccgaauccaucgugcgguuccccaauaucaccaaucugugccccuucggcgagguguucaaugccaccagauucgccucuguguacgccuggaaccggaagcggaucagcaauugcguggccgacuacuccgugcuguacaacuccgccagcuucagcaccuucaagugcuacggcguguccccuaccaagcugaacgaccugugcuucacaaacguguacgccgacagcuucgugauccggggagaugaagugcggcagauugccccuggacagacaggcaagaucgccgacuacaacuacaagcugcccgacgacuucaccggcugugugauugccuggaacagcaacaaccuggacuccaaagucggcggcaacuacaauuaccuguaccggcuguuccggaaguccaaucugaagcccuucgagcgggacaucagcaccgaaaucuaucaggccggcagcaccccuugcaacggcguggaaggcuucaacugcuacuucccacugcaguccuacggcuuucagcccacaaauggcgugggcuaucagcccuacagagugguggugcugagcuucgaacugcugcaugcuccugccacagugugcggcccuaagaaaagcaccaaucucgugaagaacaaaugcgugaacuucaacuucaacggccugaccggcaccggcgugcugacagagagcaacaagaaguuccugccauuccagcaguuuggccgggauaucgccgauaccacagacgccguuagagauccccagacacuggaaauccuggacaucaccccaugcagcuucggcggagugucugugaucaccccuggcaccaacaccagcaaucagguggcagugcuguaccagggcgugaacuguaccgaagugcccguggccauucacgccgaucagcugacaccuacauggcggguguacuccaccggcagcaauguguuucagaccagagccggcugucugaucggagccgagcacgugaacaauagcuacgagugcgacauccccaucggcgcuggcaucugugccagcuaccagacacagacaaacagccccagacgggcuagaagcguggccagccagagcgugauugccuacacaaugucucugggcgccgagaacagcguggccuacuccaacaacucuaucgcuauccccaccaacuucaccaucagcgugaccaccgagauccugccuguguccaugaccaagaccagcguggacugcaccauguacaucugcggcgauuccaccgagugcuccaaccugcugcugcaguacggcagcuucugcacccagcugaauagagcccugacagggaucgccguggaacaggacaagaacacccaagagguguucgcccaagugaagcaaaucuacaagaccccuccuaucaaggacuucggcggcuucaauuucagccagauucugcccgauccuagcaagcccagcaagcggagcuucaucgaggaccugcuguucaacaaagugacacuggccgacgccggcuucaucaagcaguauggcgauugucugggcgacauugccgccagggaucugauuugcgcccagaaguuuaacggacugacagugcugccuccucugcugaccgaugagaugaucgcccaguacacaucugcccugcuggccggcacaaucacaagcggcuggacauuuggagcuggcgccgcucugcagauccccuuugcuaugcagauggccuaccgguucaacggcaucggagugacccagaaugugcuguacgagaaccagaagcugaucgccaaccaguucaacagcgccaucggcaagauccaggacagccugagcagcacagcaagcgcccugggaaagcugcaggacguggucaaccagaaugcccaggcacugaacacccuggucaagcagcuguccuccaacuucggcgccaucagcucugugcugaacgauauccugagcagacuggacccuccugaggccgaggugcagaucgacagacugaucacaggcagacugcagagccuccagacauacgugacccagcagcugaucagagccgccgagauuagagccucugccaaucuggccgccaccaagaugucugagugugugcugggccagagcaagagaguggacuuuugcggcaagggcuaccaccugaugagcuucccucagucugccccucacggcgugguguuucugcacgugacauaugugcccgcucaagagaagaauuucaccaccgcuccagccaucugccacgacggcaaagcccacuuuccuagagaaggcguguucguguccaacggcacccauugguucgugacacagcggaacuucuacgagccccagaucaucaccaccgacaacaccuucgugucuggcaacugcgacguugugaucggcauugugaacaauaccguguacgacccucugcagcccgagcuggacagcuucaaagaggaacuggacaaguacuuuaagaaccacacaagccccgacguggaccugggcgauaucagcggaaucaaugccagcgucgugaacauccagaaagagaucgaccggcugaacgagguggccaagaaucugaacgagagccugaucgaccugcaagaacuggggaaguacgagcaguacaucaaguggcccugguacaucuggcugggcuuuaucgccggacugauugccaucgugauggucacaaucaugcuguguugcaugaccagcugcuguagcugccugaagggcuguuguagcuguggcagcugcugcaaguucgacgaggacgauucugagcccgugcugaagggcgugaaacugcacuacaccugaggacuaguguccaccugucccuccugggcugcuggauugucucguuuuccugccaaauaaacaggaucagcgcuuuacagaucucaaaggcucuuuucagagccaccaaaaaaaaaaaaaaaaaaaaaaaaaaaaaaaaaaaaaaaaaaaaaaaaaaaaaaaaaaaaaaaaaaaaaaaaaaaaaaaaaaaaaaaaaaaaaaaaaaaaa

SEQ ID NO: 24038 - RNA, 4129 nt, Artificial Sequence
  SARS-CoV-2/Wuhan/WIV05/2019__EPI_ISL_402128 spike protein mRNA gc mod (1-1273)(K986P_V987P_D614G_M1229I)
aggagacccgugacccggaaguuguacggcuacgcgacuuucccucccacaaacccucgcgcccuuccuuuccuacuugggcccggcagaaagcuuaccauguucguguuucuggugcugcugccccugguguccagccagugugugaaccugaccaccagaacacagcugccuccagccuacaccaacagcuucaccagaggcguguacuaccccgacaagguguucagauccagcgugcugcacucuacccaggaccuguuccugccuuucuucagcaacgugaccugguuccacgccauccacguguccggcaccaauggcaccaagagauucgacaaccccgugcugcccuucaacgacgggguguacuuugccagcaccgagaaguccaacaucaucagaggcuggaucuucggcaccacacuggacagcaagacccagagccugcugaucgugaacaacgccaccaacguggucaucaaagugugcgaguuccaguucugcaacgaccccuuccugggcgucuacuaccacaagaacaacaagagcuggauggaaagcgaguuccggguguacagcagcgccaacaacugcaccuucgaguacgugucccagccuuuccugauggaccuggaaggcaagcagggcaacuucaagaaccugcgcgaguucguguucaagaacaucgacggcuacuucaaaaucuacagcaagcacaccccuaucaaccucgugcgggaucugccucagggcuucucugcucuggaaccccugguggaucugcccaucggcaucaacaucacccgguuucagacacugcuggcccugcacagaagcuaccugacaccuggcgauagcagcagcggauggacagcuggugccgccgcuuacuaugugggcuaccugcagccuagaaccuuccugcugaaguacaacgagaacggcaccaucaccgacgccguggauugugcucuggauccucugagcgagacaaagugcacccugaaguccuucaccguggaaaagggcaucuaccagaccagcaacuuccgggugcagcccaccgaauccaucgugcgguuccccaauaucaccaaucugugccccuucggcgagguguucaaugccaccagauucgccucuguguacgccuggaaccggaagcggaucagcaauugcguggccgacuacuccgugcuguacaacuccgccagcuucagcaccuucaagugcuacggcguguccccuaccaagcugaacgaccugugcuucacaaacguguacgccgacagcuucgugauccggggagaugaagugcggcagauugccccuggacagacaggcaagaucgccgacuacaacuacaagcugcccgacgacuucaccggcugugugauugccuggaacagcaacaaccuggacuccaaagucggcggcaacuacaauuaccuguaccggcuguuccggaaguccaaucugaagcccuucgagcgggacaucagcaccgaaaucuaucaggccggcagcaccccuugcaacggcguggaaggcuucaacugcuacuucccacugcaguccuacggcuuucagcccacaaauggcgugggcuaucagcccuacagagugguggugcugagcuucgaacugcugcaugcuccugccacagugugcggcccuaagaaaagcaccaaucucgugaagaacaaaugcgugaacuucaacuucaacggccugaccggcaccggcgugcugacagagagcaacaagaaguuccugccauuccagcaguuuggccgggauaucgccgauaccacagacgccguuagagauccccagacacuggaaauccuggacaucaccccaugcagcuucggcggagugucugugaucaccccuggcaccaacaccagcaaucagguggcagugcuguaccagggcgugaacuguaccgaagugcccguggccauucacgccgaucagcugacaccuacauggcggguguacuccaccggcagcaauguguuucagaccagagccggcugucugaucggagccgagcacgugaacaauagcuacgagugcgacauccccaucggcgcuggcaucugugccagcuaccagacacagacaaacagccccagacgggcuagaagcguggccagccagagcaucauugccuacacaaugucucugggcgccgagaacagcguggccuacuccaacaacucuaucgcuauccccaccaacuucaccaucagcgugaccaccgagauccugccuguguccaugaccaagaccagcguggacugcaccauguacaucugcggcgauuccaccgagugcuccaaccugcugcugcaguacggcagcuucugcacccagcugaauagagcccugacagggaucgccguggaacaggacaagaacacccaagagguguucgcccaagugaagcaaaucuacaagaccccuccuaucaaggacuucggcggcuucaauuucagccagauucugcccgauccuagcaagcccagcaagcggagcuucaucgaggaccugcuguucaacaaagugacacuggccgacgccggcuucaucaagcaguauggcgauugucugggcgacauugccgccagggaucugauuugcgcccagaaguuuaacggacugacagugcugccuccucugcugaccgaugagaugaucgcccaguacacaucugcccugcuggccggcacaaucacaagcggcuggacauuuggagcuggcgccgcucugcagauccccuuugcuaugcagauggccuaccgguucaacggcaucggagugacccagaaugugcuguacgagaaccagaagcugaucgccaaccaguucaacagcgccaucggcaagauccaggacagccugagcagcacagcaagcgcccugggaaagcugcaggacguggucaaccagaaugcccaggcacugaacacccuggucaagcagcuguccuccaacuucggcgccaucagcucugugcugaacgauauccugagcagacuggacccuccugaggccgaggugcagaucgacagacugaucacaggcagacugcagagccuccagacauacgugacccagcagcugaucagagccgccgagauuagagccucugccaaucuggccgccaccaagaugucugagugugugcugggccagagcaagagaguggacuuuugcggcaagggcuaccaccugaugagcuucccucagucugccccucacggcgugguguuucugcacgugacauaugugcccgcucaagagaagaauuucaccaccgcuccagccaucugccacgacggcaaagcccacuuuccuagagaaggcguguucguguccaacggcacccauugguucgugacacagcggaacuucuacgagccccagaucaucaccaccgacaacaccuucgugucuggcaacugcgacguugugaucggcauugugaacaauaccguguacgacccucugcagcccgagcuggacagcuucaaagaggaacuggacaaguacuuuaagaaccacacaagccccgacguggaccugggcgauaucagcggaaucaaugccagcgucgugaacauccagaaagagaucgaccggcugaacgagguggccaagaaucugaacgagagccugaucgaccugcaagaacuggggaaguacgagcaguacaucaaguggcccugguacaucuggcugggcuuuaucgccggacugauugccaucgugaucgucacaaucaugcuguguugcaugaccagcugcuguagcugccugaagggcuguuguagcuguggcagcugcugcaaguucgacgaggacgauucugagcccgugcugaagggcgugaaacugcacuacaccugaggacuaguguccaccugucccuccugggcugcuggauugucucguuuuccugccaaauaaacaggaucagcgcuuuacagaucucaaaggcucuuuucagagccaccaaaaaaaaaaaaaaaaaaaaaaaaaaaaaaaaaaaaaaaaaaaaaaaaaaaaaaaaaaaaaaaaaaaaaaaaaaaaaaaaaaaaaaaaaaaaaaaaaaaaa

SEQ ID NO: 24039 - RNA, 4123 nt, Artificial Sequence
  SARS-CoV-2/Wuhan/WIV05/2019__EPI_ISL_402128 spike protein mRNA gc mod (1-1273)(K986P_V987P_H69del_V70del_A222V_Y453F_S477N_D614G_I692V)
aggagacccgugacccggaaguuguacggcuacgcgacuuucccucccacaaacccucgcgcccuuccuuuccuacuugggcccggcagaaagcuuaccauguucguguuucuggugcugcugccccugguguccagccagugugugaaccugaccaccagaacacagcugccuccagccuacaccaacagcuucaccagaggcguguacuaccccgacaagguguucagauccagcgugcugcacucuacccaggaccuguuccugccuuucuucagcaacgugaccugguuccacgccaucuccggcaccaauggcaccaagagauucgacaaccccgugcugcccuucaacgacgggguguacuuugccagcaccgagaaguccaacaucaucagaggcuggaucuucggcaccacacuggacagcaagacccagagccugcugaucgugaacaacgccaccaacguggucaucaaagugugcgaguuccaguucugcaacgaccccuuccugggcgucuacuaccacaagaacaacaagagcuggauggaaagcgaguuccggguguacagcagcgccaacaacugcaccuucgaguacgugucccagccuuuccugauggaccuggaaggcaagcagggcaacuucaagaaccugcgcgaguucguguucaagaacaucgacggcuacuucaaaaucuacagcaagcacaccccuaucaaccucgugcgggaucugccucagggcuucucugugcuggaaccccugguggaucugcccaucggcaucaacaucacccgguuucagacacugcuggcccugcacagaagcuaccugacaccuggcgauagcagcagcggauggacagcuggugccgccgcuuacuaugugggcuaccugcagccuagaaccuuccugcugaaguacaacgagaacggcaccaucaccgacgccguggauugugcucuggauccucugagcgagacaaagugcacccugaaguccuucaccguggaaaagggcaucuaccagaccagcaacuuccgggugcagcccaccgaauccaucgugcgguuccccaauaucaccaaucugugccccuucggcgagguguucaaugccaccagauucgccucuguguacgccuggaaccggaagcggaucagcaauugcguggccgacuacuccgugcuguacaacuccgccagcuucagcaccuucaagugcuacggcguguccccuaccaagcugaacgaccugugcuucacaaacguguacgccgacagcuucgugauccggggagaugaagugcggcagauugccccuggacagacaggcaagaucgccgacuacaacuacaagcugcccgacgacuucaccggcugugugauugccuggaacagcaacaaccuggacuccaaagucggcggcaacuacaauuaccuguuccggcuguuccggaaguccaaucugaagcccuucgagcgggacaucagcaccgaaaucuaucaggccggcaacaccccuugcaacggcguggaaggcuucaacugcuacuucccacugcaguccuacggcuuucagcccacaaauggcgugggcuaucagcccuacagagugguggugcugagcuucgaacugcugcaugcuccugccacagugugcggcccuaagaaaagcaccaaucucgugaagaacaaaugcgugaacuucaacuucaacggccugaccggcaccggcgugcugacagagagcaacaagaaguuccugccauuccagcaguuuggccgggauaucgccgauaccacagacgccguuagagauccccagacacuggaaauccuggacaucaccccaugcagcuucggcggagugucugugaucaccccuggcaccaacaccagcaaucagguggcagugcuguaccagggcgugaacuguaccgaagugcccguggccauucacgccgaucagcugacaccuacauggcggguguacuccaccggcagcaauguguuucagaccagagccggcugucugaucggagccgagcacgugaacaauagcuacgagugcgacauccccaucggcgcuggcaucugugccagcuaccagacacagacaaacagccccagacgggcuagaagcguggccagccagagcgugauugccuacacaaugucucugggcgccgagaacagcguggccuacuccaacaacucuaucgcuauccccaccaacuucaccaucagcgugaccaccgagauccugccuguguccaugaccaagaccagcguggacugcaccauguacaucugcggcgauuccaccgagugcuccaaccugcugcugcaguacggcagcuucugcacccagcugaauagagcccugacagggaucgccguggaacaggacaagaacacccaagagguguucgcccaagugaagcaaaucuacaagaccccuccuaucaaggacuucggcggcuucaauuucagccagauucugcccgauccuagcaagcccagcaagcggagcuucaucgaggaccugcuguucaacaaagugacacuggccgacgccggcuucaucaagcaguauggcgauugucugggcgacauugccgccagggaucugauuugcgcccagaaguuuaacggacugacagugcugccuccucugcugaccgaugagaugaucgcccaguacacaucugcccugcuggccggcacaaucacaagcggcuggacauuuggagcuggcgccgcucugcagauccccuuugcuaugcagauggccuaccgguucaacggcaucggagugacccagaaugugcuguacgagaaccagaagcugaucgccaaccaguucaacagcgccaucggcaagauccaggacagccugagcagcacagcaagcgcccugggaaagcugcaggacguggucaaccagaaugcccaggcacugaacacccuggucaagcagcuguccuccaacuucggcgccaucagcucugugcugaacgauauccugagcagacuggacccuccugaggccgaggugcagaucgacagacugaucacaggcagacugcagagccuccagacauacgugacccagcagcugaucagagccgccgagauuagagccucugccaaucuggccgccaccaagaugucugagugugugcugggccagagcaagagaguggacuuuugcggcaagggcuaccaccugaugagcuucccucagucugccccucacggcgugguguuucugcacgugacauaugugcccgcucaagagaagaauuucaccaccgcuccagccaucugccacgacggcaaagcccacuuuccuagagaaggcguguucguguccaacggcacccauugguucgugacacagcggaacuucuacgagccccagaucaucaccaccgacaacaccuucgugucuggcaacugcgacguugugaucggcauugugaacaauaccguguacgacccucugcagcccgagcuggacagcuucaaagaggaacuggacaaguacuuuaagaaccacacaagccccgacguggaccugggcgauaucagcggaaucaaugccagcgucgugaacauccagaaagagaucgaccggcugaacgagguggccaagaaucugaacgagagccugaucgaccugcaagaacuggggaaguacgagcaguacaucaaguggcccugguacaucuggcugggcuuuaucgccggacugauugccaucgugauggucacaaucaugcuguguugcaugaccagcugcuguagcugccugaagggcuguuguagcuguggcagcugcugcaaguucgacgaggacgauucugagcccgugcugaagggcgugaaacugcacuacaccugaggacuaguguccaccugucccuccugggcugcuggauugucucguuuuccugccaaauaaacaggaucagcgcuuuacagaucucaaaggcucuuuucagagccaccaaaaaaaaaaaaaaaaaaaaaaaaaaaaaaaaaaaaaaaaaaaaaaaaaaaaaaaaaaaaaaaaaaaaaaaaaaaaaaaaaaaaaaaaaaaaaaaaaaaaa

SEQ ID NO: 24040 - RNA, 4123 nt, Artificial Sequence
  SARS-CoV-2/Wuhan/WIV05/2019__EPI_ISL_402128 spike protein mRNA gc mod (1-1273)(K986P_V987P_H69del_V70del_Y453F_D614G_I692V_M1229I)
aggagacccgugacccggaaguuguacggcuacgcgacuuucccucccacaaacccucgcgcccuuccuuuccuacuugggcccggcagaaagcuuaccauguucguguuucuggugcugcugccccugguguccagccagugugugaaccugaccaccagaacacagcugccuccagccuacaccaacagcuucaccagaggcguguacuaccccgacaagguguucagauccagcgugcugcacucuacccaggaccuguuccugccuuucuucagcaacgugaccugguuccacgccaucuccggcaccaauggcaccaagagauucgacaaccccgugcugcccuucaacgacgggguguacuuugccagcaccgagaaguccaacaucaucagaggcuggaucuucggcaccacacuggacagcaagacccagagccugcugaucgugaacaacgccaccaacguggucaucaaagugugcgaguuccaguucugcaacgaccccuuccugggcgucuacuaccacaagaacaacaagagcuggauggaaagcgaguuccggguguacagcagcgccaacaacugcaccuucgaguacgugucccagccuuuccugauggaccuggaaggcaagcagggcaacuucaagaaccugcgcgaguucguguucaagaacaucgacggcuacuucaaaaucuacagcaagcacaccccuaucaaccucgugcgggaucugccucagggcuucucugcucuggaaccccugguggaucugcccaucggcaucaacaucacccgguuucagacacugcuggcccugcacagaagcuaccugacaccuggcgauagcagcagcggauggacagcuggugccgccgcuuacuaugugggcuaccugcagccuagaaccuuccugcugaaguacaacgagaacggcaccaucaccgacgccguggauugugcucuggauccucugagcgagacaaagugcacccugaaguccuucaccguggaaaagggcaucuaccagaccagcaacuuccgggugcagcccaccgaauccaucgugcgguuccccaauaucaccaaucugugccccuucggcgagguguucaaugccaccagauucgccucuguguacgccuggaaccggaagcggaucagcaauugcguggccgacuacuccgugcuguacaacuccgccagcuucagcaccuucaagugcuacggcguguccccuaccaagcugaacgaccugugcuucacaaacguguacgccgacagcuucgugauccggggagaugaagugcggcagauugccccuggacagacaggcaagaucgccgacuacaacuacaagcugcccgacgacuucaccggcugugugauugccuggaacagcaacaaccuggacuccaaagucggcggcaacuacaauuaccuguuccggcuguuccggaaguccaaucugaagcccuucgagcgggacaucagcaccgaaaucuaucaggccggcagcaccccuugcaacggcguggaaggcuucaacugcuacuucccacugcaguccuacggcuuucagcccacaaauggcgugggcuaucagcccuacagagugguggugcugagcuucgaacugcugcaugcuccugccacagugugcggcccuaagaaaagcaccaaucucgugaagaacaaaugcgugaacuucaacuucaacggccugaccggcaccggcgugcugacagagagcaacaagaaguuccugccauuccagcaguuuggccgggauaucgccgauaccacagacgccguuagagauccccagacacuggaaauccuggacaucaccccaugcagcuucggcggagugucugugaucaccccuggcaccaacaccagcaaucagguggcagugcuguaccagggcgugaacuguaccgaagugcccguggccauucacgccgaucagcugacaccuacauggcggguguacuccaccggcagcaauguguuucagaccagagccggcugucugaucggagccgagcacgugaacaauagcuacgagugcgacauccccaucggcgcuggcaucugugccagcuaccagacacagacaaacagccccagacgggcuagaagcguggccagccagagcgugauugccuacacaaugucucugggcgccgagaacagcguggccuacuccaacaacucuaucgcuauccccaccaacuucaccaucagcgugaccaccgagauccugccuguguccaugaccaagaccagcguggacugcaccauguacaucugcggcgauuccaccgagugcuccaaccugcugcugcaguacggcagcuucugcacccagcugaauagagcccugacagggaucgccguggaacaggacaagaacacccaagagguguucgcccaagugaagcaaaucuacaagaccccuccuaucaaggacuucggcggcuucaauuucagccagauucugcccgauccuagcaagcccagcaagcggagcuucaucgaggaccugcuguucaacaaagugacacuggccgacgccggcuucaucaagcaguauggcgauugucugggcgacauugccgccagggaucugauuugcgcccagaaguuuaacggacugacagugcugccuccucugcugaccgaugagaugaucgcccaguacacaucugcccugcuggccggcacaaucacaagcggcuggacauuuggagcuggcgccgcucugcagauccccuuugcuaugcagauggccuaccgguucaacggcaucggagugacccagaaugugcuguacgagaaccagaagcugaucgccaaccaguucaacagcgccaucggcaagauccaggacagccugagcagcacagcaagcgcccugggaaagcugcaggacguggucaaccagaaugcccaggcacugaacacccuggucaagcagcuguccuccaacuucggcgccaucagcucugugcugaacgauauccugagcagacuggacccuccugaggccgaggugcagaucgacagacugaucacaggcagacugcagagccuccagacauacgugacccagcagcugaucagagccgccgagauuagagccucugccaaucuggccgccaccaagaugucugagugugugcugggccagagcaagagaguggacuuuugcggcaagggcuaccaccugaugagcuucccucagucugccccucacggcgugguguuucugcacgugacauaugugcccgcucaagagaagaauuucaccaccgcuccagccaucugccacgacggcaaagcccacuuuccuagagaaggcguguucguguccaacggcacccauugguucgugacacagcggaacuucuacgagccccagaucaucaccaccgacaacaccuucgugucuggcaacugcgacguugugaucggcauugugaacaauaccguguacgacccucugcagcccgagcuggacagcuucaaagaggaacuggacaaguacuuuaagaaccacacaagccccgacguggaccugggcgauaucagcggaaucaaugccagcgucgugaacauccagaaagagaucgaccggcugaacgagguggccaagaaucugaacgagagccugaucgaccugcaagaacuggggaaguacgagcaguacaucaaguggcccugguacaucuggcugggcuuuaucgccggacugauugccaucgugaucgucacaaucaugcuguguugcaugaccagcugcuguagcugccugaagggcuguuguagcuguggcagcugcugcaaguucgacgaggacgauucugagcccgugcugaagggcgugaaacugcacuacaccugaggacuaguguccaccugucccuccugggcugcuggauugucucguuuuccugccaaauaaacaggaucagcgcuuuacagaucucaaaggcucuuuucagagccaccaaaaaaaaaaaaaaaaaaaaaaaaaaaaaaaaaaaaaaaaaaaaaaaaaaaaaaaaaaaaaaaaaaaaaaaaaaaaaaaaaaaaaaaaaaaaaaaaaaaaa

SEQ ID NO: 24041 - RNA, 4120 nt, Artificial Sequence
  SARS-CoV-2/Wuhan/WIV05/2019__EPI_ISL_402128 spike protein mRNA gc mod (1-1273)(K986P_V987P_K986P_V987P_H69del_V70del_Y144del_N501Y_A570 D_D614G_P681H_T716I_S982A_D1118H)
aggagacccgugacccggaaguuguacggcuacgcgacuuucccucccacaaacccucgcgcccuuccuuuccuacuugggcccggcagaaagcuuaccauguucguguuucuggugcugcugccccugguguccagccagugugugaaccugaccaccagaacacagcugccuccagccuacaccaacagcuucaccagaggcguguacuaccccgacaagguguucagauccagcgugcugcacucuacccaggaccuguuccugccuuucuucagcaacgugaccugguuccacgccaucuccggcaccaauggcaccaagagauucgacaaccccgugcugcccuucaacgacgggguguacuuugccagcaccgagaaguccaacaucaucagaggcuggaucuucggcaccacacuggacagcaagacccagagccugcugaucgugaacaacgccaccaacguggucaucaaagugugcgaguuccaguucugcaacgaccccuuccugggcgucuaccacaagaacaacaagagcuggauggaaagcgaguuccggguguacagcagcgccaacaacugcaccuucgaguacgugucccagccuuuccugauggaccuggaaggcaagcagggcaacuucaagaaccugcgcgaguucguguucaagaacaucgacggcuacuucaaaaucuacagcaagcacaccccuaucaaccucgugcgggaucugccucagggcuucucugcucuggaaccccugguggaucugcccaucggcaucaacaucacccgguuucagacacugcuggcccugcacagaagcuaccugacaccuggcgauagcagcagcggauggacagcuggugccgccgcuuacuaugugggcuaccugcagccuagaaccuuccugcugaaguacaacgagaacggcaccaucaccgacgccguggauugugcucuggauccucugagcgagacaaagugcacccugaaguccuucaccguggaaaagggcaucuaccagaccagcaacuuccgggugcagcccaccgaauccaucgugcgguuccccaauaucaccaaucugugccccuucggcgagguguucaaugccaccagauucgccucuguguacgccuggaaccggaagcggaucagcaauugcguggccgacuacuccgugcuguacaacuccgccagcuucagcaccuucaagugcuacggcguguccccuaccaagcugaacgaccugugcuucacaaacguguacgccgacagcuucgugauccggggagaugaagugcggcagauugccccuggacagacaggcaagaucgccgacuacaacuacaagcugcccgacgacuucaccggcugugugauugccuggaacagcaacaaccuggacuccaaagucggcggcaacuacaauuaccuguaccggcuguuccggaaguccaaucugaagcccuucgagcgggacaucagcaccgaaaucuaucaggccggcagcaccccuugcaacggcguggaaggcuucaacugcuacuucccacugcaguccuacggcuuucagcccacauacggcgugggcuaucagcccuacagagugguggugcugagcuucgaacugcugcaugcuccugccacagugugcggcccuaagaaaagcaccaaucucgugaagaacaaaugcgugaacuucaacuucaacggccugaccggcaccggcgugcugacagagagcaacaagaaguuccugccauuccagcaguuuggccgggauaucgacgauaccacagacgccguuagagauccccagacacuggaaauccuggacaucaccccaugcagcuucggcggagugucugugaucaccccuggcaccaacaccagcaaucagguggcagugcuguaccagggcgugaacuguaccgaagugcccguggccauucacgccgaucagcugacaccuacauggcggguguacuccaccggcagcaauguguuucagaccagagccggcugucugaucggagccgagcacgugaacaauagcuacgagugcgacauccccaucggcgcuggcaucugugccagcuaccagacacagacaaacagccacagacgggcuagaagcguggccagccagagcaucauugccuacacaaugucucugggcgccgagaacagcguggccuacuccaacaacucuaucgcuauccccaucaacuucaccaucagcgugaccaccgagauccugccuguguccaugaccaagaccagcguggacugcaccauguacaucugcggcgauuccaccgagugcuccaaccugcugcugcaguacggcagcuucugcacccagcugaauagagcccugacagggaucgccguggaacaggacaagaacacccaagagguguucgcccaagugaagcaaaucuacaagaccccuccuaucaaggacuucggcggcuucaauuucagccagauucugcccgauccuagcaagcccagcaagcggagcuucaucgaggaccugcuguucaacaaagugacacuggccgacgccggcuucaucaagcaguauggcgauugucugggcgacauugccgccagggaucugauuugcgcccagaaguuuaacggacugacagugcugccuccucugcugaccgaugagaugaucgcccaguacacaucugcccugcuggccggcacaaucacaagcggcuggacauuuggagcuggcgccgcucugcagauccccuuugcuaugcagauggccuaccgguucaacggcaucggagugacccagaaugugcuguacgagaaccagaagcugaucgccaaccaguucaacagcgccaucggcaagauccaggacagccugagcagcacagcaagcgcccugggaaagcugcaggacguggucaaccagaaugcccaggcacugaacacccuggucaagcagcuguccuccaacuucggcgccaucagcucugugcugaacgauauccuggccagacuggacccuccugaggccgaggugcagaucgacagacugaucacaggcagacugcagagccuccagacauacgugacccagcagcugaucagagccgccgagauuagagccucugccaaucuggccgccaccaagaugucugagugugugcugggccagagcaagagaguggacuuuugcggcaagggcuaccaccugaugagcuucccucagucugccccucacggcgugguguuucugcacgugacauaugugcccgcucaagagaagaauuucaccaccgcuccagccaucugccacgacggcaaagcccacuuuccuagagaaggcguguucguguccaacggcacccauugguucgugacacagcggaacuucuacgagccccagaucaucaccacccacaacaccuucgugucuggcaacugcgacguugugaucggcauugugaacaauaccguguacgacccucugcagcccgagcuggacagcuucaaagaggaacuggacaaguacuuuaagaaccacacaagccccgacguggaccugggcgauaucagcggaaucaaugccagcgucgugaacauccagaaagagaucgaccggcugaacgagguggccaagaaucugaacgagagccugaucgaccugcaagaacuggggaaguacgagcaguacaucaaguggcccugguacaucuggcugggcuuuaucgccggacugauugccaucgugauggucacaaucaugcuguguugcaugaccagcugcuguagcugccugaagggcuguuguagcuguggcagcugcugcaaguucgacgaggacgauucugagcccgugcugaagggcgugaaacugcacuacaccugaggacuaguguccaccugucccuccugggcugcuggauugucucguuuuccugccaaauaaacaggaucagcgcuuuacagaucucaaaggcucuuuucagagccaccaaaaaaaaaaaaaaaaaaaaaaaaaaaaaaaaaaaaaaaaaaaaaaaaaaaaaaaaaaaaaaaaaaaaaaaaaaaaaaaaaaaaaaaaaaaaaaaaaaaaa

SEQ ID NO: 24042 - RNA, 4129 nt, Artificial Sequence
  SARS-CoV-2/Wuhan/WIV05/2019__EPI_ISL_402128 spike protein mRNA gc mod (1-1273)(K986P_V987P_K986P_V987P_K417N_E484K_N501Y_D614G)
aggagacccgugacccggaaguuguacggcuacgcgacuuucccucccacaaacccucgcgcccuuccuuuccuacuugggcccggcagaaagcuuaccauguucguguuucuggugcugcugccccugguguccagccagugugugaaccugaccaccagaacacagcugccuccagccuacaccaacagcuucaccagaggcguguacuaccccgacaagguguucagauccagcgugcugcacucuacccaggaccuguuccugccuuucuucagcaacgugaccugguuccacgccauccacguguccggcaccaauggcaccaagagauucgacaaccccgugcugcccuucaacgacgggguguacuuugccagcaccgagaaguccaacaucaucagaggcuggaucuucggcaccacacuggacagcaagacccagagccugcugaucgugaacaacgccaccaacguggucaucaaagugugcgaguuccaguucugcaacgaccccuuccugggcgucuacuaccacaagaacaacaagagcuggauggaaagcgaguuccggguguacagcagcgccaacaacugcaccuucgaguacgugucccagccuuuccugauggaccuggaaggcaagcagggcaacuucaagaaccugcgcgaguucguguucaagaacaucgacggcuacuucaaaaucuacagcaagcacaccccuaucaaccucgugcgggaucugccucagggcuucucugcucuggaaccccugguggaucugcccaucggcaucaacaucacccgguuucagacacugcuggcccugcacagaagcuaccugacaccuggcgauagcagcagcggauggacagcuggugccgccgcuuacuaugugggcuaccugcagccuagaaccuuccugcugaaguacaacgagaacggcaccaucaccgacgccguggauugugcucuggauccucugagcgagacaaagugcacccugaaguccuucaccguggaaaagggcaucuaccagaccagcaacuuccgggugcagcccaccgaauccaucgugcgguuccccaauaucaccaaucugugccccuucggcgagguguucaaugccaccagauucgccucuguguacgccuggaaccggaagcggaucagcaauugcguggccgacuacuccgugcuguacaacuccgccagcuucagcaccuucaagugcuacggcguguccccuaccaagcugaacgaccugugcuucacaaacguguacgccgacagcuucgugauccggggagaugaagugcggcagauugccccuggacagacaggcaacaucgccgacuacaacuacaagcugcccgacgacuucaccggcugugugauugccuggaacagcaacaaccuggacuccaaagucggcggcaacuacaauuaccuguaccggcuguuccggaaguccaaucugaagcccuucgagcgggacaucagcaccgaaaucuaucaggccggcagcaccccuugcaacggcgugaagggcuucaacugcuacuucccacugcaguccuacggcuuucagcccacauacggcgugggcuaucagcccuacagagugguggugcugagcuucgaacugcugcaugcuccugccacagugugcggcccuaagaaaagcaccaaucucgugaagaacaaaugcgugaacuucaacuucaacggccugaccggcaccggcgugcugacagagagcaacaagaaguuccugccauuccagcaguuuggccgggauaucgccgauaccacagacgccguuagagauccccagacacuggaaauccuggacaucaccccaugcagcuucggcggagugucugugaucaccccuggcaccaacaccagcaaucagguggcagugcuguaccagggcgugaacuguaccgaagugcccguggccauucacgccgaucagcugacaccuacauggcggguguacuccaccggcagcaauguguuucagaccagagccggcugucugaucggagccgagcacgugaacaauagcuacgagugcgacauccccaucggcgcuggcaucugugccagcuaccagacacagacaaacagccccagacgggcuagaagcguggccagccagagcaucauugccuacacaaugucucugggcgccgagaacagcguggccuacuccaacaacucuaucgcuauccccaccaacuucaccaucagcgugaccaccgagauccugccuguguccaugaccaagaccagcguggacugcaccauguacaucugcggcgauuccaccgagugcuccaaccugcugcugcaguacggcagcuucugcacccagcugaauagagcccugacagggaucgccguggaacaggacaagaacacccaagagguguucgcccaagugaagcaaaucuacaagaccccuccuaucaaggacuucggcggcuucaauuucagccagauucugcccgauccuagcaagcccagcaagcggagcuucaucgaggaccugcuguucaacaaagugacacuggccgacgccggcuucaucaagcaguauggcgauugucugggcgacauugccgccagggaucugauuugcgcccagaaguuuaacggacugacagugcugccuccucugcugaccgaugagaugaucgcccaguacacaucugcccugcuggccggcacaaucacaagcggcuggacauuuggagcuggcgccgcucugcagauccccuuugcuaugcagauggccuaccgguucaacggcaucggagugacccagaaugugcuguacgagaaccagaagcugaucgccaaccaguucaacagcgccaucggcaagauccaggacagccugagcagcacagcaagcgcccugggaaagcugcaggacguggucaaccagaaugcccaggcacugaacacccuggucaagcagcuguccuccaacuucggcgccaucagcucugugcugaacgauauccugagcagacuggacccuccugaggccgaggugcagaucgacagacugaucacaggcagacugcagagccuccagacauacgugacccagcagcugaucagagccgccgagauuagagccucugccaaucuggccgccaccaagaugucugagugugugcugggccagagcaagagaguggacuuuugcggcaagggcuaccaccugaugagcuucccucagucugccccucacggcgugguguuucugcacgugacauaugugcccgcucaagagaagaauuucaccaccgcuccagccaucugccacgacggcaaagcccacuuuccuagagaaggcguguucguguccaacggcacccauugguucgugacacagcggaacuucuacgagccccagaucaucaccaccgacaacaccuucgugucuggcaacugcgacguugugaucggcauugugaacaauaccguguacgacccucugcagcccgagcuggacagcuucaaagaggaacuggacaaguacuuuaagaaccacacaagccccgacguggaccugggcgauaucagcggaaucaaugccagcgucgugaacauccagaaagagaucgaccggcugaacgagguggccaagaaucugaacgagagccugaucgaccugcaagaacuggggaaguacgagcaguacaucaaguggcccugguacaucuggcugggcuuuaucgccggacugauugccaucgugauggucacaaucaugcuguguugcaugaccagcugcuguagcugccugaagggcuguuguagcuguggcagcugcugcaaguucgacgaggacgauucugagcccgugcugaagggcgugaaacugcacuacaccugaggacuaguguccaccugucccuccugggcugcuggauugucucguuuuccugccaaauaaacaggaucagcgcuuuacagaucucaaaggcucuuuucagagccaccaaaaaaaaaaaaaaaaaaaaaaaaaaaaaaaaaaaaaaaaaaaaaaaaaaaaaaaaaaaaaaaaaaaaaaaaaaaaaaaaaaaaaaaaaaaaaaaaaaaaa

SEQ ID NO: 24043 - RNA, 4120 nt, Artificial Sequence
  SARS-CoV-2/Wuhan/WIV05/2019__EPI_ISL_402128 spike protein mRNA gc mod (1-1273)(K986P_V987P_K986P_V987P_L18F_D80A_D215G_L242del_A243del_ L244del_R246I_K417N_E484K_N501Y_D614G_A701V)
aggagacccgugacccggaaguuguacggcuacgcgacuuucccucccacaaacccucgcgcccuuccuuuccuacuugggcccggcagaaagcuuaccauguucguguuucuggugcugcugccccugguguccagccagugugugaacuucaccaccagaacacagcugccuccagccuacaccaacagcuucaccagaggcguguacuaccccgacaagguguucagauccagcgugcugcacucuacccaggaccuguuccugccuuucuucagcaacgugaccugguuccacgccauccacguguccggcaccaauggcaccaagagauucgccaaccccgugcugcccuucaacgacgggguguacuuugccagcaccgagaaguccaacaucaucagaggcuggaucuucggcaccacacuggacagcaagacccagagccugcugaucgugaacaacgccaccaacguggucaucaaagugugcgaguuccaguucugcaacgaccccuuccugggcgucuacuaccacaagaacaacaagagcuggauggaaagcgaguuccggguguacagcagcgccaacaacugcaccuucgaguacgugucccagccuuuccugauggaccuggaaggcaagcagggcaacuucaagaaccugcgcgaguucguguucaagaacaucgacggcuacuucaaaaucuacagcaagcacaccccuaucaaccucgugcggggccugccucagggcuucucugcucuggaaccccugguggaucugcccaucggcaucaacaucacccgguuucagacacugcacaucagcuaccugacaccuggcgauagcagcagcggauggacagcuggugccgccgcuuacuaugugggcuaccugcagccuagaaccuuccugcugaaguacaacgagaacggcaccaucaccgacgccguggauugugcucuggauccucugagcgagacaaagugcacccugaaguccuucaccguggaaaagggcaucuaccagaccagcaacuuccgggugcagcccaccgaauccaucgugcgguuccccaauaucaccaaucugugccccuucggcgagguguucaaugccaccagauucgccucuguguacgccuggaaccggaagcggaucagcaauugcguggccgacuacuccgugcuguacaacuccgccagcuucagcaccuucaagugcuacggcguguccccuaccaagcugaacgaccugugcuucacaaacguguacgccgacagcuucgugauccggggagaugaagugcggcagauugccccuggacagacaggcaacaucgccgacuacaacuacaagcugcccgacgacuucaccggcugugugauugccuggaacagcaacaaccuggacuccaaagucggcggcaacuacaauuaccuguaccggcuguuccggaaguccaaucugaagcccuucgagcgggacaucagcaccgaaaucuaucaggccggcagcaccccuugcaacggcgugaagggcuucaacugcuacuucccacugcaguccuacggcuuucagcccacauacggcgugggcuaucagcccuacagagugguggugcugagcuucgaacugcugcaugcuccugccacagugugcggcccuaagaaaagcaccaaucucgugaagaacaaaugcgugaacuucaacuucaacggccugaccggcaccggcgugcugacagagagcaacaagaaguuccugccauuccagcaguuuggccgggauaucgccgauaccacagacgccguuagagauccccagacacuggaaauccuggacaucaccccaugcagcuucggcggagugucugugaucaccccuggcaccaacaccagcaaucagguggcagugcuguaccagggcgugaacuguaccgaagugcccguggccauucacgccgaucagcugacaccuacauggcggguguacuccaccggcagcaauguguuucagaccagagccggcugucugaucggagccgagcacgugaacaauagcuacgagugcgacauccccaucggcgcuggcaucugugccagcuaccagacacagacaaacagccccagacgggcuagaagcguggccagccagagcaucauugccuacacaaugucucugggcguggagaacagcguggccuacuccaacaacucuaucgcuauccccaccaacuucaccaucagcgugaccaccgagauccugccuguguccaugaccaagaccagcguggacugcaccauguacaucugcggcgauuccaccgagugcuccaaccugcugcugcaguacggcagcuucugcacccagcugaauagagcccugacagggaucgccguggaacaggacaagaacacccaagagguguucgcccaagugaagcaaaucuacaagaccccuccuaucaaggacuucggcggcuucaauuucagccagauucugcccgauccuagcaagcccagcaagcggagcuucaucgaggaccugcuguucaacaaagugacacuggccgacgccggcuucaucaagcaguauggcgauugucugggcgacauugccgccagggaucugauuugcgcccagaaguuuaacggacugacagugcugccuccucugcugaccgaugagaugaucgcccaguacacaucugcccugcuggccggcacaaucacaagcggcuggacauuuggagcuggcgccgcucugcagauccccuuugcuaugcagauggccuaccgguucaacggcaucggagugacccagaaugugcuguacgagaaccagaagcugaucgccaaccaguucaacagcgccaucggcaagauccaggacagccugagcagcacagcaagcgcccugggaaagcugcaggacguggucaaccagaaugcccaggcacugaacacccuggucaagcagcuguccuccaacuucggcgccaucagcucugugcugaacgauauccugagcagacuggacccuccugaggccgaggugcagaucgacagacugaucacaggcagacugcagagccuccagacauacgugacccagcagcugaucagagccgccgagauuagagccucugccaaucuggccgccaccaagaugucugagugugugcugggccagagcaagagaguggacuuuugcggcaagggcuaccaccugaugagcuucccucagucugccccucacggcgugguguuucugcacgugacauaugugcccgcucaagagaagaauuucaccaccgcuccagccaucugccacgacggcaaagcccacuuuccuagagaaggcguguucguguccaacggcacccauugguucgugacacagcggaacuucuacgagccccagaucaucaccaccgacaacaccuucgugucuggcaacugcgacguugugaucggcauugugaacaauaccguguacgacccucugcagcccgagcuggacagcuucaaagaggaacuggacaaguacuuuaagaaccacacaagccccgacguggaccugggcgauaucagcggaaucaaugccagcgucgugaacauccagaaagagaucgaccggcugaacgagguggccaagaaucugaacgagagccugaucgaccugcaagaacuggggaaguacgagcaguacaucaaguggcccugguacaucuggcugggcuuuaucgccggacugauugccaucgugauggucacaaucaugcuguguugcaugaccagcugcuguagcugccugaagggcuguuguagcuguggcagcugcugcaaguucgacgaggacgauucugagcccgugcugaagggcgugaaacugcacuacaccugaggacuaguguccaccugucccuccugggcugcuggauugucucguuuuccugccaaauaaacaggaucagcgcuuuacagaucucaaaggcucuuuucagagccaccaaaaaaaaaaaaaaaaaaaaaaaaaaaaaaaaaaaaaaaaaaaaaaaaaaaaaaaaaaaaaaaaaaaaaaaaaaaaaaaaaaaaaaaaaaaaaaaaaaaaa

SEQ ID NO: 24044 - RNA, 4129 nt, Artificial Sequence
  SARS-CoV-2/Wuhan/WIV05/2019__EPI_ISL_402128 spike protein mRNA gc mod (1-1273)(K986P_V987P_K986P_V987P_E484K_D614G)
aggagacccgugacccggaaguuguacggcuacgcgacuuucccucccacaaacccucgcgcccuuccuuuccuacuugggcccggcagaaagcuuaccauguucguguuucuggugcugcugccccugguguccagccagugugugaaccugaccaccagaacacagcugccuccagccuacaccaacagcuucaccagaggcguguacuaccccgacaagguguucagauccagcgugcugcacucuacccaggaccuguuccugccuuucuucagcaacgugaccugguuccacgccauccacguguccggcaccaauggcaccaagagauucgacaaccccgugcugcccuucaacgacgggguguacuuugccagcaccgagaaguccaacaucaucagaggcuggaucuucggcaccacacuggacagcaagacccagagccugcugaucgugaacaacgccaccaacguggucaucaaagugugcgaguuccaguucugcaacgaccccuuccugggcgucuacuaccacaagaacaacaagagcuggauggaaagcgaguuccggguguacagcagcgccaacaacugcaccuucgaguacgugucccagccuuuccugauggaccuggaaggcaagcagggcaacuucaagaaccugcgcgaguucguguucaagaacaucgacggcuacuucaaaaucuacagcaagcacaccccuaucaaccucgugcgggaucugccucagggcuucucugcucuggaaccccugguggaucugcccaucggcaucaacaucacccgguuucagacacugcuggcccugcacagaagcuaccugacaccuggcgauagcagcagcggauggacagcuggugccgccgcuuacuaugugggcuaccugcagccuagaaccuuccugcugaaguacaacgagaacggcaccaucaccgacgccguggauugugcucuggauccucugagcgagacaaagugcacccugaaguccuucaccguggaaaagggcaucuaccagaccagcaacuuccgggugcagcccaccgaauccaucgugcgguuccccaauaucaccaaucugugccccuucggcgagguguucaaugccaccagauucgccucuguguacgccuggaaccggaagcggaucagcaauugcguggccgacuacuccgugcuguacaacuccgccagcuucagcaccuucaagugcuacggcguguccccuaccaagcugaacgaccugugcuucacaaacguguacgccgacagcuucgugauccggggagaugaagugcggcagauugccccuggacagacaggcaagaucgccgacuacaacuacaagcugcccgacgacuucaccggcugugugauugccuggaacagcaacaaccuggacuccaaagucggcggcaacuacaauuaccuguaccggcuguuccggaaguccaaucugaagcccuucgagcgggacaucagcaccgaaaucuaucaggccggcagcaccccuugcaacggcgugaagggcuucaacugcuacuucccacugcaguccuacggcuuucagcccacaaauggcgugggcuaucagcccuacagagugguggugcugagcuucgaacugcugcaugcuccugccacagugugcggcccuaagaaaagcaccaaucucgugaagaacaaaugcgugaacuucaacuucaacggccugaccggcaccggcgugcugacagagagcaacaagaaguuccugccauuccagcaguuuggccgggauaucgccgauaccacagacgccguuagagauccccagacacuggaaauccuggacaucaccccaugcagcuucggcggagugucugugaucaccccuggcaccaacaccagcaaucagguggcagugcuguaccagggcgugaacuguaccgaagugcccguggccauucacgccgaucagcugacaccuacauggcggguguacuccaccggcagcaauguguuucagaccagagccggcugucugaucggagccgagcacgugaacaauagcuacgagugcgacauccccaucggcgcuggcaucugugccagcuaccagacacagacaaacagccccagacgggcuagaagcguggccagccagagcaucauugccuacacaaugucucugggcgccgagaacagcguggccuacuccaacaacucuaucgcuauccccaccaacuucaccaucagcgugaccaccgagauccugccuguguccaugaccaagaccagcguggacugcaccauguacaucugcggcgauuccaccgagugcuccaaccugcugcugcaguacggcagcuucugcacccagcugaauagagcccugacagggaucgccguggaacaggacaagaacacccaagagguguucgcccaagugaagcaaaucuacaagaccccuccuaucaaggacuucggcggcuucaauuucagccagauucugcccgauccuagcaagcccagcaagcggagcuucaucgaggaccugcuguucaacaaagugacacuggccgacgccggcuucaucaagcaguauggcgauugucugggcgacauugccgccagggaucugauuugcgcccagaaguuuaacggacugacagugcugccuccucugcugaccgaugagaugaucgcccaguacacaucugcccugcuggccggcacaaucacaagcggcuggacauuuggagcuggcgccgcucugcagauccccuuugcuaugcagauggccuaccgguucaacggcaucggagugacccagaaugugcuguacgagaaccagaagcugaucgccaaccaguucaacagcgccaucggcaagauccaggacagccugagcagcacagcaagcgcccugggaaagcugcaggacguggucaaccagaaugcccaggcacugaacacccuggucaagcagcuguccuccaacuucggcgccaucagcucugugcugaacgauauccugagcagacuggacccuccugaggccgaggugcagaucgacagacugaucacaggcagacugcagagccuccagacauacgugacccagcagcugaucagagccgccgagauuagagccucugccaaucuggccgccaccaagaugucugagugugugcugggccagagcaagagaguggacuuuugcggcaagggcuaccaccugaugagcuucccucagucugccccucacggcgugguguuucugcacgugacauaugugcccgcucaagagaagaauuucaccaccgcuccagccaucugccacgacggcaaagcccacuuuccuagagaaggcguguucguguccaacggcacccauugguucgugacacagcggaacuucuacgagccccagaucaucaccaccgacaacaccuucgugucuggcaacugcgacguugugaucggcauugugaacaauaccguguacgacccucugcagcccgagcuggacagcuucaaagaggaacuggacaaguacuuuaagaaccacacaagccccgacguggaccugggcgauaucagcggaaucaaugccagcgucgugaacauccagaaagagaucgaccggcugaacgagguggccaagaaucugaacgagagccugaucgaccugcaagaacuggggaaguacgagcaguacaucaaguggcccugguacaucuggcugggcuuuaucgccggacugauugccaucgugauggucacaaucaugcuguguugcaugaccagcugcuguagcugccugaagggcuguuguagcuguggcagcugcugcaaguucgacgaggacgauucugagcccgugcugaagggcgugaaacugcacuacaccugaggacuaguguccaccugucccuccugggcugcuggauugucucguuuuccugccaaauaaacaggaucagcgcuuuacagaucucaaaggcucuuuucagagccaccaaaaaaaaaaaaaaaaaaaaaaaaaaaaaaaaaaaaaaaaaaaaaaaaaaaaaaaaaaaaaaaaaaaaaaaaaaaaaaaaaaaaaaaaaaaaaaaaaaaaa

SEQ ID NO: 24045 - RNA, 4129 nt, Artificial Sequence
  SARS-CoV-2/Wuhan/WIV05/2019__EPI_ISL_402128 spike protein mRNA gc mod (1-1273)(K986P_V987P_K986P_V987P_L18F_T20N_P26S_D138Y_R190S_K417T _E484K_N501Y_D614G_H655Y_T1027I)
aggagacccgugacccggaaguuguacggcuacgcgacuuucccucccacaaacccucgcgcccuuccuuuccuacuugggcccggcagaaagcuuaccauguucguguuucuggugcugcugccccugguguccagccagugugugaacuucaccaacagaacacagcugccuagcgccuacaccaacagcuucaccagaggcguguacuaccccgacaagguguucagauccagcgugcugcacucuacccaggaccuguuccugccuuucuucagcaacgugaccugguuccacgccauccacguguccggcaccaauggcaccaagagauucgacaaccccgugcugcccuucaacgacgggguguacuuugccagcaccgagaaguccaacaucaucagaggcuggaucuucggcaccacacuggacagcaagacccagagccugcugaucgugaacaacgccaccaacguggucaucaaagugugcgaguuccaguucugcaacuaccccuuccugggcgucuacuaccacaagaacaacaagagcuggauggaaagcgaguuccggguguacagcagcgccaacaacugcaccuucgaguacgugucccagccuuuccugauggaccuggaaggcaagcagggcaacuucaagaaccugagcgaguucguguucaagaacaucgacggcuacuucaaaaucuacagcaagcacaccccuaucaaccucgugcgggaucugccucagggcuucucugcucuggaaccccugguggaucugcccaucggcaucaacaucacccgguuucagacacugcuggcccugcacagaagcuaccugacaccuggcgauagcagcagcggauggacagcuggugccgccgcuuacuaugugggcuaccugcagccuagaaccuuccugcugaaguacaacgagaacggcaccaucaccgacgccguggauugugcucuggauccucugagcgagacaaagugcacccugaaguccuucaccguggaaaagggcaucuaccagaccagcaacuuccgggugcagcccaccgaauccaucgugcgguuccccaauaucaccaaucugugccccuucggcgagguguucaaugccaccagauucgccucuguguacgccuggaaccggaagcggaucagcaauugcguggccgacuacuccgugcuguacaacuccgccagcuucagcaccuucaagugcuacggcguguccccuaccaagcugaacgaccugugcuucacaaacguguacgccgacagcuucgugauccggggagaugaagugcggcagauugccccuggacagacaggcaccaucgccgacuacaacuacaagcugcccgacgacuucaccggcugugugauugccuggaacagcaacaaccuggacuccaaagucggcggcaacuacaauuaccuguaccggcuguuccggaaguccaaucugaagcccuucgagcgggacaucagcaccgaaaucuaucaggccggcagcaccccuugcaacggcgugaagggcuucaacugcuacuucccacugcaguccuacggcuuucagcccacauacggcgugggcuaucagcccuacagagugguggugcugagcuucgaacugcugcaugcuccugccacagugugcggcccuaagaaaagcaccaaucucgugaagaacaaaugcgugaacuucaacuucaacggccugaccggcaccggcgugcugacagagagcaacaagaaguuccugccauuccagcaguuuggccgggauaucgccgauaccacagacgccguuagagauccccagacacuggaaauccuggacaucaccccaugcagcuucggcggagugucugugaucaccccuggcaccaacaccagcaaucagguggcagugcuguaccagggcgugaacuguaccgaagugcccguggccauucacgccgaucagcugacaccuacauggcggguguacuccaccggcagcaauguguuucagaccagagccggcugucugaucggagccgaguacgugaacaauagcuacgagugcgacauccccaucggcgcuggcaucugugccagcuaccagacacagacaaacagccccagacgggcuagaagcguggccagccagagcaucauugccuacacaaugucucugggcgccgagaacagcguggccuacuccaacaacucuaucgcuauccccaccaacuucaccaucagcgugaccaccgagauccugccuguguccaugaccaagaccagcguggacugcaccauguacaucugcggcgauuccaccgagugcuccaaccugcugcugcaguacggcagcuucugcacccagcugaauagagcccugacagggaucgccguggaacaggacaagaacacccaagagguguucgcccaagugaagcaaaucuacaagaccccuccuaucaaggacuucggcggcuucaauuucagccagauucugcccgauccuagcaagcccagcaagcggagcuucaucgaggaccugcuguucaacaaagugacacuggccgacgccggcuucaucaagcaguauggcgauugucugggcgacauugccgccagggaucugauuugcgcccagaaguuuaacggacugacagugcugccuccucugcugaccgaugagaugaucgcccaguacacaucugcccugcuggccggcacaaucacaagcggcuggacauuuggagcuggcgccgcucugcagauccccuuugcuaugcagauggccuaccgguucaacggcaucggagugacccagaaugugcuguacgagaaccagaagcugaucgccaaccaguucaacagcgccaucggcaagauccaggacagccugagcagcacagcaagcgcccugggaaagcugcaggacguggucaaccagaaugcccaggcacugaacacccuggucaagcagcuguccuccaacuucggcgccaucagcucugugcugaacgauauccugagcagacuggacccuccugaggccgaggugcagaucgacagacugaucacaggcagacugcagagccuccagacauacgugacccagcagcugaucagagccgccgagauuagagccucugccaaucuggccgccaucaagaugucugagugugugcugggccagagcaagagaguggacuuuugcggcaagggcuaccaccugaugagcuucccucagucugccccucacggcgugguguuucugcacgugacauaugugcccgcucaagagaagaauuucaccaccgcuccagccaucugccacgacggcaaagcccacuuuccuagagaaggcguguucguguccaacggcacccauugguucgugacacagcggaacuucuacgagccccagaucaucaccaccgacaacaccuucgugucuggcaacugcgacguugugaucggcauugugaacaauaccguguacgacccucugcagcccgagcuggacagcuucaaagaggaacuggacaaguacuuuaagaaccacacaagccccgacguggaccugggcgauaucagcggaaucaaugccagcgucgugaacauccagaaagagaucgaccggcugaacgagguggccaagaaucugaacgagagccugaucgaccugcaagaacuggggaaguacgagcaguacaucaaguggcccugguacaucuggcugggcuuuaucgccggacugauugccaucgugauggucacaaucaugcuguguugcaugaccagcugcuguagcugccugaagggcuguuguagcuguggcagcugcugcaaguucgacgaggacgauucugagcccgugcugaagggcgugaaacugcacuacaccugaggacuaguguccaccugucccuccugggcugcuggauugucucguuuuccugccaaauaaacaggaucagcgcuuuacagaucucaaaggcucuuuucagagccaccaaaaaaaaaaaaaaaaaaaaaaaaaaaaaaaaaaaaaaaaaaaaaaaaaaaaaaaaaaaaaaaaaaaaaaaaaaaaaaaaaaaaaaaaaaaaaaaaaaaaa

SEQ ID NO: 24046 - RNA, 4129 nt, Artificial Sequence
  SARS-CoV-2/Wuhan/WIV05/2019__EPI_ISL_402128 spike protein mRNA gc mod (1-1273)(K986P_V987P_K986P_V987P_S13I_W152C_L452R_D614G)
aggagacccgugacccggaaguuguacggcuacgcgacuuucccucccacaaacccucgcgcccuuccuuuccuacuugggcccggcagaaagcuuaccauguucguguuucuggugcugcugccccugguguccauccagugugugaaccugaccaccagaacacagcugccuccagccuacaccaacagcuucaccagaggcguguacuaccccgacaagguguucagauccagcgugcugcacucuacccaggaccuguuccugccuuucuucagcaacgugaccugguuccacgccauccacguguccggcaccaauggcaccaagagauucgacaaccccgugcugcccuucaacgacgggguguacuuugccagcaccgagaaguccaacaucaucagaggcuggaucuucggcaccacacuggacagcaagacccagagccugcugaucgugaacaacgccaccaacguggucaucaaagugugcgaguuccaguucugcaacgaccccuuccugggcgucuacuaccacaagaacaacaagagcugcauggaaagcgaguuccggguguacagcagcgccaacaacugcaccuucgaguacgugucccagccuuuccugauggaccuggaaggcaagcagggcaacuucaagaaccugcgcgaguucguguucaagaacaucgacggcuacuucaaaaucuacagcaagcacaccccuaucaaccucgugcgggaucugccucagggcuucucugcucuggaaccccugguggaucugcccaucggcaucaacaucacccgguuucagacacugcuggcccugcacagaagcuaccugacaccuggcgauagcagcagcggauggacagcuggugccgccgcuuacuaugugggcuaccugcagccuagaaccuuccugcugaaguacaacgagaacggcaccaucaccgacgccguggauugugcucuggauccucugagcgagacaaagugcacccugaaguccuucaccguggaaaagggcaucuaccagaccagcaacuuccgggugcagcccaccgaauccaucgugcgguuccccaauaucaccaaucugugccccuucggcgagguguucaaugccaccagauucgccucuguguacgccuggaaccggaagcggaucagcaauugcguggccgacuacuccgugcuguacaacuccgccagcuucagcaccuucaagugcuacggcguguccccuaccaagcugaacgaccugugcuucacaaacguguacgccgacagcuucgugauccggggagaugaagugcggcagauugccccuggacagacaggcaagaucgccgacuacaacuacaagcugcccgacgacuucaccggcugugugauugccuggaacagcaacaaccuggacuccaaagucggcggcaacuacaauuaccgcuaccggcuguuccggaaguccaaucugaagcccuucgagcgggacaucagcaccgaaaucuaucaggccggcagcaccccuugcaacggcguggaaggcuucaacugcuacuucccacugcaguccuacggcuuucagcccacaaauggcgugggcuaucagcccuacagagugguggugcugagcuucgaacugcugcaugcuccugccacagugugcggcccuaagaaaagcaccaaucucgugaagaacaaaugcgugaacuucaacuucaacggccugaccggcaccggcgugcugacagagagcaacaagaaguuccugccauuccagcaguuuggccgggauaucgccgauaccacagacgccguuagagauccccagacacuggaaauccuggacaucaccccaugcagcuucggcggagugucugugaucaccccuggcaccaacaccagcaaucagguggcagugcuguaccagggcgugaacuguaccgaagugcccguggccauucacgccgaucagcugacaccuacauggcggguguacuccaccggcagcaauguguuucagaccagagccggcugucugaucggagccgagcacgugaacaauagcuacgagugcgacauccccaucggcgcuggcaucugugccagcuaccagacacagacaaacagccccagacgggcuagaagcguggccagccagagcaucauugccuacacaaugucucugggcgccgagaacagcguggccuacuccaacaacucuaucgcuauccccaccaacuucaccaucagcgugaccaccgagauccugccuguguccaugaccaagaccagcguggacugcaccauguacaucugcggcgauuccaccgagugcuccaaccugcugcugcaguacggcagcuucugcacccagcugaauagagcccugacagggaucgccguggaacaggacaagaacacccaagagguguucgcccaagugaagcaaaucuacaagaccccuccuaucaaggacuucggcggcuucaauuucagccagauucugcccgauccuagcaagcccagcaagcggagcuucaucgaggaccugcuguucaacaaagugacacuggccgacgccggcuucaucaagcaguauggcgauugucugggcgacauugccgccagggaucugauuugcgcccagaaguuuaacggacugacagugcugccuccucugcugaccgaugagaugaucgcccaguacacaucugcccugcuggccggcacaaucacaagcggcuggacauuuggagcuggcgccgcucugcagauccccuuugcuaugcagauggccuaccgguucaacggcaucggagugacccagaaugugcuguacgagaaccagaagcugaucgccaaccaguucaacagcgccaucggcaagauccaggacagccugagcagcacagcaagcgcccugggaaagcugcaggacguggucaaccagaaugcccaggcacugaacacccuggucaagcagcuguccuccaacuucggcgccaucagcucugugcugaacgauauccugagcagacuggacccuccugaggccgaggugcagaucgacagacugaucacaggcagacugcagagccuccagacauacgugacccagcagcugaucagagccgccgagauuagagccucugccaaucuggccgccaccaagaugucugagugugugcugggccagagcaagagaguggacuuuugcggcaagggcuaccaccugaugagcuucccucagucugccccucacggcgugguguuucugcacgugacauaugugcccgcucaagagaagaauuucaccaccgcuccagccaucugccacgacggcaaagcccacuuuccuagagaaggcguguucguguccaacggcacccauugguucgugacacagcggaacuucuacgagccccagaucaucaccaccgacaacaccuucgugucuggcaacugcgacguugugaucggcauugugaacaauaccguguacgacccucugcagcccgagcuggacagcuucaaagaggaacuggacaaguacuuuaagaaccacacaagccccgacguggaccugggcgauaucagcggaaucaaugccagcgucgugaacauccagaaagagaucgaccggcugaacgagguggccaagaaucugaacgagagccugaucgaccugcaagaacuggggaaguacgagcaguacaucaaguggcccugguacaucuggcugggcuuuaucgccggacugauugccaucgugauggucacaaucaugcuguguugcaugaccagcugcuguagcugccugaagggcuguuguagcuguggcagcugcugcaaguucgacgaggacgauucugagcccgugcugaagggcgugaaacugcacuacaccugaggacuaguguccaccugucccuccugggcugcuggauugucucguuuuccugccaaauaaacaggaucagcgcuuuacagaucucaaaggcucuuuucagagccaccaaaaaaaaaaaaaaaaaaaaaaaaaaaaaaaaaaaaaaaaaaaaaaaaaaaaaaaaaaaaaaaaaaaaaaaaaaaaaaaaaaaaaaaaaaaaaaaaaaaaa

SEQ ID NO: 24047 - RNA, 4129 nt, Artificial Sequence
  SARS-CoV-2/Wuhan/WIV05/2019__EPI_ISL_402128 spike protein mRNA gc mod (1-1273)(K986P_V987P)
aggagacccgugacccggaaguuguacggcuacgcgacuuucccucccacaaacccucgcgcccuuccuuuccuacuugggcccggcagaaagcuuaccauguucguguuccuggugcugcugccucugguguccagccagugugugaaccugaccaccagaacacagcugccuccagccuacaccaacagcuuuaccagaggcguguacuaccccgacaagguguucagauccagcgugcugcacucuacccaggaccuguuccugccuuucuucagcaacgugaccugguuccacgccauccacguguccggcaccaauggcaccaagagauucgacaaccccgugcugcccuucaacgacgggguguacuuugccagcaccgagaaguccaacaucaucagaggcuggaucuucggcaccacacuggacagcaagacccagagccugcugaucgugaacaacgccaccaacguggucaucaaagugugcgaguuccaguucugcaacgaccccuuccugggcgucuacuaccacaagaacaacaagagcuggauggaaagcgaguuccggguguacagcagcgccaacaacugcaccuucgaguacgugucccagccuuuccugauggaccuggaaggcaagcagggcaacuucaagaaccugcgcgaguucguguuuaagaacaucgacggcuacuucaagaucuacagcaagcacaccccuaucaaccucgugcgggaucugccucagggcuucucugcucuggaaccccugguggaucugcccaucggcaucaacaucacccgguuucagacacugcuggcccugcacagaagcuaccugacaccuggcgauagcagcagcggauggacagcuggugccgccgcuuacuaugugggcuaccugcagccuagaaccuuccugcugaaguacaacgagaacggcaccaucaccgacgccguggauugugcucuggauccucugagcgagacaaagugcacccugaaguccuucaccguggaaaagggcaucuaccagaccagcaacuuccgggugcagcccaccgaauccaucgugcgguuccccaauaucaccaaucugugccccuucggcgagguguucaaugccaccagauucgccucuguguacgccuggaaccggaagcggaucagcaauugcguggccgacuacuccgugcuguacaacuccgccagcuucagcaccuucaagugcuacggcguguccccuaccaagcugaacgaccugugcuucacaaacguguacgccgacagcuucgugauccggggagaugaagugcggcagauugccccuggacagacaggcaagaucgccgacuacaacuacaagcugcccgacgacuucaccggcugugugauugccuggaacagcaacaaccuggacuccaaagucggcggcaacuacaauuaccuguaccggcuguuccggaaguccaaucugaagcccuucgagcgggacaucuccaccgagaucuaucaggccggcagcaccccuuguaacggcguggaaggcuucaacugcuacuucccacugcaguccuacggcuuucagcccacaaauggcgugggcuaucagcccuacagagugguggugcugagcuucgaacugcugcaugccccugccacagugugcggcccuaagaaaagcaccaaucucgugaagaacaaaugcgugaacuucaacuucaacggccugaccggcaccggcgugcugacagagagcaacaagaaguuccugccauuccagcaguuuggccgggauaucgccgauaccacagacgccguuagagauccccagacacuggaaauccuggacaucaccccuugcagcuucggcggagugucugugaucaccccuggcaccaacaccagcaaucagguggcagugcuguaccaggacgugaacuguaccgaagugcccguggccauucacgccgaucagcugacaccuacauggcggguguacuccaccggcagcaauguguuucagaccagagccggcugucugaucggagccgagcacgugaacaauagcuacgagugcgacauccccaucggcgcuggaaucugcgccagcuaccagacacagacaaacagcccucggagagccagaagcguggccagccagagcaucauugccuacacaaugucucugggcgccgagaacagcguggccuacuccaacaacucuaucgcuauccccaccaacuucaccaucagcgugaccacagagauccugccuguguccaugaccaagaccagcguggacugcaccauguacaucugcggcgauuccaccgagugcuccaaccugcugcugcaguacggcagcuucugcacccagcugaauagagcccugacagggaucgccguggaacaggacaagaacacccaagagguguucgcccaagugaagcagaucuacaagaccccuccuaucaaggacuucggcggcuucaauuucagccagauucugcccgauccuagcaagcccagcaagcggagcuucaucgaggaccugcuguucaacaaagugacacuggccgacgccggcuucaucaagcaguauggcgauugucugggcgacauugccgccagggaucugauuugcgcccagaaguuuaacggacugacagugcugccuccucugcugaccgaugagaugaucgcccaguacacaucugcccugcuggccggcacaaucacaagcggcuggacauuuggagcaggcgccgcucugcagauccccuuugcuaugcagauggccuaccgguucaacggcaucggagugacccagaaugugcuguacgagaaccagaagcugaucgccaaccaguucaacagcgccaucggcaagauccaggacagccugagcagcacagcaagcgcccugggaaagcugcaggacguggucaaccagaaugcccaggcacugaacacccuggucaagcagcuguccuccaacuucggcgccaucagcucugugcugaacgauauccugagcagacuggacccuccugaggccgaggugcagaucgacagacugaucacaggcagacugcagagccuccagacauacgugacccagcagcugaucagagccgccgagauuagagccucugccaaucuggccgccaccaagaugucugagugugugcugggccagagcaagagaguggacuuuugcggcaagggcuaccaccugaugagcuucccucagucugccccucacggcgugguguuucugcacgugacauaugugcccgcucaagagaagaauuucaccaccgcuccagccaucugccacgacggcaaagcccacuuuccuagagaaggcguguucguguccaacggcacccauugguucgugacacagcggaacuucuacgagccccagaucaucaccaccgacaacaccuucgugucuggcaacugcgacgucgugaucggcauugugaacaauaccguguacgacccucugcagcccgagcuggacagcuucaaagaggaacuggacaaguacuuuaagaaccacacaagccccgacguggaccugggcgauaucagcggaaucaaugccagcgucgugaacauccagaaagagaucgaccggcugaacgagguggccaagaaucugaacgagagccugaucgaccugcaagaacuggggaaguacgagcaguacaucaaguggcccugguacaucuggcugggcuuuaucgccggacugauugccaucgugauggucacaaucaugcuguguugcaugaccagcugcuguagcugccugaagggcuguuguagcuguggcagcugcugcaaguucgacgaggacgauucugagcccgugcugaagggcgugaaacugcacuacacaugaggacuaguguccaccugucccuccugggcugcuggauugucucguuuuccugccaaauaaacaggaucagcgcuuuacagaucucaaaggcucuuuucagagccaccaaaaaaaaaaaaaaaaaaaaaaaaaaaaaaaaaaaaaaaaaaaaaaaaaaaaaaaaaaaaaaaaaaaaaaaaaaaaaaaaaaaaaaaaaaaaaaaaaaaaa

SEQ ID NO: 24048 - RNA, 4129 nt, Artificial Sequence
  SARS-CoV-2/Wuhan/WIV05/2019__EPI_ISL_402128 spike protein mRNA gc mod (1-1273)(K986P_V987P_ D614G)
aggagacccgugacccggaaguuguacggcuacgcgacuuucccucccacaaacccucgcgcccuuccuuuccuacuugggcccggcagaaagcuuaccauguucguguuccuggugcugcugccucugguguccagccagugugugaaccugaccaccagaacacagcugccuccagccuacaccaacagcuuuaccagaggcguguacuaccccgacaagguguucagauccagcgugcugcacucuacccaggaccuguuccugccuuucuucagcaacgugaccugguuccacgccauccacguguccggcaccaauggcaccaagagauucgacaaccccgugcugcccuucaacgacgggguguacuuugccagcaccgagaaguccaacaucaucagaggcuggaucuucggcaccacacuggacagcaagacccagagccugcugaucgugaacaacgccaccaacguggucaucaaagugugcgaguuccaguucugcaacgaccccuuccugggcgucuacuaccacaagaacaacaagagcuggauggaaagcgaguuccggguguacagcagcgccaacaacugcaccuucgaguacgugucccagccuuuccugauggaccuggaaggcaagcagggcaacuucaagaaccugcgcgaguucguguuuaagaacaucgacggcuacuucaagaucuacagcaagcacaccccuaucaaccucgugcgggaucugccucagggcuucucugcucuggaaccccugguggaucugcccaucggcaucaacaucacccgguuucagacacugcuggcccugcacagaagcuaccugacaccuggcgauagcagcagcggauggacagcuggugccgccgcuuacuaugugggcuaccugcagccuagaaccuuccugcugaaguacaacgagaacggcaccaucaccgacgccguggauugugcucuggauccucugagcgagacaaagugcacccugaaguccuucaccguggaaaagggcaucuaccagaccagcaacuuccgggugcagcccaccgaauccaucgugcgguuccccaauaucaccaaucugugccccuucggcgagguguucaaugccaccagauucgccucuguguacgccuggaaccggaagcggaucagcaauugcguggccgacuacuccgugcuguacaacuccgccagcuucagcaccuucaagugcuacggcguguccccuaccaagcugaacgaccugugcuucacaaacguguacgccgacagcuucgugauccggggagaugaagugcggcagauugccccuggacagacaggcaagaucgccgacuacaacuacaagcugcccgacgacuucaccggcugugugauugccuggaacagcaacaaccuggacuccaaagucggcggcaacuacaauuaccuguaccggcuguuccggaaguccaaucugaagcccuucgagcgggacaucuccaccgagaucuaucaggccggcagcaccccuuguaacggcguggaaggcuucaacugcuacuucccacugcaguccuacggcuuucagcccacaaauggcgugggcuaucagcccuacagagugguggugcugagcuucgaacugcugcaugccccugccacagugugcggcccuaagaaaagcaccaaucucgugaagaacaaaugcgugaacuucaacuucaacggccugaccggcaccggcgugcugacagagagcaacaagaaguuccugccauuccagcaguuuggccgggauaucgccgauaccacagacgccguuagagauccccagacacuggaaauccuggacaucaccccuugcagcuucggcggagugucugugaucaccccuggcaccaacaccagcaaucagguggcagugcuguaccagggcgugaacuguaccgaagugcccguggccauucacgccgaucagcugacaccuacauggcggguguacuccaccggcagcaauguguuucagaccagagccggcugucugaucggagccgagcacgugaacaauagcuacgagugcgacauccccaucggcgcuggaaucugcgccagcuaccagacacagacaaacagcccucggagagccagaagcguggccagccagagcaucauugccuacacaaugucucugggcgccgagaacagcguggccuacuccaacaacucuaucgcuauccccaccaacuucaccaucagcgugaccacagagauccugccuguguccaugaccaagaccagcguggacugcaccauguacaucugcggcgauuccaccgagugcuccaaccugcugcugcaguacggcagcuucugcacccagcugaauagagcccugacagggaucgccguggaacaggacaagaacacccaagagguguucgcccaagugaagcagaucuacaagaccccuccuaucaaggacuucggcggcuucaauuucagccagauucugcccgauccuagcaagcccagcaagcggagcuucaucgaggaccugcuguucaacaaagugacacuggccgacgccggcuucaucaagcaguauggcgauugucugggcgacauugccgccagggaucugauuugcgcccagaaguuuaacggacugacagugcugccuccucugcugaccgaugagaugaucgcccaguacacaucugcccugcuggccggcacaaucacaagcggcuggacauuuggagcaggcgccgcucugcagauccccuuugcuaugcagauggccuaccgguucaacggcaucggagugacccagaaugugcuguacgagaaccagaagcugaucgccaaccaguucaacagcgccaucggcaagauccaggacagccugagcagcacagcaagcgcccugggaaagcugcaggacguggucaaccagaaugcccaggcacugaacacccuggucaagcagcuguccuccaacuucggcgccaucagcucugugcugaacgauauccugagcagacuggacccuccugaggccgaggugcagaucgacagacugaucacaggcagacugcagagccuccagacauacgugacccagcagcugaucagagccgccgagauuagagccucugccaaucuggccgccaccaagaugucugagugugugcugggccagagcaagagaguggacuuuugcggcaagggcuaccaccugaugagcuucccucagucugccccucacggcgugguguuucugcacgugacauaugugcccgcucaagagaagaauuucaccaccgcuccagccaucugccacgacggcaaagcccacuuuccuagagaaggcguguucguguccaacggcacccauugguucgugacacagcggaacuucuacgagccccagaucaucaccaccgacaacaccuucgugucuggcaacugcgacgucgugaucggcauugugaacaauaccguguacgacccucugcagcccgagcuggacagcuucaaagaggaacuggacaaguacuuuaagaaccacacaagccccgacguggaccugggcgauaucagcggaaucaaugccagcgucgugaacauccagaaagagaucgaccggcugaacgagguggccaagaaucugaacgagagccugaucgaccugcaagaacuggggaaguacgagcaguacaucaaguggcccugguacaucuggcugggcuuuaucgccggacugauugccaucgugauggucacaaucaugcuguguugcaugaccagcugcuguagcugccugaagggcuguuguagcuguggcagcugcugcaaguucgacgaggacgauucugagcccgugcugaagggcgugaaacugcacuacacaugaggacuaguguccaccugucccuccugggcugcuggauugucucguuuuccugccaaauaaacaggaucagcgcuuuacagaucucaaaggcucuuuucagagccaccaaaaaaaaaaaaaaaaaaaaaaaaaaaaaaaaaaaaaaaaaaaaaaaaaaaaaaaaaaaaaaaaaaaaaaaaaaaaaaaaaaaaaaaaaaaaaaaaaaaaa

SEQ ID NO: 24049 - RNA, 4129 nt, Artificial Sequence
  SARS-CoV-2/Wuhan/WIV05/2019__EPI_ISL_402128 spike protein mRNA gc mod (1-1273)(K986P_V987P_A222V_D614G)
aggagacccgugacccggaaguuguacggcuacgcgacuuucccucccacaaacccucgcgcccuuccuuuccuacuugggcccggcagaaagcuuaccauguucguguuccuggugcugcugccucugguguccagccagugugugaaccugaccaccagaacacagcugccuccagccuacaccaacagcuuuaccagaggcguguacuaccccgacaagguguucagauccagcgugcugcacucuacccaggaccuguuccugccuuucuucagcaacgugaccugguuccacgccauccacguguccggcaccaauggcaccaagagauucgacaaccccgugcugcccuucaacgacgggguguacuuugccagcaccgagaaguccaacaucaucagaggcuggaucuucggcaccacacuggacagcaagacccagagccugcugaucgugaacaacgccaccaacguggucaucaaagugugcgaguuccaguucugcaacgaccccuuccugggcgucuacuaccacaagaacaacaagagcuggauggaaagcgaguuccggguguacagcagcgccaacaacugcaccuucgaguacgugucccagccuuuccugauggaccuggaaggcaagcagggcaacuucaagaaccugcgcgaguucguguuuaagaacaucgacggcuacuucaagaucuacagcaagcacaccccuaucaaccucgugcgggaucugccucagggcuucucugugcuggaaccccugguggaucugcccaucggcaucaacaucacccgguuucagacacugcuggcccugcacagaagcuaccugacaccuggcgauagcagcagcggauggacagcuggugccgccgcuuacuaugugggcuaccugcagccuagaaccuuccugcugaaguacaacgagaacggcaccaucaccgacgccguggauugugcucuggauccucugagcgagacaaagugcacccugaaguccuucaccguggaaaagggcaucuaccagaccagcaacuuccgggugcagcccaccgaauccaucgugcgguuccccaauaucaccaaucugugccccuucggcgagguguucaaugccaccagauucgccucuguguacgccuggaaccggaagcggaucagcaauugcguggccgacuacuccgugcuguacaacuccgccagcuucagcaccuucaagugcuacggcguguccccuaccaagcugaacgaccugugcuucacaaacguguacgccgacagcuucgugauccggggagaugaagugcggcagauugccccuggacagacaggcaagaucgccgacuacaacuacaagcugcccgacgacuucaccggcugugugauugccuggaacagcaacaaccuggacuccaaagucggcggcaacuacaauuaccuguaccggcuguuccggaaguccaaucugaagcccuucgagcgggacaucuccaccgagaucuaucaggccggcagcaccccuuguaacggcguggaaggcuucaacugcuacuucccacugcaguccuacggcuuucagcccacaaauggcgugggcuaucagcccuacagagugguggugcugagcuucgaacugcugcaugccccugccacagugugcggcccuaagaaaagcaccaaucucgugaagaacaaaugcgugaacuucaacuucaacggccugaccggcaccggcgugcugacagagagcaacaagaaguuccugccauuccagcaguuuggccgggauaucgccgauaccacagacgccguuagagauccccagacacuggaaauccuggacaucaccccuugcagcuucggcggagugucugugaucaccccuggcaccaacaccagcaaucagguggcagugcuguaccagggcgugaacuguaccgaagugcccguggccauucacgccgaucagcugacaccuacauggcggguguacuccaccggcagcaauguguuucagaccagagccggcugucugaucggagccgagcacgugaacaauagcuacgagugcgacauccccaucggcgcuggaaucugcgccagcuaccagacacagacaaacagcccucggagagccagaagcguggccagccagagcaucauugccuacacaaugucucugggcgccgagaacagcguggccuacuccaacaacucuaucgcuauccccaccaacuucaccaucagcgugaccacagagauccugccuguguccaugaccaagaccagcguggacugcaccauguacaucugcggcgauuccaccgagugcuccaaccugcugcugcaguacggcagcuucugcacccagcugaauagagcccugacagggaucgccguggaacaggacaagaacacccaagagguguucgcccaagugaagcagaucuacaagaccccuccuaucaaggacuucggcggcuucaauuucagccagauucugcccgauccuagcaagcccagcaagcggagcuucaucgaggaccugcuguucaacaaagugacacuggccgacgccggcuucaucaagcaguauggcgauugucugggcgacauugccgccagggaucugauuugcgcccagaaguuuaacggacugacagugcugccuccucugcugaccgaugagaugaucgcccaguacacaucugcccugcuggccggcacaaucacaagcggcuggacauuuggagcaggcgccgcucugcagauccccuuugcuaugcagauggccuaccgguucaacggcaucggagugacccagaaugugcuguacgagaaccagaagcugaucgccaaccaguucaacagcgccaucggcaagauccaggacagccugagcagcacagcaagcgcccugggaaagcugcaggacguggucaaccagaaugcccaggcacugaacacccuggucaagcagcuguccuccaacuucggcgccaucagcucugugcugaacgauauccugagcagacuggacccuccugaggccgaggugcagaucgacagacugaucacaggcagacugcagagccuccagacauacgugacccagcagcugaucagagccgccgagauuagagccucugccaaucuggccgccaccaagaugucugagugugugcugggccagagcaagagaguggacuuuugcggcaagggcuaccaccugaugagcuucccucagucugccccucacggcgugguguuucugcacgugacauaugugcccgcucaagagaagaauuucaccaccgcuccagccaucugccacgacggcaaagcccacuuuccuagagaaggcguguucguguccaacggcacccauugguucgugacacagcggaacuucuacgagccccagaucaucaccaccgacaacaccuucgugucuggcaacugcgacgucgugaucggcauugugaacaauaccguguacgacccucugcagcccgagcuggacagcuucaaagaggaacuggacaaguacuuuaagaaccacacaagccccgacguggaccugggcgauaucagcggaaucaaugccagcgucgugaacauccagaaagagaucgaccggcugaacgagguggccaagaaucugaacgagagccugaucgaccugcaagaacuggggaaguacgagcaguacaucaaguggcccugguacaucuggcugggcuuuaucgccggacugauugccaucgugauggucacaaucaugcuguguugcaugaccagcugcuguagcugccugaagggcuguuguagcuguggcagcugcugcaaguucgacgaggacgauucugagcccgugcugaagggcgugaaacugcacuacacaugaggacuaguguccaccugucccuccugggcugcuggauugucucguuuuccugccaaauaaacaggaucagcgcuuuacagaucucaaaggcucuuuucagagccaccaaaaaaaaaaaaaaaaaaaaaaaaaaaaaaaaaaaaaaaaaaaaaaaaaaaaaaaaaaaaaaaaaaaaaaaaaaaaaaaaaaaaaaaaaaaaaaaaaaaaa

SEQ ID NO: 24050 - RNA, 4129 nt, Artificial Sequence
  SARS-CoV-2/Wuhan/WIV05/2019__EPI_ISL_402128 spike protein mRNA gc mod (1-1273)(K986P_V987P_N439K_D614G)
aggagacccgugacccggaaguuguacggcuacgcgacuuucccucccacaaacccucgcgcccuuccuuuccuacuugggcccggcagaaagcuuaccauguucguguuccuggugcugcugccucugguguccagccagugugugaaccugaccaccagaacacagcugccuccagccuacaccaacagcuuuaccagaggcguguacuaccccgacaagguguucagauccagcgugcugcacucuacccaggaccuguuccugccuuucuucagcaacgugaccugguuccacgccauccacguguccggcaccaauggcaccaagagauucgacaaccccgugcugcccuucaacgacgggguguacuuugccagcaccgagaaguccaacaucaucagaggcuggaucuucggcaccacacuggacagcaagacccagagccugcugaucgugaacaacgccaccaacguggucaucaaagugugcgaguuccaguucugcaacgaccccuuccugggcgucuacuaccacaagaacaacaagagcuggauggaaagcgaguuccggguguacagcagcgccaacaacugcaccuucgaguacgugucccagccuuuccugauggaccuggaaggcaagcagggcaacuucaagaaccugcgcgaguucguguuuaagaacaucgacggcuacuucaagaucuacagcaagcacaccccuaucaaccucgugcgggaucugccucagggcuucucugcucuggaaccccugguggaucugcccaucggcaucaacaucacccgguuucagacacugcuggcccugcacagaagcuaccugacaccuggcgauagcagcagcggauggacagcuggugccgccgcuuacuaugugggcuaccugcagccuagaaccuuccugcugaaguacaacgagaacggcaccaucaccgacgccguggauugugcucuggauccucugagcgagacaaagugcacccugaaguccuucaccguggaaaagggcaucuaccagaccagcaacuuccgggugcagcccaccgaauccaucgugcgguuccccaauaucaccaaucugugccccuucggcgagguguucaaugccaccagauucgccucuguguacgccuggaaccggaagcggaucagcaauugcguggccgacuacuccgugcuguacaacuccgccagcuucagcaccuucaagugcuacggcguguccccuaccaagcugaacgaccugugcuucacaaacguguacgccgacagcuucgugauccggggagaugaagugcggcagauugccccuggacagacaggcaagaucgccgacuacaacuacaagcugcccgacgacuucaccggcugugugauugccuggaacagcaagaaccuggacuccaaagucggcggcaacuacaauuaccuguaccggcuguuccggaaguccaaucugaagcccuucgagcgggacaucuccaccgagaucuaucaggccggcagcaccccuuguaacggcguggaaggcuucaacugcuacuucccacugcaguccuacggcuuucagcccacaaauggcgugggcuaucagcccuacagagugguggugcugagcuucgaacugcugcaugccccugccacagugugcggcccuaagaaaagcaccaaucucgugaagaacaaaugcgugaacuucaacuucaacggccugaccggcaccggcgugcugacagagagcaacaagaaguuccugccauuccagcaguuuggccgggauaucgccgauaccacagacgccguuagagauccccagacacuggaaauccuggacaucaccccuugcagcuucggcggagugucugugaucaccccuggcaccaacaccagcaaucagguggcagugcuguaccagggcgugaacuguaccgaagugcccguggccauucacgccgaucagcugacaccuacauggcggguguacuccaccggcagcaauguguuucagaccagagccggcugucugaucggagccgagcacgugaacaauagcuacgagugcgacauccccaucggcgcuggaaucugcgccagcuaccagacacagacaaacagcccucggagagccagaagcguggccagccagagcaucauugccuacacaaugucucugggcgccgagaacagcguggccuacuccaacaacucuaucgcuauccccaccaacuucaccaucagcgugaccacagagauccugccuguguccaugaccaagaccagcguggacugcaccauguacaucugcggcgauuccaccgagugcuccaaccugcugcugcaguacggcagcuucugcacccagcugaauagagcccugacagggaucgccguggaacaggacaagaacacccaagagguguucgcccaagugaagcagaucuacaagaccccuccuaucaaggacuucggcggcuucaauuucagccagauucugcccgauccuagcaagcccagcaagcggagcuucaucgaggaccugcuguucaacaaagugacacuggccgacgccggcuucaucaagcaguauggcgauugucugggcgacauugccgccagggaucugauuugcgcccagaaguuuaacggacugacagugcugccuccucugcugaccgaugagaugaucgcccaguacacaucugcccugcuggccggcacaaucacaagcggcuggacauuuggagcaggcgccgcucugcagauccccuuugcuaugcagauggccuaccgguucaacggcaucggagugacccagaaugugcuguacgagaaccagaagcugaucgccaaccaguucaacagcgccaucggcaagauccaggacagccugagcagcacagcaagcgcccugggaaagcugcaggacguggucaaccagaaugcccaggcacugaacacccuggucaagcagcuguccuccaacuucggcgccaucagcucugugcugaacgauauccugagcagacuggacccuccugaggccgaggugcagaucgacagacugaucacaggcagacugcagagccuccagacauacgugacccagcagcugaucagagccgccgagauuagagccucugccaaucuggccgccaccaagaugucugagugugugcugggccagagcaagagaguggacuuuugcggcaagggcuaccaccugaugagcuucccucagucugccccucacggcgugguguuucugcacgugacauaugugcccgcucaagagaagaauuucaccaccgcuccagccaucugccacgacggcaaagcccacuuuccuagagaaggcguguucguguccaacggcacccauugguucgugacacagcggaacuucuacgagccccagaucaucaccaccgacaacaccuucgugucuggcaacugcgacgucgugaucggcauugugaacaauaccguguacgacccucugcagcccgagcuggacagcuucaaagaggaacuggacaaguacuuuaagaaccacacaagccccgacguggaccugggcgauaucagcggaaucaaugccagcgucgugaacauccagaaagagaucgaccggcugaacgagguggccaagaaucugaacgagagccugaucgaccugcaagaacuggggaaguacgagcaguacaucaaguggcccugguacaucuggcugggcuuuaucgccggacugauugccaucgugauggucacaaucaugcuguguugcaugaccagcugcuguagcugccugaagggcuguuguagcuguggcagcugcugcaaguucgacgaggacgauucugagcccgugcugaagggcgugaaacugcacuacacaugaggacuaguguccaccugucccuccugggcugcuggauugucucguuuuccugccaaauaaacaggaucagcgcuuuacagaucucaaaggcucuuuucagagccaccaaaaaaaaaaaaaaaaaaaaaaaaaaaaaaaaaaaaaaaaaaaaaaaaaaaaaaaaaaaaaaaaaaaaaaaaaaaaaaaaaaaaaaaaaaaaaaaaaaaaa

SEQ ID NO: 24051 - RNA, 4129 nt, Artificial Sequence
  SARS-CoV-2/Wuhan/WIV05/2019__EPI_ISL_402128 spike protein mRNA gc mod (1-1273)(K986P_V987P_S477N_D614G)
aggagacccgugacccggaaguuguacggcuacgcgacuuucccucccacaaacccucgcgcccuuccuuuccuacuugggcccggcagaaagcuuaccauguucguguuccuggugcugcugccucugguguccagccagugugugaaccugaccaccagaacacagcugccuccagccuacaccaacagcuuuaccagaggcguguacuaccccgacaagguguucagauccagcgugcugcacucuacccaggaccuguuccugccuuucuucagcaacgugaccugguuccacgccauccacguguccggcaccaauggcaccaagagauucgacaaccccgugcugcccuucaacgacgggguguacuuugccagcaccgagaaguccaacaucaucagaggcuggaucuucggcaccacacuggacagcaagacccagagccugcugaucgugaacaacgccaccaacguggucaucaaagugugcgaguuccaguucugcaacgaccccuuccugggcgucuacuaccacaagaacaacaagagcuggauggaaagcgaguuccggguguacagcagcgccaacaacugcaccuucgaguacgugucccagccuuuccugauggaccuggaaggcaagcagggcaacuucaagaaccugcgcgaguucguguuuaagaacaucgacggcuacuucaagaucuacagcaagcacaccccuaucaaccucgugcgggaucugccucagggcuucucugcucuggaaccccugguggaucugcccaucggcaucaacaucacccgguuucagacacugcuggcccugcacagaagcuaccugacaccuggcgauagcagcagcggauggacagcuggugccgccgcuuacuaugugggcuaccugcagccuagaaccuuccugcugaaguacaacgagaacggcaccaucaccgacgccguggauugugcucuggauccucugagcgagacaaagugcacccugaaguccuucaccguggaaaagggcaucuaccagaccagcaacuuccgggugcagcccaccgaauccaucgugcgguuccccaauaucaccaaucugugccccuucggcgagguguucaaugccaccagauucgccucuguguacgccuggaaccggaagcggaucagcaauugcguggccgacuacuccgugcuguacaacuccgccagcuucagcaccuucaagugcuacggcguguccccuaccaagcugaacgaccugugcuucacaaacguguacgccgacagcuucgugauccggggagaugaagugcggcagauugccccuggacagacaggcaagaucgccgacuacaacuacaagcugcccgacgacuucaccggcugugugauugccuggaacagcaacaaccuggacuccaaagucggcggcaacuacaauuaccuguaccggcuguuccggaaguccaaucugaagcccuucgagcgggacaucuccaccgagaucuaucaggccggcaacaccccuuguaacggcguggaaggcuucaacugcuacuucccacugcaguccuacggcuuucagcccacaaauggcgugggcuaucagcccuacagagugguggugcugagcuucgaacugcugcaugccccugccacagugugcggcccuaagaaaagcaccaaucucgugaagaacaaaugcgugaacuucaacuucaacggccugaccggcaccggcgugcugacagagagcaacaagaaguuccugccauuccagcaguuuggccgggauaucgccgauaccacagacgccguuagagauccccagacacuggaaauccuggacaucaccccuugcagcuucggcggagugucugugaucaccccuggcaccaacaccagcaaucagguggcagugcuguaccagggcgugaacuguaccgaagugcccguggccauucacgccgaucagcugacaccuacauggcggguguacuccaccggcagcaauguguuucagaccagagccggcugucugaucggagccgagcacgugaacaauagcuacgagugcgacauccccaucggcgcuggaaucugcgccagcuaccagacacagacaaacagcccucggagagccagaagcguggccagccagagcaucauugccuacacaaugucucugggcgccgagaacagcguggccuacuccaacaacucuaucgcuauccccaccaacuucaccaucagcgugaccacagagauccugccuguguccaugaccaagaccagcguggacugcaccauguacaucugcggcgauuccaccgagugcuccaaccugcugcugcaguacggcagcuucugcacccagcugaauagagcccugacagggaucgccguggaacaggacaagaacacccaagagguguucgcccaagugaagcagaucuacaagaccccuccuaucaaggacuucggcggcuucaauuucagccagauucugcccgauccuagcaagcccagcaagcggagcuucaucgaggaccugcuguucaacaaagugacacuggccgacgccggcuucaucaagcaguauggcgauugucugggcgacauugccgccagggaucugauuugcgcccagaaguuuaacggacugacagugcugccuccucugcugaccgaugagaugaucgcccaguacacaucugcccugcuggccggcacaaucacaagcggcuggacauuuggagcaggcgccgcucugcagauccccuuugcuaugcagauggccuaccgguucaacggcaucggagugacccagaaugugcuguacgagaaccagaagcugaucgccaaccaguucaacagcgccaucggcaagauccaggacagccugagcagcacagcaagcgcccugggaaagcugcaggacguggucaaccagaaugcccaggcacugaacacccuggucaagcagcuguccuccaacuucggcgccaucagcucugugcugaacgauauccugagcagacuggacccuccugaggccgaggugcagaucgacagacugaucacaggcagacugcagagccuccagacauacgugacccagcagcugaucagagccgccgagauuagagccucugccaaucuggccgccaccaagaugucugagugugugcugggccagagcaagagaguggacuuuugcggcaagggcuaccaccugaugagcuucccucagucugccccucacggcgugguguuucugcacgugacauaugugcccgcucaagagaagaauuucaccaccgcuccagccaucugccacgacggcaaagcccacuuuccuagagaaggcguguucguguccaacggcacccauugguucgugacacagcggaacuucuacgagccccagaucaucaccaccgacaacaccuucgugucuggcaacugcgacgucgugaucggcauugugaacaauaccguguacgacccucugcagcccgagcuggacagcuucaaagaggaacuggacaaguacuuuaagaaccacacaagccccgacguggaccugggcgauaucagcggaaucaaugccagcgucgugaacauccagaaagagaucgaccggcugaacgagguggccaagaaucugaacgagagccugaucgaccugcaagaacuggggaaguacgagcaguacaucaaguggcccugguacaucuggcugggcuuuaucgccggacugauugccaucgugauggucacaaucaugcuguguugcaugaccagcugcuguagcugccugaagggcuguuguagcuguggcagcugcugcaaguucgacgaggacgauucugagcccgugcugaagggcgugaaacugcacuacacaugaggacuaguguccaccugucccuccugggcugcuggauugucucguuuuccugccaaauaaacaggaucagcgcuuuacagaucucaaaggcucuuuucagagccaccaaaaaaaaaaaaaaaaaaaaaaaaaaaaaaaaaaaaaaaaaaaaaaaaaaaaaaaaaaaaaaaaaaaaaaaaaaaaaaaaaaaaaaaaaaaaaaaaaaaaa

SEQ ID NO: 24052 - RNA, 4129 nt, Artificial Sequence
  SARS-CoV-2/Wuhan/WIV05/2019__EPI_ISL_402128 spike protein mRNA gc mod (1-1273)(K986P_V987P_N501Y_D614G)
aggagacccgugacccggaaguuguacggcuacgcgacuuucccucccacaaacccucgcgcccuuccuuuccuacuugggcccggcagaaagcuuaccauguucguguuccuggugcugcugccucugguguccagccagugugugaaccugaccaccagaacacagcugccuccagccuacaccaacagcuuuaccagaggcguguacuaccccgacaagguguucagauccagcgugcugcacucuacccaggaccuguuccugccuuucuucagcaacgugaccugguuccacgccauccacguguccggcaccaauggcaccaagagauucgacaaccccgugcugcccuucaacgacgggguguacuuugccagcaccgagaaguccaacaucaucagaggcuggaucuucggcaccacacuggacagcaagacccagagccugcugaucgugaacaacgccaccaacguggucaucaaagugugcgaguuccaguucugcaacgaccccuuccugggcgucuacuaccacaagaacaacaagagcuggauggaaagcgaguuccggguguacagcagcgccaacaacugcaccuucgaguacgugucccagccuuuccugauggaccuggaaggcaagcagggcaacuucaagaaccugcgcgaguucguguuuaagaacaucgacggcuacuucaagaucuacagcaagcacaccccuaucaaccucgugcgggaucugccucagggcuucucugcucuggaaccccugguggaucugcccaucggcaucaacaucacccgguuucagacacugcuggcccugcacagaagcuaccugacaccuggcgauagcagcagcggauggacagcuggugccgccgcuuacuaugugggcuaccugcagccuagaaccuuccugcugaaguacaacgagaacggcaccaucaccgacgccguggauugugcucuggauccucugagcgagacaaagugcacccugaaguccuucaccguggaaaagggcaucuaccagaccagcaacuuccgggugcagcccaccgaauccaucgugcgguuccccaauaucaccaaucugugccccuucggcgagguguucaaugccaccagauucgccucuguguacgccuggaaccggaagcggaucagcaauugcguggccgacuacuccgugcuguacaacuccgccagcuucagcaccuucaagugcuacggcguguccccuaccaagcugaacgaccugugcuucacaaacguguacgccgacagcuucgugauccggggagaugaagugcggcagauugccccuggacagacaggcaagaucgccgacuacaacuacaagcugcccgacgacuucaccggcugugugauugccuggaacagcaacaaccuggacuccaaagucggcggcaacuacaauuaccuguaccggcuguuccggaaguccaaucugaagcccuucgagcgggacaucuccaccgagaucuaucaggccggcagcaccccuuguaacggcguggaaggcuucaacugcuacuucccacugcaguccuacggcuuucagcccacauacggcgugggcuaucagcccuacagagugguggugcugagcuucgaacugcugcaugccccugccacagugugcggcccuaagaaaagcaccaaucucgugaagaacaaaugcgugaacuucaacuucaacggccugaccggcaccggcgugcugacagagagcaacaagaaguuccugccauuccagcaguuuggccgggauaucgccgauaccacagacgccguuagagauccccagacacuggaaauccuggacaucaccccuugcagcuucggcggagugucugugaucaccccuggcaccaacaccagcaaucagguggcagugcuguaccagggcgugaacuguaccgaagugcccguggccauucacgccgaucagcugacaccuacauggcggguguacuccaccggcagcaauguguuucagaccagagccggcugucugaucggagccgagcacgugaacaauagcuacgagugcgacauccccaucggcgcuggaaucugcgccagcuaccagacacagacaaacagcccucggagagccagaagcguggccagccagagcaucauugccuacacaaugucucugggcgccgagaacagcguggccuacuccaacaacucuaucgcuauccccaccaacuucaccaucagcgugaccacagagauccugccuguguccaugaccaagaccagcguggacugcaccauguacaucugcggcgauuccaccgagugcuccaaccugcugcugcaguacggcagcuucugcacccagcugaauagagcccugacagggaucgccguggaacaggacaagaacacccaagagguguucgcccaagugaagcagaucuacaagaccccuccuaucaaggacuucggcggcuucaauuucagccagauucugcccgauccuagcaagcccagcaagcggagcuucaucgaggaccugcuguucaacaaagugacacuggccgacgccggcuucaucaagcaguauggcgauugucugggcgacauugccgccagggaucugauuugcgcccagaaguuuaacggacugacagugcugccuccucugcugaccgaugagaugaucgcccaguacacaucugcccugcuggccggcacaaucacaagcggcuggacauuuggagcaggcgccgcucugcagauccccuuugcuaugcagauggccuaccgguucaacggcaucggagugacccagaaugugcuguacgagaaccagaagcugaucgccaaccaguucaacagcgccaucggcaagauccaggacagccugagcagcacagcaagcgcccugggaaagcugcaggacguggucaaccagaaugcccaggcacugaacacccuggucaagcagcuguccuccaacuucggcgccaucagcucugugcugaacgauauccugagcagacuggacccuccugaggccgaggugcagaucgacagacugaucacaggcagacugcagagccuccagacauacgugacccagcagcugaucagagccgccgagauuagagccucugccaaucuggccgccaccaagaugucugagugugugcugggccagagcaagagaguggacuuuugcggcaagggcuaccaccugaugagcuucccucagucugccccucacggcgugguguuucugcacgugacauaugugcccgcucaagagaagaauuucaccaccgcuccagccaucugccacgacggcaaagcccacuuuccuagagaaggcguguucguguccaacggcacccauugguucgugacacagcggaacuucuacgagccccagaucaucaccaccgacaacaccuucgugucuggcaacugcgacgucgugaucggcauugugaacaauaccguguacgacccucugcagcccgagcuggacagcuucaaagaggaacuggacaaguacuuuaagaaccacacaagccccgacguggaccugggcgauaucagcggaaucaaugccagcgucgugaacauccagaaagagaucgaccggcugaacgagguggccaagaaucugaacgagagccugaucgaccugcaagaacuggggaaguacgagcaguacaucaaguggcccugguacaucuggcugggcuuuaucgccggacugauugccaucgugauggucacaaucaugcuguguugcaugaccagcugcuguagcugccugaagggcuguuguagcuguggcagcugcugcaaguucgacgaggacgauucugagcccgugcugaagggcgugaaacugcacuacacaugaggacuaguguccaccugucccuccugggcugcuggauugucucguuuuccugccaaauaaacaggaucagcgcuuuacagaucucaaaggcucuuuucagagccaccaaaaaaaaaaaaaaaaaaaaaaaaaaaaaaaaaaaaaaaaaaaaaaaaaaaaaaaaaaaaaaaaaaaaaaaaaaaaaaaaaaaaaaaaaaaaaaaaaaaaa

SEQ ID NO: 24053 - RNA, 4123 nt, Artificial Sequence
  SARS-CoV-2/Wuhan/WIV05/2019__EPI_ISL_402128 spike protein mRNA gc mod (1-1273)(K986P_V987P_H69del_V70del_D614G)
aggagacccgugacccggaaguuguacggcuacgcgacuuucccucccacaaacccucgcgcccuuccuuuccuacuugggcccggcagaaagcuuaccauguucguguuccuggugcugcugccucugguguccagccagugugugaaccugaccaccagaacacagcugccuccagccuacaccaacagcuuuaccagaggcguguacuaccccgacaagguguucagauccagcgugcugcacucuacccaggaccuguuccugccuuucuucagcaacgugaccugguuccacgccaucuccggcaccaauggcaccaagagauucgacaaccccgugcugcccuucaacgacgggguguacuuugccagcaccgagaaguccaacaucaucagaggcuggaucuucggcaccacacuggacagcaagacccagagccugcugaucgugaacaacgccaccaacguggucaucaaagugugcgaguuccaguucugcaacgaccccuuccugggcgucuacuaccacaagaacaacaagagcuggauggaaagcgaguuccggguguacagcagcgccaacaacugcaccuucgaguacgugucccagccuuuccugauggaccuggaaggcaagcagggcaacuucaagaaccugcgcgaguucguguuuaagaacaucgacggcuacuucaagaucuacagcaagcacaccccuaucaaccucgugcgggaucugccucagggcuucucugcucuggaaccccugguggaucugcccaucggcaucaacaucacccgguuucagacacugcuggcccugcacagaagcuaccugacaccuggcgauagcagcagcggauggacagcuggugccgccgcuuacuaugugggcuaccugcagccuagaaccuuccugcugaaguacaacgagaacggcaccaucaccgacgccguggauugugcucuggauccucugagcgagacaaagugcacccugaaguccuucaccguggaaaagggcaucuaccagaccagcaacuuccgggugcagcccaccgaauccaucgugcgguuccccaauaucaccaaucugugccccuucggcgagguguucaaugccaccagauucgccucuguguacgccuggaaccggaagcggaucagcaauugcguggccgacuacuccgugcuguacaacuccgccagcuucagcaccuucaagugcuacggcguguccccuaccaagcugaacgaccugugcuucacaaacguguacgccgacagcuucgugauccggggagaugaagugcggcagauugccccuggacagacaggcaagaucgccgacuacaacuacaagcugcccgacgacuucaccggcugugugauugccuggaacagcaacaaccuggacuccaaagucggcggcaacuacaauuaccuguaccggcuguuccggaaguccaaucugaagcccuucgagcgggacaucuccaccgagaucuaucaggccggcagcaccccuuguaacggcguggaaggcuucaacugcuacuucccacugcaguccuacggcuuucagcccacaaauggcgugggcuaucagcccuacagagugguggugcugagcuucgaacugcugcaugccccugccacagugugcggcccuaagaaaagcaccaaucucgugaagaacaaaugcgugaacuucaacuucaacggccugaccggcaccggcgugcugacagagagcaacaagaaguuccugccauuccagcaguuuggccgggauaucgccgauaccacagacgccguuagagauccccagacacuggaaauccuggacaucaccccuugcagcuucggcggagugucugugaucaccccuggcaccaacaccagcaaucagguggcagugcuguaccagggcgugaacuguaccgaagugcccguggccauucacgccgaucagcugacaccuacauggcggguguacuccaccggcagcaauguguuucagaccagagccggcugucugaucggagccgagcacgugaacaauagcuacgagugcgacauccccaucggcgcuggaaucugcgccagcuaccagacacagacaaacagcccucggagagccagaagcguggccagccagagcaucauugccuacacaaugucucugggcgccgagaacagcguggccuacuccaacaacucuaucgcuauccccaccaacuucaccaucagcgugaccacagagauccugccuguguccaugaccaagaccagcguggacugcaccauguacaucugcggcgauuccaccgagugcuccaaccugcugcugcaguacggcagcuucugcacccagcugaauagagcccugacagggaucgccguggaacaggacaagaacacccaagagguguucgcccaagugaagcagaucuacaagaccccuccuaucaaggacuucggcggcuucaauuucagccagauucugcccgauccuagcaagcccagcaagcggagcuucaucgaggaccugcuguucaacaaagugacacuggccgacgccggcuucaucaagcaguauggcgauugucugggcgacauugccgccagggaucugauuugcgcccagaaguuuaacggacugacagugcugccuccucugcugaccgaugagaugaucgcccaguacacaucugcccugcuggccggcacaaucacaagcggcuggacauuuggagcaggcgccgcucugcagauccccuuugcuaugcagauggccuaccgguucaacggcaucggagugacccagaaugugcuguacgagaaccagaagcugaucgccaaccaguucaacagcgccaucggcaagauccaggacagccugagcagcacagcaagcgcccugggaaagcugcaggacguggucaaccagaaugcccaggcacugaacacccuggucaagcagcuguccuccaacuucggcgccaucagcucugugcugaacgauauccugagcagacuggacccuccugaggccgaggugcagaucgacagacugaucacaggcagacugcagagccuccagacauacgugacccagcagcugaucagagccgccgagauuagagccucugccaaucuggccgccaccaagaugucugagugugugcugggccagagcaagagaguggacuuuugcggcaagggcuaccaccugaugagcuucccucagucugccccucacggcgugguguuucugcacgugacauaugugcccgcucaagagaagaauuucaccaccgcuccagccaucugccacgacggcaaagcccacuuuccuagagaaggcguguucguguccaacggcacccauugguucgugacacagcggaacuucuacgagccccagaucaucaccaccgacaacaccuucgugucuggcaacugcgacgucgugaucggcauugugaacaauaccguguacgacccucugcagcccgagcuggacagcuucaaagaggaacuggacaaguacuuuaagaaccacacaagccccgacguggaccugggcgauaucagcggaaucaaugccagcgucgugaacauccagaaagagaucgaccggcugaacgagguggccaagaaucugaacgagagccugaucgaccugcaagaacuggggaaguacgagcaguacaucaaguggcccugguacaucuggcugggcuuuaucgccggacugauugccaucgugauggucacaaucaugcuguguugcaugaccagcugcuguagcugccugaagggcuguuguagcuguggcagcugcugcaaguucgacgaggacgauucugagcccgugcugaagggcgugaaacugcacuacacaugaggacuaguguccaccugucccuccugggcugcuggauugucucguuuuccugccaaauaaacaggaucagcgcuuuacagaucucaaaggcucuuuucagagccaccaaaaaaaaaaaaaaaaaaaaaaaaaaaaaaaaaaaaaaaaaaaaaaaaaaaaaaaaaaaaaaaaaaaaaaaaaaaaaaaaaaaaaaaaaaaaaaaaaaaaa

SEQ ID NO: 24054 - RNA, 4129 nt, Artificial Sequence
  SARS-CoV-2/Wuhan/WIV05/2019__EPI_ISL_402128 spike protein mRNA gc mod (1-1273)(K986P_V987P_Y453F_D614G)
aggagacccgugacccggaaguuguacggcuacgcgacuuucccucccacaaacccucgcgcccuuccuuuccuacuugggcccggcagaaagcuuaccauguucguguuccuggugcugcugccucugguguccagccagugugugaaccugaccaccagaacacagcugccuccagccuacaccaacagcuuuaccagaggcguguacuaccccgacaagguguucagauccagcgugcugcacucuacccaggaccuguuccugccuuucuucagcaacgugaccugguuccacgccauccacguguccggcaccaauggcaccaagagauucgacaaccccgugcugcccuucaacgacgggguguacuuugccagcaccgagaaguccaacaucaucagaggcuggaucuucggcaccacacuggacagcaagacccagagccugcugaucgugaacaacgccaccaacguggucaucaaagugugcgaguuccaguucugcaacgaccccuuccugggcgucuacuaccacaagaacaacaagagcuggauggaaagcgaguuccggguguacagcagcgccaacaacugcaccuucgaguacgugucccagccuuuccugauggaccuggaaggcaagcagggcaacuucaagaaccugcgcgaguucguguuuaagaacaucgacggcuacuucaagaucuacagcaagcacaccccuaucaaccucgugcgggaucugccucagggcuucucugcucuggaaccccugguggaucugcccaucggcaucaacaucacccgguuucagacacugcuggcccugcacagaagcuaccugacaccuggcgauagcagcagcggauggacagcuggugccgccgcuuacuaugugggcuaccugcagccuagaaccuuccugcugaaguacaacgagaacggcaccaucaccgacgccguggauugugcucuggauccucugagcgagacaaagugcacccugaaguccuucaccguggaaaagggcaucuaccagaccagcaacuuccgggugcagcccaccgaauccaucgugcgguuccccaauaucaccaaucugugccccuucggcgagguguucaaugccaccagauucgccucuguguacgccuggaaccggaagcggaucagcaauugcguggccgacuacuccgugcuguacaacuccgccagcuucagcaccuucaagugcuacggcguguccccuaccaagcugaacgaccugugcuucacaaacguguacgccgacagcuucgugauccggggagaugaagugcggcagauugccccuggacagacaggcaagaucgccgacuacaacuacaagcugcccgacgacuucaccggcugugugauugccuggaacagcaacaaccuggacuccaaagucggcggcaacuacaauuaccuguuccggcuguuccggaaguccaaucugaagcccuucgagcgggacaucuccaccgagaucuaucaggccggcagcaccccuuguaacggcguggaaggcuucaacugcuacuucccacugcaguccuacggcuuucagcccacaaauggcgugggcuaucagcccuacagagugguggugcugagcuucgaacugcugcaugccccugccacagugugcggcccuaagaaaagcaccaaucucgugaagaacaaaugcgugaacuucaacuucaacggccugaccggcaccggcgugcugacagagagcaacaagaaguuccugccauuccagcaguuuggccgggauaucgccgauaccacagacgccguuagagauccccagacacuggaaauccuggacaucaccccuugcagcuucggcggagugucugugaucaccccuggcaccaacaccagcaaucagguggcagugcuguaccagggcgugaacuguaccgaagugcccguggccauucacgccgaucagcugacaccuacauggcggguguacuccaccggcagcaauguguuucagaccagagccggcugucugaucggagccgagcacgugaacaauagcuacgagugcgacauccccaucggcgcuggaaucugcgccagcuaccagacacagacaaacagcccucggagagccagaagcguggccagccagagcaucauugccuacacaaugucucugggcgccgagaacagcguggccuacuccaacaacucuaucgcuauccccaccaacuucaccaucagcgugaccacagagauccugccuguguccaugaccaagaccagcguggacugcaccauguacaucugcggcgauuccaccgagugcuccaaccugcugcugcaguacggcagcuucugcacccagcugaauagagcccugacagggaucgccguggaacaggacaagaacacccaagagguguucgcccaagugaagcagaucuacaagaccccuccuaucaaggacuucggcggcuucaauuucagccagauucugcccgauccuagcaagcccagcaagcggagcuucaucgaggaccugcuguucaacaaagugacacuggccgacgccggcuucaucaagcaguauggcgauugucugggcgacauugccgccagggaucugauuugcgcccagaaguuuaacggacugacagugcugccuccucugcugaccgaugagaugaucgcccaguacacaucugcccugcuggccggcacaaucacaagcggcuggacauuuggagcaggcgccgcucugcagauccccuuugcuaugcagauggccuaccgguucaacggcaucggagugacccagaaugugcuguacgagaaccagaagcugaucgccaaccaguucaacagcgccaucggcaagauccaggacagccugagcagcacagcaagcgcccugggaaagcugcaggacguggucaaccagaaugcccaggcacugaacacccuggucaagcagcuguccuccaacuucggcgccaucagcucugugcugaacgauauccugagcagacuggacccuccugaggccgaggugcagaucgacagacugaucacaggcagacugcagagccuccagacauacgugacccagcagcugaucagagccgccgagauuagagccucugccaaucuggccgccaccaagaugucugagugugugcugggccagagcaagagaguggacuuuugcggcaagggcuaccaccugaugagcuucccucagucugccccucacggcgugguguuucugcacgugacauaugugcccgcucaagagaagaauuucaccaccgcuccagccaucugccacgacggcaaagcccacuuuccuagagaaggcguguucguguccaacggcacccauugguucgugacacagcggaacuucuacgagccccagaucaucaccaccgacaacaccuucgugucuggcaacugcgacgucgugaucggcauugugaacaauaccguguacgacccucugcagcccgagcuggacagcuucaaagaggaacuggacaaguacuuuaagaaccacacaagccccgacguggaccugggcgauaucagcggaaucaaugccagcgucgugaacauccagaaagagaucgaccggcugaacgagguggccaagaaucugaacgagagccugaucgaccugcaagaacuggggaaguacgagcaguacaucaaguggcccugguacaucuggcugggcuuuaucgccggacugauugccaucgugauggucacaaucaugcuguguugcaugaccagcugcuguagcugccugaagggcuguuguagcuguggcagcugcugcaaguucgacgaggacgauucugagcccgugcugaagggcgugaaacugcacuacacaugaggacuaguguccaccugucccuccugggcugcuggauugucucguuuuccugccaaauaaacaggaucagcgcuuuacagaucucaaaggcucuuuucagagccaccaaaaaaaaaaaaaaaaaaaaaaaaaaaaaaaaaaaaaaaaaaaaaaaaaaaaaaaaaaaaaaaaaaaaaaaaaaaaaaaaaaaaaaaaaaaaaaaaaaaaa

SEQ ID NO: 24055 - RNA, 4129 nt, Artificial Sequence
  SARS-CoV-2/Wuhan/WIV05/2019__EPI_ISL_402128 spike protein mRNA gc mod (1-1273)(K986P_V987P_D614G_I692V)
aggagacccgugacccggaaguuguacggcuacgcgacuuucccucccacaaacccucgcgcccuuccuuuccuacuugggcccggcagaaagcuuaccauguucguguuccuggugcugcugccucugguguccagccagugugugaaccugaccaccagaacacagcugccuccagccuacaccaacagcuuuaccagaggcguguacuaccccgacaagguguucagauccagcgugcugcacucuacccaggaccuguuccugccuuucuucagcaacgugaccugguuccacgccauccacguguccggcaccaauggcaccaagagauucgacaaccccgugcugcccuucaacgacgggguguacuuugccagcaccgagaaguccaacaucaucagaggcuggaucuucggcaccacacuggacagcaagacccagagccugcugaucgugaacaacgccaccaacguggucaucaaagugugcgaguuccaguucugcaacgaccccuuccugggcgucuacuaccacaagaacaacaagagcuggauggaaagcgaguuccggguguacagcagcgccaacaacugcaccuucgaguacgugucccagccuuuccugauggaccuggaaggcaagcagggcaacuucaagaaccugcgcgaguucguguuuaagaacaucgacggcuacuucaagaucuacagcaagcacaccccuaucaaccucgugcgggaucugccucagggcuucucugcucuggaaccccugguggaucugcccaucggcaucaacaucacccgguuucagacacugcuggcccugcacagaagcuaccugacaccuggcgauagcagcagcggauggacagcuggugccgccgcuuacuaugugggcuaccugcagccuagaaccuuccugcugaaguacaacgagaacggcaccaucaccgacgccguggauugugcucuggauccucugagcgagacaaagugcacccugaaguccuucaccguggaaaagggcaucuaccagaccagcaacuuccgggugcagcccaccgaauccaucgugcgguuccccaauaucaccaaucugugccccuucggcgagguguucaaugccaccagauucgccucuguguacgccuggaaccggaagcggaucagcaauugcguggccgacuacuccgugcuguacaacuccgccagcuucagcaccuucaagugcuacggcguguccccuaccaagcugaacgaccugugcuucacaaacguguacgccgacagcuucgugauccggggagaugaagugcggcagauugccccuggacagacaggcaagaucgccgacuacaacuacaagcugcccgacgacuucaccggcugugugauugccuggaacagcaacaaccuggacuccaaagucggcggcaacuacaauuaccuguaccggcuguuccggaaguccaaucugaagcccuucgagcgggacaucuccaccgagaucuaucaggccggcagcaccccuuguaacggcguggaaggcuucaacugcuacuucccacugcaguccuacggcuuucagcccacaaauggcgugggcuaucagcccuacagagugguggugcugagcuucgaacugcugcaugccccugccacagugugcggcccuaagaaaagcaccaaucucgugaagaacaaaugcgugaacuucaacuucaacggccugaccggcaccggcgugcugacagagagcaacaagaaguuccugccauuccagcaguuuggccgggauaucgccgauaccacagacgccguuagagauccccagacacuggaaauccuggacaucaccccuugcagcuucggcggagugucugugaucaccccuggcaccaacaccagcaaucagguggcagugcuguaccagggcgugaacuguaccgaagugcccguggccauucacgccgaucagcugacaccuacauggcggguguacuccaccggcagcaauguguuucagaccagagccggcugucugaucggagccgagcacgugaacaauagcuacgagugcgacauccccaucggcgcuggaaucugcgccagcuaccagacacagacaaacagcccucggagagccagaagcguggccagccagagcgugauugccuacacaaugucucugggcgccgagaacagcguggccuacuccaacaacucuaucgcuauccccaccaacuucaccaucagcgugaccacagagauccugccuguguccaugaccaagaccagcguggacugcaccauguacaucugcggcgauuccaccgagugcuccaaccugcugcugcaguacggcagcuucugcacccagcugaauagagcccugacagggaucgccguggaacaggacaagaacacccaagagguguucgcccaagugaagcagaucuacaagaccccuccuaucaaggacuucggcggcuucaauuucagccagauucugcccgauccuagcaagcccagcaagcggagcuucaucgaggaccugcuguucaacaaagugacacuggccgacgccggcuucaucaagcaguauggcgauugucugggcgacauugccgccagggaucugauuugcgcccagaaguuuaacggacugacagugcugccuccucugcugaccgaugagaugaucgcccaguacacaucugcccugcuggccggcacaaucacaagcggcuggacauuuggagcaggcgccgcucugcagauccccuuugcuaugcagauggccuaccgguucaacggcaucggagugacccagaaugugcuguacgagaaccagaagcugaucgccaaccaguucaacagcgccaucggcaagauccaggacagccugagcagcacagcaagcgcccugggaaagcugcaggacguggucaaccagaaugcccaggcacugaacacccuggucaagcagcuguccuccaacuucggcgccaucagcucugugcugaacgauauccugagcagacuggacccuccugaggccgaggugcagaucgacagacugaucacaggcagacugcagagccuccagacauacgugacccagcagcugaucagagccgccgagauuagagccucugccaaucuggccgccaccaagaugucugagugugugcugggccagagcaagagaguggacuuuugcggcaagggcuaccaccugaugagcuucccucagucugccccucacggcgugguguuucugcacgugacauaugugcccgcucaagagaagaauuucaccaccgcuccagccaucugccacgacggcaaagcccacuuuccuagagaaggcguguucguguccaacggcacccauugguucgugacacagcggaacuucuacgagccccagaucaucaccaccgacaacaccuucgugucuggcaacugcgacgucgugaucggcauugugaacaauaccguguacgacccucugcagcccgagcuggacagcuucaaagaggaacuggacaaguacuuuaagaaccacacaagccccgacguggaccugggcgauaucagcggaaucaaugccagcgucgugaacauccagaaagagaucgaccggcugaacgagguggccaagaaucugaacgagagccugaucgaccugcaagaacuggggaaguacgagcaguacaucaaguggcccugguacaucuggcugggcuuuaucgccggacugauugccaucgugauggucacaaucaugcuguguugcaugaccagcugcuguagcugccugaagggcuguuguagcuguggcagcugcugcaaguucgacgaggacgauucugagcccgugcugaagggcgugaaacugcacuacacaugaggacuaguguccaccugucccuccugggcugcuggauugucucguuuuccugccaaauaaacaggaucagcgcuuuacagaucucaaaggcucuuuucagagccaccaaaaaaaaaaaaaaaaaaaaaaaaaaaaaaaaaaaaaaaaaaaaaaaaaaaaaaaaaaaaaaaaaaaaaaaaaaaaaaaaaaaaaaaaaaaaaaaaaaaaa

SEQ ID NO: 24056 - RNA, 4129 nt, Artificial Sequence
  SARS-CoV-2/Wuhan/WIV05/2019__EPI_ISL_402128 spike protein mRNA gc mod (1-1273)(K986P_V987P_D614G_M1229I)
aggagacccgugacccggaaguuguacggcuacgcgacuuucccucccacaaacccucgcgcccuuccuuuccuacuugggcccggcagaaagcuuaccauguucguguuccuggugcugcugccucugguguccagccagugugugaaccugaccaccagaacacagcugccuccagccuacaccaacagcuuuaccagaggcguguacuaccccgacaagguguucagauccagcgugcugcacucuacccaggaccuguuccugccuuucuucagcaacgugaccugguuccacgccauccacguguccggcaccaauggcaccaagagauucgacaaccccgugcugcccuucaacgacgggguguacuuugccagcaccgagaaguccaacaucaucagaggcuggaucuucggcaccacacuggacagcaagacccagagccugcugaucgugaacaacgccaccaacguggucaucaaagugugcgaguuccaguucugcaacgaccccuuccugggcgucuacuaccacaagaacaacaagagcuggauggaaagcgaguuccggguguacagcagcgccaacaacugcaccuucgaguacgugucccagccuuuccugauggaccuggaaggcaagcagggcaacuucaagaaccugcgcgaguucguguuuaagaacaucgacggcuacuucaagaucuacagcaagcacaccccuaucaaccucgugcgggaucugccucagggcuucucugcucuggaaccccugguggaucugcccaucggcaucaacaucacccgguuucagacacugcuggcccugcacagaagcuaccugacaccuggcgauagcagcagcggauggacagcuggugccgccgcuuacuaugugggcuaccugcagccuagaaccuuccugcugaaguacaacgagaacggcaccaucaccgacgccguggauugugcucuggauccucugagcgagacaaagugcacccugaaguccuucaccguggaaaagggcaucuaccagaccagcaacuuccgggugcagcccaccgaauccaucgugcgguuccccaauaucaccaaucugugccccuucggcgagguguucaaugccaccagauucgccucuguguacgccuggaaccggaagcggaucagcaauugcguggccgacuacuccgugcuguacaacuccgccagcuucagcaccuucaagugcuacggcguguccccuaccaagcugaacgaccugugcuucacaaacguguacgccgacagcuucgugauccggggagaugaagugcggcagauugccccuggacagacaggcaagaucgccgacuacaacuacaagcugcccgacgacuucaccggcugugugauugccuggaacagcaacaaccuggacuccaaagucggcggcaacuacaauuaccuguaccggcuguuccggaaguccaaucugaagcccuucgagcgggacaucuccaccgagaucuaucaggccggcagcaccccuuguaacggcguggaaggcuucaacugcuacuucccacugcaguccuacggcuuucagcccacaaauggcgugggcuaucagcccuacagagugguggugcugagcuucgaacugcugcaugccccugccacagugugcggcccuaagaaaagcaccaaucucgugaagaacaaaugcgugaacuucaacuucaacggccugaccggcaccggcgugcugacagagagcaacaagaaguuccugccauuccagcaguuuggccgggauaucgccgauaccacagacgccguuagagauccccagacacuggaaauccuggacaucaccccuugcagcuucggcggagugucugugaucaccccuggcaccaacaccagcaaucagguggcagugcuguaccagggcgugaacuguaccgaagugcccguggccauucacgccgaucagcugacaccuacauggcggguguacuccaccggcagcaauguguuucagaccagagccggcugucugaucggagccgagcacgugaacaauagcuacgagugcgacauccccaucggcgcuggaaucugcgccagcuaccagacacagacaaacagcccucggagagccagaagcguggccagccagagcaucauugccuacacaaugucucugggcgccgagaacagcguggccuacuccaacaacucuaucgcuauccccaccaacuucaccaucagcgugaccacagagauccugccuguguccaugaccaagaccagcguggacugcaccauguacaucugcggcgauuccaccgagugcuccaaccugcugcugcaguacggcagcuucugcacccagcugaauagagcccugacagggaucgccguggaacaggacaagaacacccaagagguguucgcccaagugaagcagaucuacaagaccccuccuaucaaggacuucggcggcuucaauuucagccagauucugcccgauccuagcaagcccagcaagcggagcuucaucgaggaccugcuguucaacaaagugacacuggccgacgccggcuucaucaagcaguauggcgauugucugggcgacauugccgccagggaucugauuugcgcccagaaguuuaacggacugacagugcugccuccucugcugaccgaugagaugaucgcccaguacacaucugcccugcuggccggcacaaucacaagcggcuggacauuuggagcaggcgccgcucugcagauccccuuugcuaugcagauggccuaccgguucaacggcaucggagugacccagaaugugcuguacgagaaccagaagcugaucgccaaccaguucaacagcgccaucggcaagauccaggacagccugagcagcacagcaagcgcccugggaaagcugcaggacguggucaaccagaaugcccaggcacugaacacccuggucaagcagcuguccuccaacuucggcgccaucagcucugugcugaacgauauccugagcagacuggacccuccugaggccgaggugcagaucgacagacugaucacaggcagacugcagagccuccagacauacgugacccagcagcugaucagagccgccgagauuagagccucugccaaucuggccgccaccaagaugucugagugugugcugggccagagcaagagaguggacuuuugcggcaagggcuaccaccugaugagcuucccucagucugccccucacggcgugguguuucugcacgugacauaugugcccgcucaagagaagaauuucaccaccgcuccagccaucugccacgacggcaaagcccacuuuccuagagaaggcguguucguguccaacggcacccauugguucgugacacagcggaacuucuacgagccccagaucaucaccaccgacaacaccuucgugucuggcaacugcgacgucgugaucggcauugugaacaauaccguguacgacccucugcagcccgagcuggacagcuucaaagaggaacuggacaaguacuuuaagaaccacacaagccccgacguggaccugggcgauaucagcggaaucaaugccagcgucgugaacauccagaaagagaucgaccggcugaacgagguggccaagaaucugaacgagagccugaucgaccugcaagaacuggggaaguacgagcaguacaucaaguggcccugguacaucuggcugggcuuuaucgccggacugauugccaucgugaucgucacaaucaugcuguguugcaugaccagcugcuguagcugccugaagggcuguuguagcuguggcagcugcugcaaguucgacgaggacgauucugagcccgugcugaagggcgugaaacugcacuacacaugaggacuaguguccaccugucccuccugggcugcuggauugucucguuuuccugccaaauaaacaggaucagcgcuuuacagaucucaaaggcucuuuucagagccaccaaaaaaaaaaaaaaaaaaaaaaaaaaaaaaaaaaaaaaaaaaaaaaaaaaaaaaaaaaaaaaaaaaaaaaaaaaaaaaaaaaaaaaaaaaaaaaaaaaaaa

SEQ ID NO: 24057 - RNA, 4123 nt, Artificial Sequence
  SARS-CoV-2/Wuhan/WIV05/2019__EPI_ISL_402128 spike protein mRNA gc mod (1-1273)(K986P_V987P_H69del_V70del_A222V_Y453F_S477N_D614G_I692V)
aggagacccgugacccggaaguuguacggcuacgcgacuuucccucccacaaacccucgcgcccuuccuuuccuacuugggcccggcagaaagcuuaccauguucguguuccuggugcugcugccucugguguccagccagugugugaaccugaccaccagaacacagcugccuccagccuacaccaacagcuuuaccagaggcguguacuaccccgacaagguguucagauccagcgugcugcacucuacccaggaccuguuccugccuuucuucagcaacgugaccugguuccacgccaucuccggcaccaauggcaccaagagauucgacaaccccgugcugcccuucaacgacgggguguacuuugccagcaccgagaaguccaacaucaucagaggcuggaucuucggcaccacacuggacagcaagacccagagccugcugaucgugaacaacgccaccaacguggucaucaaagugugcgaguuccaguucugcaacgaccccuuccugggcgucuacuaccacaagaacaacaagagcuggauggaaagcgaguuccggguguacagcagcgccaacaacugcaccuucgaguacgugucccagccuuuccugauggaccuggaaggcaagcagggcaacuucaagaaccugcgcgaguucguguuuaagaacaucgacggcuacuucaagaucuacagcaagcacaccccuaucaaccucgugcgggaucugccucagggcuucucugugcuggaaccccugguggaucugcccaucggcaucaacaucacccgguuucagacacugcuggcccugcacagaagcuaccugacaccuggcgauagcagcagcggauggacagcuggugccgccgcuuacuaugugggcuaccugcagccuagaaccuuccugcugaaguacaacgagaacggcaccaucaccgacgccguggauugugcucuggauccucugagcgagacaaagugcacccugaaguccuucaccguggaaaagggcaucuaccagaccagcaacuuccgggugcagcccaccgaauccaucgugcgguuccccaauaucaccaaucugugccccuucggcgagguguucaaugccaccagauucgccucuguguacgccuggaaccggaagcggaucagcaauugcguggccgacuacuccgugcuguacaacuccgccagcuucagcaccuucaagugcuacggcguguccccuaccaagcugaacgaccugugcuucacaaacguguacgccgacagcuucgugauccggggagaugaagugcggcagauugccccuggacagacaggcaagaucgccgacuacaacuacaagcugcccgacgacuucaccggcugugugauugccuggaacagcaacaaccuggacuccaaagucggcggcaacuacaauuaccuguuccggcuguuccggaaguccaaucugaagcccuucgagcgggacaucuccaccgagaucuaucaggccggcaacaccccuuguaacggcguggaaggcuucaacugcuacuucccacugcaguccuacggcuuucagcccacaaauggcgugggcuaucagcccuacagagugguggugcugagcuucgaacugcugcaugccccugccacagugugcggcccuaagaaaagcaccaaucucgugaagaacaaaugcgugaacuucaacuucaacggccugaccggcaccggcgugcugacagagagcaacaagaaguuccugccauuccagcaguuuggccgggauaucgccgauaccacagacgccguuagagauccccagacacuggaaauccuggacaucaccccuugcagcuucggcggagugucugugaucaccccuggcaccaacaccagcaaucagguggcagugcuguaccagggcgugaacuguaccgaagugcccguggccauucacgccgaucagcugacaccuacauggcggguguacuccaccggcagcaauguguuucagaccagagccggcugucugaucggagccgagcacgugaacaauagcuacgagugcgacauccccaucggcgcuggaaucugcgccagcuaccagacacagacaaacagcccucggagagccagaagcguggccagccagagcgugauugccuacacaaugucucugggcgccgagaacagcguggccuacuccaacaacucuaucgcuauccccaccaacuucaccaucagcgugaccacagagauccugccuguguccaugaccaagaccagcguggacugcaccauguacaucugcggcgauuccaccgagugcuccaaccugcugcugcaguacggcagcuucugcacccagcugaauagagcccugacagggaucgccguggaacaggacaagaacacccaagagguguucgcccaagugaagcagaucuacaagaccccuccuaucaaggacuucggcggcuucaauuucagccagauucugcccgauccuagcaagcccagcaagcggagcuucaucgaggaccugcuguucaacaaagugacacuggccgacgccggcuucaucaagcaguauggcgauugucugggcgacauugccgccagggaucugauuugcgcccagaaguuuaacggacugacagugcugccuccucugcugaccgaugagaugaucgcccaguacacaucugcccugcuggccggcacaaucacaagcggcuggacauuuggagcaggcgccgcucugcagauccccuuugcuaugcagauggccuaccgguucaacggcaucggagugacccagaaugugcuguacgagaaccagaagcugaucgccaaccaguucaacagcgccaucggcaagauccaggacagccugagcagcacagcaagcgcccugggaaagcugcaggacguggucaaccagaaugcccaggcacugaacacccuggucaagcagcuguccuccaacuucggcgccaucagcucugugcugaacgauauccugagcagacuggacccuccugaggccgaggugcagaucgacagacugaucacaggcagacugcagagccuccagacauacgugacccagcagcugaucagagccgccgagauuagagccucugccaaucuggccgccaccaagaugucugagugugugcugggccagagcaagagaguggacuuuugcggcaagggcuaccaccugaugagcuucccucagucugccccucacggcgugguguuucugcacgugacauaugugcccgcucaagagaagaauuucaccaccgcuccagccaucugccacgacggcaaagcccacuuuccuagagaaggcguguucguguccaacggcacccauugguucgugacacagcggaacuucuacgagccccagaucaucaccaccgacaacaccuucgugucuggcaacugcgacgucgugaucggcauugugaacaauaccguguacgacccucugcagcccgagcuggacagcuucaaagaggaacuggacaaguacuuuaagaaccacacaagccccgacguggaccugggcgauaucagcggaaucaaugccagcgucgugaacauccagaaagagaucgaccggcugaacgagguggccaagaaucugaacgagagccugaucgaccugcaagaacuggggaaguacgagcaguacaucaaguggcccugguacaucuggcugggcuuuaucgccggacugauugccaucgugauggucacaaucaugcuguguugcaugaccagcugcuguagcugccugaagggcuguuguagcuguggcagcugcugcaaguucgacgaggacgauucugagcccgugcugaagggcgugaaacugcacuacacaugaggacuaguguccaccugucccuccugggcugcuggauugucucguuuuccugccaaauaaacaggaucagcgcuuuacagaucucaaaggcucuuuucagagccaccaaaaaaaaaaaaaaaaaaaaaaaaaaaaaaaaaaaaaaaaaaaaaaaaaaaaaaaaaaaaaaaaaaaaaaaaaaaaaaaaaaaaaaaaaaaaaaaaaaaaa

SEQ ID NO: 24058 - RNA, 4123 nt, Artificial Sequence
  SARS-CoV-2/Wuhan/WIV05/2019__EPI_ISL_402128 spike protein mRNA gc mod (1-1273)(K986P_V987P_H69del_V70del_Y453F_D614G_I692V_M1229I)
aggagacccgugacccggaaguuguacggcuacgcgacuuucccucccacaaacccucgcgcccuuccuuuccuacuugggcccggcagaaagcuuaccauguucguguuccuggugcugcugccucugguguccagccagugugugaaccugaccaccagaacacagcugccuccagccuacaccaacagcuuuaccagaggcguguacuaccccgacaagguguucagauccagcgugcugcacucuacccaggaccuguuccugccuuucuucagcaacgugaccugguuccacgccaucuccggcaccaauggcaccaagagauucgacaaccccgugcugcccuucaacgacgggguguacuuugccagcaccgagaaguccaacaucaucagaggcuggaucuucggcaccacacuggacagcaagacccagagccugcugaucgugaacaacgccaccaacguggucaucaaagugugcgaguuccaguucugcaacgaccccuuccugggcgucuacuaccacaagaacaacaagagcuggauggaaagcgaguuccggguguacagcagcgccaacaacugcaccuucgaguacgugucccagccuuuccugauggaccuggaaggcaagcagggcaacuucaagaaccugcgcgaguucguguuuaagaacaucgacggcuacuucaagaucuacagcaagcacaccccuaucaaccucgugcgggaucugccucagggcuucucugcucuggaaccccugguggaucugcccaucggcaucaacaucacccgguuucagacacugcuggcccugcacagaagcuaccugacaccuggcgauagcagcagcggauggacagcuggugccgccgcuuacuaugugggcuaccugcagccuagaaccuuccugcugaaguacaacgagaacggcaccaucaccgacgccguggauugugcucuggauccucugagcgagacaaagugcacccugaaguccuucaccguggaaaagggcaucuaccagaccagcaacuuccgggugcagcccaccgaauccaucgugcgguuccccaauaucaccaaucugugccccuucggcgagguguucaaugccaccagauucgccucuguguacgccuggaaccggaagcggaucagcaauugcguggccgacuacuccgugcuguacaacuccgccagcuucagcaccuucaagugcuacggcguguccccuaccaagcugaacgaccugugcuucacaaacguguacgccgacagcuucgugauccggggagaugaagugcggcagauugccccuggacagacaggcaagaucgccgacuacaacuacaagcugcccgacgacuucaccggcugugugauugccuggaacagcaacaaccuggacuccaaagucggcggcaacuacaauuaccuguuccggcuguuccggaaguccaaucugaagcccuucgagcgggacaucuccaccgagaucuaucaggccggcagcaccccuuguaacggcguggaaggcuucaacugcuacuucccacugcaguccuacggcuuucagcccacaaauggcgugggcuaucagcccuacagagugguggugcugagcuucgaacugcugcaugccccugccacagugugcggcccuaagaaaagcaccaaucucgugaagaacaaaugcgugaacuucaacuucaacggccugaccggcaccggcgugcugacagagagcaacaagaaguuccugccauuccagcaguuuggccgggauaucgccgauaccacagacgccguuagagauccccagacacuggaaauccuggacaucaccccuugcagcuucggcggagugucugugaucaccccuggcaccaacaccagcaaucagguggcagugcuguaccagggcgugaacuguaccgaagugcccguggccauucacgccgaucagcugacaccuacauggcggguguacuccaccggcagcaauguguuucagaccagagccggcugucugaucggagccgagcacgugaacaauagcuacgagugcgacauccccaucggcgcuggaaucugcgccagcuaccagacacagacaaacagcccucggagagccagaagcguggccagccagagcgugauugccuacacaaugucucugggcgccgagaacagcguggccuacuccaacaacucuaucgcuauccccaccaacuucaccaucagcgugaccacagagauccugccuguguccaugaccaagaccagcguggacugcaccauguacaucugcggcgauuccaccgagugcuccaaccugcugcugcaguacggcagcuucugcacccagcugaauagagcccugacagggaucgccguggaacaggacaagaacacccaagagguguucgcccaagugaagcagaucuacaagaccccuccuaucaaggacuucggcggcuucaauuucagccagauucugcccgauccuagcaagcccagcaagcggagcuucaucgaggaccugcuguucaacaaagugacacuggccgacgccggcuucaucaagcaguauggcgauugucugggcgacauugccgccagggaucugauuugcgcccagaaguuuaacggacugacagugcugccuccucugcugaccgaugagaugaucgcccaguacacaucugcccugcuggccggcacaaucacaagcggcuggacauuuggagcaggcgccgcucugcagauccccuuugcuaugcagauggccuaccgguucaacggcaucggagugacccagaaugugcuguacgagaaccagaagcugaucgccaaccaguucaacagcgccaucggcaagauccaggacagccugagcagcacagcaagcgcccugggaaagcugcaggacguggucaaccagaaugcccaggcacugaacacccuggucaagcagcuguccuccaacuucggcgccaucagcucugugcugaacgauauccugagcagacuggacccuccugaggccgaggugcagaucgacagacugaucacaggcagacugcagagccuccagacauacgugacccagcagcugaucagagccgccgagauuagagccucugccaaucuggccgccaccaagaugucugagugugugcugggccagagcaagagaguggacuuuugcggcaagggcuaccaccugaugagcuucccucagucugccccucacggcgugguguuucugcacgugacauaugugcccgcucaagagaagaauuucaccaccgcuccagccaucugccacgacggcaaagcccacuuuccuagagaaggcguguucguguccaacggcacccauugguucgugacacagcggaacuucuacgagccccagaucaucaccaccgacaacaccuucgugucuggcaacugcgacgucgugaucggcauugugaacaauaccguguacgacccucugcagcccgagcuggacagcuucaaagaggaacuggacaaguacuuuaagaaccacacaagccccgacguggaccugggcgauaucagcggaaucaaugccagcgucgugaacauccagaaagagaucgaccggcugaacgagguggccaagaaucugaacgagagccugaucgaccugcaagaacuggggaaguacgagcaguacaucaaguggcccugguacaucuggcugggcuuuaucgccggacugauugccaucgugaucgucacaaucaugcuguguugcaugaccagcugcuguagcugccugaagggcuguuguagcuguggcagcugcugcaaguucgacgaggacgauucugagcccgugcugaagggcgugaaacugcacuacacaugaggacuaguguccaccugucccuccugggcugcuggauugucucguuuuccugccaaauaaacaggaucagcgcuuuacagaucucaaaggcucuuuucagagccaccaaaaaaaaaaaaaaaaaaaaaaaaaaaaaaaaaaaaaaaaaaaaaaaaaaaaaaaaaaaaaaaaaaaaaaaaaaaaaaaaaaaaaaaaaaaaaaaaaaaaa

SEQ ID NO: 24059 - RNA, 4120 nt, Artificial Sequence
  SARS-CoV-2/Wuhan/WIV05/2019__EPI_ISL_402128 spike protein mRNA gc mod (1-1273)(K986P_V987P_K986P_V987P_H69del_V70del_Y144del_N501Y_A570 D_D614G_P681H_T716I_S982A_D1118H)
aggagacccgugacccggaaguuguacggcuacgcgacuuucccucccacaaacccucgcgcccuuccuuuccuacuugggcccggcagaaagcuuaccauguucguguuccuggugcugcugccucugguguccagccagugugugaaccugaccaccagaacacagcugccuccagccuacaccaacagcuuuaccagaggcguguacuaccccgacaagguguucagauccagcgugcugcacucuacccaggaccuguuccugccuuucuucagcaacgugaccugguuccacgccaucuccggcaccaauggcaccaagagauucgacaaccccgugcugcccuucaacgacgggguguacuuugccagcaccgagaaguccaacaucaucagaggcuggaucuucggcaccacacuggacagcaagacccagagccugcugaucgugaacaacgccaccaacguggucaucaaagugugcgaguuccaguucugcaacgaccccuuccugggcgucuaccacaagaacaacaagagcuggauggaaagcgaguuccggguguacagcagcgccaacaacugcaccuucgaguacgugucccagccuuuccugauggaccuggaaggcaagcagggcaacuucaagaaccugcgcgaguucguguuuaagaacaucgacggcuacuucaagaucuacagcaagcacaccccuaucaaccucgugcgggaucugccucagggcuucucugcucuggaaccccugguggaucugcccaucggcaucaacaucacccgguuucagacacugcuggcccugcacagaagcuaccugacaccuggcgauagcagcagcggauggacagcuggugccgccgcuuacuaugugggcuaccugcagccuagaaccuuccugcugaaguacaacgagaacggcaccaucaccgacgccguggauugugcucuggauccucugagcgagacaaagugcacccugaaguccuucaccguggaaaagggcaucuaccagaccagcaacuuccgggugcagcccaccgaauccaucgugcgguuccccaauaucaccaaucugugccccuucggcgagguguucaaugccaccagauucgccucuguguacgccuggaaccggaagcggaucagcaauugcguggccgacuacuccgugcuguacaacuccgccagcuucagcaccuucaagugcuacggcguguccccuaccaagcugaacgaccugugcuucacaaacguguacgccgacagcuucgugauccggggagaugaagugcggcagauugccccuggacagacaggcaagaucgccgacuacaacuacaagcugcccgacgacuucaccggcugugugauugccuggaacagcaacaaccuggacuccaaagucggcggcaacuacaauuaccuguaccggcuguuccggaaguccaaucugaagcccuucgagcgggacaucuccaccgagaucuaucaggccggcagcaccccuuguaacggcguggaaggcuucaacugcuacuucccacugcaguccuacggcuuucagcccacauacggcgugggcuaucagcccuacagagugguggugcugagcuucgaacugcugcaugccccugccacagugugcggcccuaagaaaagcaccaaucucgugaagaacaaaugcgugaacuucaacuucaacggccugaccggcaccggcgugcugacagagagcaacaagaaguuccugccauuccagcaguuuggccgggauaucgacgauaccacagacgccguuagagauccccagacacuggaaauccuggacaucaccccuugcagcuucggcggagugucugugaucaccccuggcaccaacaccagcaaucagguggcagugcuguaccagggcgugaacuguaccgaagugcccguggccauucacgccgaucagcugacaccuacauggcggguguacuccaccggcagcaauguguuucagaccagagccggcugucugaucggagccgagcacgugaacaauagcuacgagugcgacauccccaucggcgcuggaaucugcgccagcuaccagacacagacaaacagccaccggagagccagaagcguggccagccagagcaucauugccuacacaaugucucugggcgccgagaacagcguggccuacuccaacaacucuaucgcuauccccaucaacuucaccaucagcgugaccacagagauccugccuguguccaugaccaagaccagcguggacugcaccauguacaucugcggcgauuccaccgagugcuccaaccugcugcugcaguacggcagcuucugcacccagcugaauagagcccugacagggaucgccguggaacaggacaagaacacccaagagguguucgcccaagugaagcagaucuacaagaccccuccuaucaaggacuucggcggcuucaauuucagccagauucugcccgauccuagcaagcccagcaagcggagcuucaucgaggaccugcuguucaacaaagugacacuggccgacgccggcuucaucaagcaguauggcgauugucugggcgacauugccgccagggaucugauuugcgcccagaaguuuaacggacugacagugcugccuccucugcugaccgaugagaugaucgcccaguacacaucugcccugcuggccggcacaaucacaagcggcuggacauuuggagcaggcgccgcucugcagauccccuuugcuaugcagauggccuaccgguucaacggcaucggagugacccagaaugugcuguacgagaaccagaagcugaucgccaaccaguucaacagcgccaucggcaagauccaggacagccugagcagcacagcaagcgcccugggaaagcugcaggacguggucaaccagaaugcccaggcacugaacacccuggucaagcagcuguccuccaacuucggcgccaucagcucugugcugaacgauauccuggccagacuggacccuccugaggccgaggugcagaucgacagacugaucacaggcagacugcagagccuccagacauacgugacccagcagcugaucagagccgccgagauuagagccucugccaaucuggccgccaccaagaugucugagugugugcugggccagagcaagagaguggacuuuugcggcaagggcuaccaccugaugagcuucccucagucugccccucacggcgugguguuucugcacgugacauaugugcccgcucaagagaagaauuucaccaccgcuccagccaucugccacgacggcaaagcccacuuuccuagagaaggcguguucguguccaacggcacccauugguucgugacacagcggaacuucuacgagccccagaucaucaccacccacaacaccuucgugucuggcaacugcgacgucgugaucggcauugugaacaauaccguguacgacccucugcagcccgagcuggacagcuucaaagaggaacuggacaaguacuuuaagaaccacacaagccccgacguggaccugggcgauaucagcggaaucaaugccagcgucgugaacauccagaaagagaucgaccggcugaacgagguggccaagaaucugaacgagagccugaucgaccugcaagaacuggggaaguacgagcaguacaucaaguggcccugguacaucuggcugggcuuuaucgccggacugauugccaucgugauggucacaaucaugcuguguugcaugaccagcugcuguagcugccugaagggcuguuguagcuguggcagcugcugcaaguucgacgaggacgauucugagcccgugcugaagggcgugaaacugcacuacacaugaggacuaguguccaccugucccuccugggcugcuggauugucucguuuuccugccaaauaaacaggaucagcgcuuuacagaucucaaaggcucuuuucagagccaccaaaaaaaaaaaaaaaaaaaaaaaaaaaaaaaaaaaaaaaaaaaaaaaaaaaaaaaaaaaaaaaaaaaaaaaaaaaaaaaaaaaaaaaaaaaaaaaaaaaaa

SEQ ID NO: 24060 - RNA, 4129 nt, Artificial Sequence
  SARS-CoV-2/Wuhan/WIV05/2019__EPI_ISL_402128 spike protein mRNA gc mod (1-1273)(K986P_V987P_K986P_V987P_K417N_E484K_N501Y_D614G)
aggagacccgugacccggaaguuguacggcuacgcgacuuucccucccacaaacccucgcgcccuuccuuuccuacuugggcccggcagaaagcuuaccauguucguguuccuggugcugcugccucugguguccagccagugugugaaccugaccaccagaacacagcugccuccagccuacaccaacagcuuuaccagaggcguguacuaccccgacaagguguucagauccagcgugcugcacucuacccaggaccuguuccugccuuucuucagcaacgugaccugguuccacgccauccacguguccggcaccaauggcaccaagagauucgacaaccccgugcugcccuucaacgacgggguguacuuugccagcaccgagaaguccaacaucaucagaggcuggaucuucggcaccacacuggacagcaagacccagagccugcugaucgugaacaacgccaccaacguggucaucaaagugugcgaguuccaguucugcaacgaccccuuccugggcgucuacuaccacaagaacaacaagagcuggauggaaagcgaguuccggguguacagcagcgccaacaacugcaccuucgaguacgugucccagccuuuccugauggaccuggaaggcaagcagggcaacuucaagaaccugcgcgaguucguguuuaagaacaucgacggcuacuucaagaucuacagcaagcacaccccuaucaaccucgugcgggaucugccucagggcuucucugcucuggaaccccugguggaucugcccaucggcaucaacaucacccgguuucagacacugcuggcccugcacagaagcuaccugacaccuggcgauagcagcagcggauggacagcuggugccgccgcuuacuaugugggcuaccugcagccuagaaccuuccugcugaaguacaacgagaacggcaccaucaccgacgccguggauugugcucuggauccucugagcgagacaaagugcacccugaaguccuucaccguggaaaagggcaucuaccagaccagcaacuuccgggugcagcccaccgaauccaucgugcgguuccccaauaucaccaaucugugccccuucggcgagguguucaaugccaccagauucgccucuguguacgccuggaaccggaagcggaucagcaauugcguggccgacuacuccgugcuguacaacuccgccagcuucagcaccuucaagugcuacggcguguccccuaccaagcugaacgaccugugcuucacaaacguguacgccgacagcuucgugauccggggagaugaagugcggcagauugccccuggacagacaggcaacaucgccgacuacaacuacaagcugcccgacgacuucaccggcugugugauugccuggaacagcaacaaccuggacuccaaagucggcggcaacuacaauuaccuguaccggcuguuccggaaguccaaucugaagcccuucgagcgggacaucuccaccgagaucuaucaggccggcagcaccccuuguaacggcgugaagggcuucaacugcuacuucccacugcaguccuacggcuuucagcccacauacggcgugggcuaucagcccuacagagugguggugcugagcuucgaacugcugcaugccccugccacagugugcggcccuaagaaaagcaccaaucucgugaagaacaaaugcgugaacuucaacuucaacggccugaccggcaccggcgugcugacagagagcaacaagaaguuccugccauuccagcaguuuggccgggauaucgccgauaccacagacgccguuagagauccccagacacuggaaauccuggacaucaccccuugcagcuucggcggagugucugugaucaccccuggcaccaacaccagcaaucagguggcagugcuguaccagggcgugaacuguaccgaagugcccguggccauucacgccgaucagcugacaccuacauggcggguguacuccaccggcagcaauguguuucagaccagagccggcugucugaucggagccgagcacgugaacaauagcuacgagugcgacauccccaucggcgcuggaaucugcgccagcuaccagacacagacaaacagcccucggagagccagaagcguggccagccagagcaucauugccuacacaaugucucugggcgccgagaacagcguggccuacuccaacaacucuaucgcuauccccaccaacuucaccaucagcgugaccacagagauccugccuguguccaugaccaagaccagcguggacugcaccauguacaucugcggcgauuccaccgagugcuccaaccugcugcugcaguacggcagcuucugcacccagcugaauagagcccugacagggaucgccguggaacaggacaagaacacccaagagguguucgcccaagugaagcagaucuacaagaccccuccuaucaaggacuucggcggcuucaauuucagccagauucugcccgauccuagcaagcccagcaagcggagcuucaucgaggaccugcuguucaacaaagugacacuggccgacgccggcuucaucaagcaguauggcgauugucugggcgacauugccgccagggaucugauuugcgcccagaaguuuaacggacugacagugcugccuccucugcugaccgaugagaugaucgcccaguacacaucugcccugcuggccggcacaaucacaagcggcuggacauuuggagcaggcgccgcucugcagauccccuuugcuaugcagauggccuaccgguucaacggcaucggagugacccagaaugugcuguacgagaaccagaagcugaucgccaaccaguucaacagcgccaucggcaagauccaggacagccugagcagcacagcaagcgcccugggaaagcugcaggacguggucaaccagaaugcccaggcacugaacacccuggucaagcagcuguccuccaacuucggcgccaucagcucugugcugaacgauauccugagcagacuggacccuccugaggccgaggugcagaucgacagacugaucacaggcagacugcagagccuccagacauacgugacccagcagcugaucagagccgccgagauuagagccucugccaaucuggccgccaccaagaugucugagugugugcugggccagagcaagagaguggacuuuugcggcaagggcuaccaccugaugagcuucccucagucugccccucacggcgugguguuucugcacgugacauaugugcccgcucaagagaagaauuucaccaccgcuccagccaucugccacgacggcaaagcccacuuuccuagagaaggcguguucguguccaacggcacccauugguucgugacacagcggaacuucuacgagccccagaucaucaccaccgacaacaccuucgugucuggcaacugcgacgucgugaucggcauugugaacaauaccguguacgacccucugcagcccgagcuggacagcuucaaagaggaacuggacaaguacuuuaagaaccacacaagccccgacguggaccugggcgauaucagcggaaucaaugccagcgucgugaacauccagaaagagaucgaccggcugaacgagguggccaagaaucugaacgagagccugaucgaccugcaagaacuggggaaguacgagcaguacaucaaguggcccugguacaucuggcugggcuuuaucgccggacugauugccaucgugauggucacaaucaugcuguguugcaugaccagcugcuguagcugccugaagggcuguuguagcuguggcagcugcugcaaguucgacgaggacgauucugagcccgugcugaagggcgugaaacugcacuacacaugaggacuaguguccaccugucccuccugggcugcuggauugucucguuuuccugccaaauaaacaggaucagcgcuuuacagaucucaaaggcucuuuucagagccaccaaaaaaaaaaaaaaaaaaaaaaaaaaaaaaaaaaaaaaaaaaaaaaaaaaaaaaaaaaaaaaaaaaaaaaaaaaaaaaaaaaaaaaaaaaaaaaaaaaaaa

SEQ ID NO: 24061 - RNA, 4120 nt, Artificial Sequence
  SARS-CoV-2/Wuhan/WIV05/2019__EPI_ISL_402128 spike protein mRNA gc mod (1-1273)(K986P_V987P_K986P_V987P_L18F_D80A_D215G_L242del_A243del_ L244del_R246I_K417N_E484K_N501Y_D614G_A701V)
aggagacccgugacccggaaguuguacggcuacgcgacuuucccucccacaaacccucgcgcccuuccuuuccuacuugggcccggcagaaagcuuaccauguucguguuccuggugcugcugccucugguguccagccagugugugaacuucaccaccagaacacagcugccuccagccuacaccaacagcuuuaccagaggcguguacuaccccgacaagguguucagauccagcgugcugcacucuacccaggaccuguuccugccuuucuucagcaacgugaccugguuccacgccauccacguguccggcaccaauggcaccaagagauucgccaaccccgugcugcccuucaacgacgggguguacuuugccagcaccgagaaguccaacaucaucagaggcuggaucuucggcaccacacuggacagcaagacccagagccugcugaucgugaacaacgccaccaacguggucaucaaagugugcgaguuccaguucugcaacgaccccuuccugggcgucuacuaccacaagaacaacaagagcuggauggaaagcgaguuccggguguacagcagcgccaacaacugcaccuucgaguacgugucccagccuuuccugauggaccuggaaggcaagcagggcaacuucaagaaccugcgcgaguucguguuuaagaacaucgacggcuacuucaagaucuacagcaagcacaccccuaucaaccucgugcggggccugccucagggcuucucugcucuggaaccccugguggaucugcccaucggcaucaacaucacccgguuucagacacugcacaucagcuaccugacaccuggcgauagcagcagcggauggacagcuggugccgccgcuuacuaugugggcuaccugcagccuagaaccuuccugcugaaguacaacgagaacggcaccaucaccgacgccguggauugugcucuggauccucugagcgagacaaagugcacccugaaguccuucaccguggaaaagggcaucuaccagaccagcaacuuccgggugcagcccaccgaauccaucgugcgguuccccaauaucaccaaucugugccccuucggcgagguguucaaugccaccagauucgccucuguguacgccuggaaccggaagcggaucagcaauugcguggccgacuacuccgugcuguacaacuccgccagcuucagcaccuucaagugcuacggcguguccccuaccaagcugaacgaccugugcuucacaaacguguacgccgacagcuucgugauccggggagaugaagugcggcagauugccccuggacagacaggcaacaucgccgacuacaacuacaagcugcccgacgacuucaccggcugugugauugccuggaacagcaacaaccuggacuccaaagucggcggcaacuacaauuaccuguaccggcuguuccggaaguccaaucugaagcccuucgagcgggacaucuccaccgagaucuaucaggccggcagcaccccuuguaacggcgugaagggcuucaacugcuacuucccacugcaguccuacggcuuucagcccacauacggcgugggcuaucagcccuacagagugguggugcugagcuucgaacugcugcaugccccugccacagugugcggcccuaagaaaagcaccaaucucgugaagaacaaaugcgugaacuucaacuucaacggccugaccggcaccggcgugcugacagagagcaacaagaaguuccugccauuccagcaguuuggccgggauaucgccgauaccacagacgccguuagagauccccagacacuggaaauccuggacaucaccccuugcagcuucggcggagugucugugaucaccccuggcaccaacaccagcaaucagguggcagugcuguaccagggcgugaacuguaccgaagugcccguggccauucacgccgaucagcugacaccuacauggcggguguacuccaccggcagcaauguguuucagaccagagccggcugucugaucggagccgagcacgugaacaauagcuacgagugcgacauccccaucggcgcuggaaucugcgccagcuaccagacacagacaaacagcccucggagagccagaagcguggccagccagagcaucauugccuacacaaugucucugggcguggagaacagcguggccuacuccaacaacucuaucgcuauccccaccaacuucaccaucagcgugaccacagagauccugccuguguccaugaccaagaccagcguggacugcaccauguacaucugcggcgauuccaccgagugcuccaaccugcugcugcaguacggcagcuucugcacccagcugaauagagcccugacagggaucgccguggaacaggacaagaacacccaagagguguucgcccaagugaagcagaucuacaagaccccuccuaucaaggacuucggcggcuucaauuucagccagauucugcccgauccuagcaagcccagcaagcggagcuucaucgaggaccugcuguucaacaaagugacacuggccgacgccggcuucaucaagcaguauggcgauugucugggcgacauugccgccagggaucugauuugcgcccagaaguuuaacggacugacagugcugccuccucugcugaccgaugagaugaucgcccaguacacaucugcccugcuggccggcacaaucacaagcggcuggacauuuggagcaggcgccgcucugcagauccccuuugcuaugcagauggccuaccgguucaacggcaucggagugacccagaaugugcuguacgagaaccagaagcugaucgccaaccaguucaacagcgccaucggcaagauccaggacagccugagcagcacagcaagcgcccugggaaagcugcaggacguggucaaccagaaugcccaggcacugaacacccuggucaagcagcuguccuccaacuucggcgccaucagcucugugcugaacgauauccugagcagacuggacccuccugaggccgaggugcagaucgacagacugaucacaggcagacugcagagccuccagacauacgugacccagcagcugaucagagccgccgagauuagagccucugccaaucuggccgccaccaagaugucugagugugugcugggccagagcaagagaguggacuuuugcggcaagggcuaccaccugaugagcuucccucagucugccccucacggcgugguguuucugcacgugacauaugugcccgcucaagagaagaauuucaccaccgcuccagccaucugccacgacggcaaagcccacuuuccuagagaaggcguguucguguccaacggcacccauugguucgugacacagcggaacuucuacgagccccagaucaucaccaccgacaacaccuucgugucuggcaacugcgacgucgugaucggcauugugaacaauaccguguacgacccucugcagcccgagcuggacagcuucaaagaggaacuggacaaguacuuuaagaaccacacaagccccgacguggaccugggcgauaucagcggaaucaaugccagcgucgugaacauccagaaagagaucgaccggcugaacgagguggccaagaaucugaacgagagccugaucgaccugcaagaacuggggaaguacgagcaguacaucaaguggcccugguacaucuggcugggcuuuaucgccggacugauugccaucgugauggucacaaucaugcuguguugcaugaccagcugcuguagcugccugaagggcuguuguagcuguggcagcugcugcaaguucgacgaggacgauucugagcccgugcugaagggcgugaaacugcacuacacaugaggacuaguguccaccugucccuccugggcugcuggauugucucguuuuccugccaaauaaacaggaucagcgcuuuacagaucucaaaggcucuuuucagagccaccaaaaaaaaaaaaaaaaaaaaaaaaaaaaaaaaaaaaaaaaaaaaaaaaaaaaaaaaaaaaaaaaaaaaaaaaaaaaaaaaaaaaaaaaaaaaaaaaaaaaa

SEQ ID NO: 24062 - RNA, 4129 nt, Artificial Sequence
  SARS-CoV-2/Wuhan/WIV05/2019__EPI_ISL_402128 spike protein mRNA gc mod (1-1273)(K986P_V987P_K986P_V987P_E484K_D614G)
aggagacccgugacccggaaguuguacggcuacgcgacuuucccucccacaaacccucgcgcccuuccuuuccuacuugggcccggcagaaagcuuaccauguucguguuccuggugcugcugccucugguguccagccagugugugaaccugaccaccagaacacagcugccuccagccuacaccaacagcuuuaccagaggcguguacuaccccgacaagguguucagauccagcgugcugcacucuacccaggaccuguuccugccuuucuucagcaacgugaccugguuccacgccauccacguguccggcaccaauggcaccaagagauucgacaaccccgugcugcccuucaacgacgggguguacuuugccagcaccgagaaguccaacaucaucagaggcuggaucuucggcaccacacuggacagcaagacccagagccugcugaucgugaacaacgccaccaacguggucaucaaagugugcgaguuccaguucugcaacgaccccuuccugggcgucuacuaccacaagaacaacaagagcuggauggaaagcgaguuccggguguacagcagcgccaacaacugcaccuucgaguacgugucccagccuuuccugauggaccuggaaggcaagcagggcaacuucaagaaccugcgcgaguucguguuuaagaacaucgacggcuacuucaagaucuacagcaagcacaccccuaucaaccucgugcgggaucugccucagggcuucucugcucuggaaccccugguggaucugcccaucggcaucaacaucacccgguuucagacacugcuggcccugcacagaagcuaccugacaccuggcgauagcagcagcggauggacagcuggugccgccgcuuacuaugugggcuaccugcagccuagaaccuuccugcugaaguacaacgagaacggcaccaucaccgacgccguggauugugcucuggauccucugagcgagacaaagugcacccugaaguccuucaccguggaaaagggcaucuaccagaccagcaacuuccgggugcagcccaccgaauccaucgugcgguuccccaauaucaccaaucugugccccuucggcgagguguucaaugccaccagauucgccucuguguacgccuggaaccggaagcggaucagcaauugcguggccgacuacuccgugcuguacaacuccgccagcuucagcaccuucaagugcuacggcguguccccuaccaagcugaacgaccugugcuucacaaacguguacgccgacagcuucgugauccggggagaugaagugcggcagauugccccuggacagacaggcaagaucgccgacuacaacuacaagcugcccgacgacuucaccggcugugugauugccuggaacagcaacaaccuggacuccaaagucggcggcaacuacaauuaccuguaccggcuguuccggaaguccaaucugaagcccuucgagcgggacaucuccaccgagaucuaucaggccggcagcaccccuuguaacggcgugaagggcuucaacugcuacuucccacugcaguccuacggcuuucagcccacaaauggcgugggcuaucagcccuacagagugguggugcugagcuucgaacugcugcaugccccugccacagugugcggcccuaagaaaagcaccaaucucgugaagaacaaaugcgugaacuucaacuucaacggccugaccggcaccggcgugcugacagagagcaacaagaaguuccugccauuccagcaguuuggccgggauaucgccgauaccacagacgccguuagagauccccagacacuggaaauccuggacaucaccccuugcagcuucggcggagugucugugaucaccccuggcaccaacaccagcaaucagguggcagugcuguaccagggcgugaacuguaccgaagugcccguggccauucacgccgaucagcugacaccuacauggcggguguacuccaccggcagcaauguguuucagaccagagccggcugucugaucggagccgagcacgugaacaauagcuacgagugcgacauccccaucggcgcuggaaucugcgccagcuaccagacacagacaaacagcccucggagagccagaagcguggccagccagagcaucauugccuacacaaugucucugggcgccgagaacagcguggccuacuccaacaacucuaucgcuauccccaccaacuucaccaucagcgugaccacagagauccugccuguguccaugaccaagaccagcguggacugcaccauguacaucugcggcgauuccaccgagugcuccaaccugcugcugcaguacggcagcuucugcacccagcugaauagagcccugacagggaucgccguggaacaggacaagaacacccaagagguguucgcccaagugaagcagaucuacaagaccccuccuaucaaggacuucggcggcuucaauuucagccagauucugcccgauccuagcaagcccagcaagcggagcuucaucgaggaccugcuguucaacaaagugacacuggccgacgccggcuucaucaagcaguauggcgauugucugggcgacauugccgccagggaucugauuugcgcccagaaguuuaacggacugacagugcugccuccucugcugaccgaugagaugaucgcccaguacacaucugcccugcuggccggcacaaucacaagcggcuggacauuuggagcaggcgccgcucugcagauccccuuugcuaugcagauggccuaccgguucaacggcaucggagugacccagaaugugcuguacgagaaccagaagcugaucgccaaccaguucaacagcgccaucggcaagauccaggacagccugagcagcacagcaagcgcccugggaaagcugcaggacguggucaaccagaaugcccaggcacugaacacccuggucaagcagcuguccuccaacuucggcgccaucagcucugugcugaacgauauccugagcagacuggacccuccugaggccgaggugcagaucgacagacugaucacaggcagacugcagagccuccagacauacgugacccagcagcugaucagagccgccgagauuagagccucugccaaucuggccgccaccaagaugucugagugugugcugggccagagcaagagaguggacuuuugcggcaagggcuaccaccugaugagcuucccucagucugccccucacggcgugguguuucugcacgugacauaugugcccgcucaagagaagaauuucaccaccgcuccagccaucugccacgacggcaaagcccacuuuccuagagaaggcguguucguguccaacggcacccauugguucgugacacagcggaacuucuacgagccccagaucaucaccaccgacaacaccuucgugucuggcaacugcgacgucgugaucggcauugugaacaauaccguguacgacccucugcagcccgagcuggacagcuucaaagaggaacuggacaaguacuuuaagaaccacacaagccccgacguggaccugggcgauaucagcggaaucaaugccagcgucgugaacauccagaaagagaucgaccggcugaacgagguggccaagaaucugaacgagagccugaucgaccugcaagaacuggggaaguacgagcaguacaucaaguggcccugguacaucuggcugggcuuuaucgccggacugauugccaucgugauggucacaaucaugcuguguugcaugaccagcugcuguagcugccugaagggcuguuguagcuguggcagcugcugcaaguucgacgaggacgauucugagcccgugcugaagggcgugaaacugcacuacacaugaggacuaguguccaccugucccuccugggcugcuggauugucucguuuuccugccaaauaaacaggaucagcgcuuuacagaucucaaaggcucuuuucagagccaccaaaaaaaaaaaaaaaaaaaaaaaaaaaaaaaaaaaaaaaaaaaaaaaaaaaaaaaaaaaaaaaaaaaaaaaaaaaaaaaaaaaaaaaaaaaaaaaaaaaaa

SEQ ID NO: 24063 - RNA, 4129 nt, Artificial Sequence
  SARS-CoV-2/Wuhan/WIV05/2019__EPI_ISL_402128 spike protein mRNA gc mod (1-1273)(K986P_V987P_K986P_V987P_L18F_T20N_P26S_D138Y_R190S_K417T _E484K_N501Y_D614G_H655Y_T1027I)
aggagacccgugacccggaaguuguacggcuacgcgacuuucccucccacaaacccucgcgcccuuccuuuccuacuugggcccggcagaaagcuuaccauguucguguuccuggugcugcugccucugguguccagccagugugugaacuucaccaacagaacacagcugccuagcgccuacaccaacagcuuuaccagaggcguguacuaccccgacaagguguucagauccagcgugcugcacucuacccaggaccuguuccugccuuucuucagcaacgugaccugguuccacgccauccacguguccggcaccaauggcaccaagagauucgacaaccccgugcugcccuucaacgacgggguguacuuugccagcaccgagaaguccaacaucaucagaggcuggaucuucggcaccacacuggacagcaagacccagagccugcugaucgugaacaacgccaccaacguggucaucaaagugugcgaguuccaguucugcaacuaccccuuccugggcgucuacuaccacaagaacaacaagagcuggauggaaagcgaguuccggguguacagcagcgccaacaacugcaccuucgaguacgugucccagccuuuccugauggaccuggaaggcaagcagggcaacuucaagaaccugagcgaguucguguuuaagaacaucgacggcuacuucaagaucuacagcaagcacaccccuaucaaccucgugcgggaucugccucagggcuucucugcucuggaaccccugguggaucugcccaucggcaucaacaucacccgguuucagacacugcuggcccugcacagaagcuaccugacaccuggcgauagcagcagcggauggacagcuggugccgccgcuuacuaugugggcuaccugcagccuagaaccuuccugcugaaguacaacgagaacggcaccaucaccgacgccguggauugugcucuggauccucugagcgagacaaagugcacccugaaguccuucaccguggaaaagggcaucuaccagaccagcaacuuccgggugcagcccaccgaauccaucgugcgguuccccaauaucaccaaucugugccccuucggcgagguguucaaugccaccagauucgccucuguguacgccuggaaccggaagcggaucagcaauugcguggccgacuacuccgugcuguacaacuccgccagcuucagcaccuucaagugcuacggcguguccccuaccaagcugaacgaccugugcuucacaaacguguacgccgacagcuucgugauccggggagaugaagugcggcagauugccccuggacagacaggcaccaucgccgacuacaacuacaagcugcccgacgacuucaccggcugugugauugccuggaacagcaacaaccuggacuccaaagucggcggcaacuacaauuaccuguaccggcuguuccggaaguccaaucugaagcccuucgagcgggacaucuccaccgagaucuaucaggccggcagcaccccuuguaacggcgugaagggcuucaacugcuacuucccacugcaguccuacggcuuucagcccacauacggcgugggcuaucagcccuacagagugguggugcugagcuucgaacugcugcaugccccugccacagugugcggcccuaagaaaagcaccaaucucgugaagaacaaaugcgugaacuucaacuucaacggccugaccggcaccggcgugcugacagagagcaacaagaaguuccugccauuccagcaguuuggccgggauaucgccgauaccacagacgccguuagagauccccagacacuggaaauccuggacaucaccccuugcagcuucggcggagugucugugaucaccccuggcaccaacaccagcaaucagguggcagugcuguaccagggcgugaacuguaccgaagugcccguggccauucacgccgaucagcugacaccuacauggcggguguacuccaccggcagcaauguguuucagaccagagccggcugucugaucggagccgaguacgugaacaauagcuacgagugcgacauccccaucggcgcuggaaucugcgccagcuaccagacacagacaaacagcccucggagagccagaagcguggccagccagagcaucauugccuacacaaugucucugggcgccgagaacagcguggccuacuccaacaacucuaucgcuauccccaccaacuucaccaucagcgugaccacagagauccugccuguguccaugaccaagaccagcguggacugcaccauguacaucugcggcgauuccaccgagugcuccaaccugcugcugcaguacggcagcuucugcacccagcugaauagagcccugacagggaucgccguggaacaggacaagaacacccaagagguguucgcccaagugaagcagaucuacaagaccccuccuaucaaggacuucggcggcuucaauuucagccagauucugcccgauccuagcaagcccagcaagcggagcuucaucgaggaccugcuguucaacaaagugacacuggccgacgccggcuucaucaagcaguauggcgauugucugggcgacauugccgccagggaucugauuugcgcccagaaguuuaacggacugacagugcugccuccucugcugaccgaugagaugaucgcccaguacacaucugcccugcuggccggcacaaucacaagcggcuggacauuuggagcaggcgccgcucugcagauccccuuugcuaugcagauggccuaccgguucaacggcaucggagugacccagaaugugcuguacgagaaccagaagcugaucgccaaccaguucaacagcgccaucggcaagauccaggacagccugagcagcacagcaagcgcccugggaaagcugcaggacguggucaaccagaaugcccaggcacugaacacccuggucaagcagcuguccuccaacuucggcgccaucagcucugugcugaacgauauccugagcagacuggacccuccugaggccgaggugcagaucgacagacugaucacaggcagacugcagagccuccagacauacgugacccagcagcugaucagagccgccgagauuagagccucugccaaucuggccgccaucaagaugucugagugugugcugggccagagcaagagaguggacuuuugcggcaagggcuaccaccugaugagcuucccucagucugccccucacggcgugguguuucugcacgugacauaugugcccgcucaagagaagaauuucaccaccgcuccagccaucugccacgacggcaaagcccacuuuccuagagaaggcguguucguguccaacggcacccauugguucgugacacagcggaacuucuacgagccccagaucaucaccaccgacaacaccuucgugucuggcaacugcgacgucgugaucggcauugugaacaauaccguguacgacccucugcagcccgagcuggacagcuucaaagaggaacuggacaaguacuuuaagaaccacacaagccccgacguggaccugggcgauaucagcggaaucaaugccagcgucgugaacauccagaaagagaucgaccggcugaacgagguggccaagaaucugaacgagagccugaucgaccugcaagaacuggggaaguacgagcaguacaucaaguggcccugguacaucuggcugggcuuuaucgccggacugauugccaucgugauggucacaaucaugcuguguugcaugaccagcugcuguagcugccugaagggcuguuguagcuguggcagcugcugcaaguucgacgaggacgauucugagcccgugcugaagggcgugaaacugcacuacacaugaggacuaguguccaccugucccuccugggcugcuggauugucucguuuuccugccaaauaaacaggaucagcgcuuuacagaucucaaaggcucuuuucagagccaccaaaaaaaaaaaaaaaaaaaaaaaaaaaaaaaaaaaaaaaaaaaaaaaaaaaaaaaaaaaaaaaaaaaaaaaaaaaaaaaaaaaaaaaaaaaaaaaaaaaaa

SEQ ID NO: 24064 - RNA, 4129 nt, Artificial Sequence
  SARS-CoV-2/Wuhan/WIV05/2019__EPI_ISL_402128 spike protein mRNA gc mod (1-1273)(K986P_V987P_K986P_V987P_S13I_W152C_L452R_D614G)
aggagacccgugacccggaaguuguacggcuacgcgacuuucccucccacaaacccucgcgcccuuccuuuccuacuugggcccggcagaaagcuuaccauguucguguuccuggugcugcugccucugguguccauccagugugugaaccugaccaccagaacacagcugccuccagccuacaccaacagcuuuaccagaggcguguacuaccccgacaagguguucagauccagcgugcugcacucuacccaggaccuguuccugccuuucuucagcaacgugaccugguuccacgccauccacguguccggcaccaauggcaccaagagauucgacaaccccgugcugcccuucaacgacgggguguacuuugccagcaccgagaaguccaacaucaucagaggcuggaucuucggcaccacacuggacagcaagacccagagccugcugaucgugaacaacgccaccaacguggucaucaaagugugcgaguuccaguucugcaacgaccccuuccugggcgucuacuaccacaagaacaacaagagcugcauggaaagcgaguuccggguguacagcagcgccaacaacugcaccuucgaguacgugucccagccuuuccugauggaccuggaaggcaagcagggcaacuucaagaaccugcgcgaguucguguuuaagaacaucgacggcuacuucaagaucuacagcaagcacaccccuaucaaccucgugcgggaucugccucagggcuucucugcucuggaaccccugguggaucugcccaucggcaucaacaucacccgguuucagacacugcuggcccugcacagaagcuaccugacaccuggcgauagcagcagcggauggacagcuggugccgccgcuuacuaugugggcuaccugcagccuagaaccuuccugcugaaguacaacgagaacggcaccaucaccgacgccguggauugugcucuggauccucugagcgagacaaagugcacccugaaguccuucaccguggaaaagggcaucuaccagaccagcaacuuccgggugcagcccaccgaauccaucgugcgguuccccaauaucaccaaucugugccccuucggcgagguguucaaugccaccagauucgccucuguguacgccuggaaccggaagcggaucagcaauugcguggccgacuacuccgugcuguacaacuccgccagcuucagcaccuucaagugcuacggcguguccccuaccaagcugaacgaccugugcuucacaaacguguacgccgacagcuucgugauccggggagaugaagugcggcagauugccccuggacagacaggcaagaucgccgacuacaacuacaagcugcccgacgacuucaccggcugugugauugccuggaacagcaacaaccuggacuccaaagucggcggcaacuacaauuaccgcuaccggcuguuccggaaguccaaucugaagcccuucgagcgggacaucuccaccgagaucuaucaggccggcagcaccccuuguaacggcguggaaggcuucaacugcuacuucccacugcaguccuacggcuuucagcccacaaauggcgugggcuaucagcccuacagagugguggugcugagcuucgaacugcugcaugccccugccacagugugcggcccuaagaaaagcaccaaucucgugaagaacaaaugcgugaacuucaacuucaacggccugaccggcaccggcgugcugacagagagcaacaagaaguuccugccauuccagcaguuuggccgggauaucgccgauaccacagacgccguuagagauccccagacacuggaaauccuggacaucaccccuugcagcuucggcggagugucugugaucaccccuggcaccaacaccagcaaucagguggcagugcuguaccagggcgugaacuguaccgaagugcccguggccauucacgccgaucagcugacaccuacauggcggguguacuccaccggcagcaauguguuucagaccagagccggcugucugaucggagccgagcacgugaacaauagcuacgagugcgacauccccaucggcgcuggaaucugcgccagcuaccagacacagacaaacagcccucggagagccagaagcguggccagccagagcaucauugccuacacaaugucucugggcgccgagaacagcguggccuacuccaacaacucuaucgcuauccccaccaacuucaccaucagcgugaccacagagauccugccuguguccaugaccaagaccagcguggacugcaccauguacaucugcggcgauuccaccgagugcuccaaccugcugcugcaguacggcagcuucugcacccagcugaauagagcccugacagggaucgccguggaacaggacaagaacacccaagagguguucgcccaagugaagcagaucuacaagaccccuccuaucaaggacuucggcggcuucaauuucagccagauucugcccgauccuagcaagcccagcaagcggagcuucaucgaggaccugcuguucaacaaagugacacuggccgacgccggcuucaucaagcaguauggcgauugucugggcgacauugccgccagggaucugauuugcgcccagaaguuuaacggacugacagugcugccuccucugcugaccgaugagaugaucgcccaguacacaucugcccugcuggccggcacaaucacaagcggcuggacauuuggagcaggcgccgcucugcagauccccuuugcuaugcagauggccuaccgguucaacggcaucggagugacccagaaugugcuguacgagaaccagaagcugaucgccaaccaguucaacagcgccaucggcaagauccaggacagccugagcagcacagcaagcgcccugggaaagcugcaggacguggucaaccagaaugcccaggcacugaacacccuggucaagcagcuguccuccaacuucggcgccaucagcucugugcugaacgauauccugagcagacuggacccuccugaggccgaggugcagaucgacagacugaucacaggcagacugcagagccuccagacauacgugacccagcagcugaucagagccgccgagauuagagccucugccaaucuggccgccaccaagaugucugagugugugcugggccagagcaagagaguggacuuuugcggcaagggcuaccaccugaugagcuucccucagucugccccucacggcgugguguuucugcacgugacauaugugcccgcucaagagaagaauuucaccaccgcuccagccaucugccacgacggcaaagcccacuuuccuagagaaggcguguucguguccaacggcacccauugguucgugacacagcggaacuucuacgagccccagaucaucaccaccgacaacaccuucgugucuggcaacugcgacgucgugaucggcauugugaacaauaccguguacgacccucugcagcccgagcuggacagcuucaaagaggaacuggacaaguacuuuaagaaccacacaagccccgacguggaccugggcgauaucagcggaaucaaugccagcgucgugaacauccagaaagagaucgaccggcugaacgagguggccaagaaucugaacgagagccugaucgaccugcaagaacuggggaaguacgagcaguacaucaaguggcccugguacaucuggcugggcuuuaucgccggacugauugccaucgugauggucacaaucaugcuguguugcaugaccagcugcuguagcugccugaagggcuguuguagcuguggcagcugcugcaaguucgacgaggacgauucugagcccgugcugaagggcgugaaacugcacuacacaugaggacuaguguccaccugucccuccugggcugcuggauugucucguuuuccugccaaauaaacaggaucagcgcuuuacagaucucaaaggcucuuuucagagccaccaaaaaaaaaaaaaaaaaaaaaaaaaaaaaaaaaaaaaaaaaaaaaaaaaaaaaaaaaaaaaaaaaaaaaaaaaaaaaaaaaaaaaaaaaaaaaaaaaaaaa

SEQ ID NO: 24065 - RNA, 1365 nt, Artificial Sequence
  SARS-CoV-2/Wuhan/WIV05/2019__EPI_ISL_402128 spike protein mRNA gc (1-15,334-528) Ferritin construct
aggagaaagcuuaccauguucguguuccugguccuccugccccuggugagcucccagugcaaccugugccccuucggcgagguguucaacgccacccgguucgccagcgucuacgccuggaaccgcaagcggaucuccaacugcguggcggacuacagcgugcuguacaacuccgccagcuucuccacguucaagugcuacggcgucagccccaccaagcucaacgaccugugcuucaccaacguguacgccgacuccuucgugauccgcggggacgagguccggcagaucgcccccggccagaccgggaagaucgccgacuacaacuacaagcugccggacgacuucacgggcugcgugaucgcguggaacagcaacaaccucgacuccaaggucgggggcaacuacaacuaccuguaccgccuguuccgcaagagcaaccucaagcccuucgagcgggacaucuccaccgagaucuaccaggccggcagcacccccugcaacgggguggagggcuucaacugcuacuucccccugcaguccuacggguuccagccgaccaacggcgugggguaccagcccuaccggguggucgugcugagcuucgagcuccugcacgcccccgccacggugugcggccccaagggcggggguggaagcggcggggguggaagugacaucaucaagcuccugaacgagcaggucaacaaggagaugcaguccagcaaccuguacauguccaugagcuccuggugcuacacccacagccucgacggcgccgggcuguuccuguucgaccacgccgcggaggaguacgagcacgccaagaagcucaucaucuuccugaacgagaacaacgugcccgugcagcugaccuccaucagcgccccggagcacaaguucgagggccucacgcagaucuuccagaaggccuacgagcacgagcagcacaucuccgagagcaucaacaacaucguggaccacgccaucaaguccaaggaccacgcgaccuucaacuuccugcagugguacgucgccgagcagcacgaggaggaggugcuguucaaggacauccucgacaagaucgagcugaucgggaacgagaaccacggccuguaccucgccgaccaguacgugaaggggaucgccaagagccgcaaguccugaggacuaguuauaagacugacuagcccgaugggccucccaacgggcccuccuccccuccuugcaccgagauuaaucaaaggcucuuuucagagccaccaaaaaaaaaaaaaaaaaaaaaaaaaaaaaaaaaaaaaaaaaaaaaaaaaaaaaaaaaaaaaaaaaaaaaaaaaaaaaaaaaaaaaaaaaaaaaaaaaaaaa

SEQ ID NO: 24066 - RNA, 963 nt, Artificial Sequence
  SARS-CoV-2/Wuhan/WIV05/2019__EPI_ISL_402128 spike protein mRNA gc (334-528) Foldon construct
aggagaaagcuuaccaugcccaugggcagccugcagccgcucgccacccuguaccugcucgggaugcugguggccuccguccuggcgaaccugugccccuucggcgagguguucaacgccacccgguucgccagcgucuacgccuggaaccgcaagcggaucuccaacugcguggcggacuacagcgugcuguacaacuccgccagcuucuccacguucaagugcuacggcgucagccccaccaagcucaacgaccugugcuucaccaacguguacgccgacuccuucgugauccgcggggacgagguccggcagaucgcccccggccagaccgggaagaucgccgacuacaacuacaagcugccggacgacuucacgggcugcgugaucgcguggaacagcaacaaccucgacuccaaggucgggggcaacuacaacuaccuguaccgccuguuccgcaagagcaaccucaagcccuucgagcgggacaucuccaccgagaucuaccaggccggcagcacccccugcaacgggguggagggcuucaacugcuacuucccccugcaguccuacggguuccagccgaccaacggcgugggguaccagcccuaccggguggucgugcugagcuucgagcuccugcacgcccccgccacggugugcggccccaagggcagcggcggguacauccccgaggccccgcgcgacggccaggccuacgugcggaaggacggcgaguggguccugcugagcaccuuccucugaggacuaguuauaagacugacuagcccgaugggccucccaacgggcccuccuccccuccuugcaccgagauuaaucaaaggcucuuuucagagccaccaaaaaaaaaaaaaaaaaaaaaaaaaaaaaaaaaaaaaaaaaaaaaaaaaaaaaaaaaaaaaaaaaaaaaaaaaaaaaaaaaaaaaaaaaaaaaaaaaaaaa

SEQ ID NO: 24067 - RNA, 1341 nt, Artificial Sequence
  SARS-CoV-2/Wuhan/WIV05/2019__EPI_ISL_402128 spike protein mRNA gc (1-15,334-528) LumSynth construct
aggagaaagcuuaccauguucguguuccugguccuccugccccuggugagcucccagugcaaccugugccccuucggcgagguguucaacgccacccgguucgccagcgucuacgccuggaaccgcaagcggaucuccaacugcguggcggacuacagcgugcuguacaacuccgccagcuucuccacguucaagugcuacggcgucagccccaccaagcucaacgaccugugcuucaccaacguguacgccgacuccuucgugauccgcggggacgagguccggcagaucgcccccggccagaccgggaagaucgccgacuacaacuacaagcugccggacgacuucacgggcugcgugaucgcguggaacagcaacaaccucgacuccaaggucgggggcaacuacaacuaccuguaccgccuguuccgcaagagcaaccucaagcccuucgagcgggacaucuccaccgagaucuaccaggccggcagcacccccugcaacgggguggagggcuucaacugcuacuucccccugcaguccuacggguuccagccgaccaacggcgugggguaccagcccuaccggguggucgugcugagcuucgagcuccugcacgcccccgccacggugugcggccccaagggcggcggcggcuccggaggcggagguagcgggggacagaucuacgagggcaagcugaccgccgaggggcuccgcuucggcaucguggccagccgguucaaccacgcgcuggucgaccgccugguggagggggccaucgacgccaucgugcggcacggcgggcgcgaggaggacaucacccucguccgggugcccggcuccugggagaucccgguggccgccggcgagcuggcccgcaaggaggacaucgacgcggucaucgccaucggggugcugauccggggcgccacgccccacuucgacuacaucgccagcgagguguccaaggggcucgcggaccugagccuggagcuccgcaagcccaucaccuucggcgucaucaccgccgacacccuggagcaggccaucgagcgggccgggacgaagcacggcaacaagggcugggaggccgcgcuguccgccaucgagauggccaaccucuucaagagccugcgcugaggacuaguuauaagacugacuagcccgaugggccucccaacgggcccuccuccccuccuugcaccgagauuaaucaaaggcucuuuucagagccaccaaaaaaaaaaaaaaaaaaaaaaaaaaaaaaaaaaaaaaaaaaaaaaaaaaaaaaaaaaaaaaaaaaaaaaaaaaaaaaaaaaaaaaaaaaaaaaaaaaaaa

SEQ ID NO: 24068 - RNA, 1302 nt, Artificial Sequence
  SARS-CoV-2/Wuhan/WIV05/2019__EPI_ISL_402128 spike protein mRNA gc (334-528) LumSynth construct
aggagaaagcuuaccaugcagaucuacgagggcaagcugaccgccgaggggcuccgcuucggcaucguggccagccgguucaaccacgcgcuggucgaccgccugguggagggggccaucgacgccaucgugcggcacggcgggcgcgaggaggacaucacccucguccgggugcccggcuccugggagaucccgguggccgccggcgagcuggcccgcaaggaggacaucgacgcggucaucgccaucggggugcugauccggggcgccacgccccacuucgacuacaucgccagcgagguguccaaggggcucgcggaccugagccuggagcuccgcaagcccaucaccuucggcgucaucaccgccgacacccuggagcaggccaucgagcgggccgggacgaagcacggcaacaagggcugggaggccgcgcuguccgccaucgagauggccaaccucuucaagagccugcgcggcgggggcgggagcggcgggggcggcuccgggggcgggaaccugugccccuucggcgagguguucaacgccacccgguucgccagcgucuacgccuggaaccgcaagcggaucuccaacugcguggcggacuacagcgugcuguacaacuccgccagcuucuccacguucaagugcuacggcgucagccccaccaagcucaacgaccugugcuucaccaacguguacgccgacuccuucgugauccgcggggacgagguccggcagaucgcccccggccagaccgggaagaucgccgacuacaacuacaagcugccggacgacuucacgggcugcgugaucgcguggaacagcaacaaccucgacuccaaggucgggggcaacuacaacuaccuguaccgccuguuccgcaagagcaaccucaagcccuucgagcgggacaucuccaccgagaucuaccaggccggcagcacccccugcaacgggguggagggcuucaacugcuacuucccccugcaguccuacggguuccagccgaccaacggcgugggguaccagcccuaccggguggucgugcugagcuucgagcuccugcacgcccccgccacggugugcggccccaagugaggacuaguuauaagacugacuagcccgaugggccucccaacgggcccuccuccccuccuugcaccgagauuaaucaaaggcucuuuucagagccaccaaaaaaaaaaaaaaaaaaaaaaaaaaaaaaaaaaaaaaaaaaaaaaaaaaaaaaaaaaaaaaaaaaaaaaaaaaaaaaaaaaaaaaaaaaaaaaaaaaaaa

SEQ ID NO: 24069 - RNA, 4035 nt, Artificial Sequence
  SARS-CoV-2/Wuhan/WIV05/2019__EPI_ISL_402128 spike protein mRNA gc (1-1273)
aggagaaagcuuaccauguucguguuccugguccuccugccccuggugagcucccagugcgugaaccucaccacccgcacgcagcugccgcccgccuacaccaacagcuucacccggggcgucuacuaccccgacaagguguuccgcuccagcgugcugcacuccacccaggaccucuuccugcccuucuucagcaacgucacgugguuccacgccauccacguguccgggaccaacggcaccaagcgguucgacaacccggugcugcccuucaacgacggggucuacuucgcgagcaccgagaaguccaacaucauccgcggcuggaucuucgggacgacccucgacagcaagacccagucccugcugaucgugaacaacgccaccaacguggucaucaaggugugcgaguuccaguucugcaacgaccccuuccucggcguguacuaccacaagaacaacaagagcuggauggaguccgaguuccgggucuacagcuccgccaacaacugcacguucgaguacgugagccagcccuuccugauggaccuggagggcaagcaggggaacuucaagaaccuccgcgaguucguguucaagaacaucgacggcuacuucaagaucuacuccaagcacaccccgaucaaccugguccgggaccugccccagggguucagcgcccucgagccccugguggaccugcccaucggcaucaacaucacccgcuuccagacccuccuggcccugcaccgguccuaccucacgccgggggacagcagcuccggcuggaccgcgggcgccgccgccuacuacgugggguaccugcagccccgcaccuuccugcucaaguacaacgagaacggcaccaucacggacgcggucgacugcgcccuggacccccugagcgagaccaagugcacccucaaguccuucaccguggagaaggggaucuaccagacgagcaacuuccgggugcagcccaccgaguccaucguccgcuucccgaacaucaccaaccugugccccuucggcgagguguucaacgccacccgguucgccagcgucuacgccuggaaccgcaagcggaucuccaacugcguggcggacuacagcgugcuguacaacuccgccagcuucuccacguucaagugcuacggcgucagccccaccaagcucaacgaccugugcuucaccaacguguacgccgacuccuucgugauccgcggggacgagguccggcagaucgcccccggccagaccgggaagaucgccgacuacaacuacaagcugccggacgacuucacgggcugcgugaucgcguggaacagcaacaaccucgacuccaaggucgggggcaacuacaacuaccuguaccgccuguuccgcaagagcaaccucaagcccuucgagcgggacaucuccaccgagaucuaccaggccggcagcacccccugcaacgggguggagggcuucaacugcuacuucccccugcaguccuacggguuccagccgaccaacggcgugggguaccagcccuaccggguggucgugcugagcuucgagcuccugcacgcccccgccacggugugcggccccaagaaguccaccaaccuggucaagaacaagugcgugaacuucaacuucaacggccucaccgggaccggcgugcugaccgagagcaacaagaaguuccugccguuccagcaguucgggcgcgacaucgccgacacgaccgacgcgguccgcgacccccagacccuggagauccucgacaucacccccugcagcuucggcgggguguccgugaucacgccgggcaccaacaccagcaaccaggucgccgugcuguaccaggacgugaacugcaccgagguccccguggccauccacgccgaccagcugacgcccaccuggcggguguacuccaccggcagcaacgucuuccagacccgcgccgggugccucaucggcgcggagcacgugaacaacuccuacgagugcgacauccccaucggggccggcaucugcgccagcuaccagacgcagaccaacuccccgcggcgcgcccggagcguggcgucccagagcaucaucgccuacaccaugucccugggcgccgagaacagcgucgccuacuccaacaacagcaucgccauccccaccaacuucacgaucuccgugaccaccgagauccugcccgugagcaugaccaagacgagcgucgacugcaccauguacaucugcggggacuccaccgagugcagcaaccuccugcugcaguacggcuccuucugcacccagcucaaccgcgcgcugacggggaucgccguggagcaggacaagaacacccaggagguguucgcccaggucaagcagaucuacaagacgcccccgaucaaggacuucggcggguucaacuucagccagauccugcccgaccccuccaagcccagcaagcgguccuucaucgaggaccuccuguucaacaaggugacccuggccgacgccggcuucaucaagcaguacggcgacugccucggggacaucgcggcccgcgaccugaucugcgcccagaaguucaacggccugaccgugcucccgccccugcugaccgacgagaugaucgcccaguacaccagcgcccuccuggcggggaccaucacguccggcuggaccuucggggccggcgccgcccugcagauccccuucgcgaugcagauggccuaccgguucaacggcaucggggucacccagaacgugcucuacgagaaccagaagcugaucgccaaccaguucaacagcgccaucggcaagauccaggacucccugagcuccaccgccagcgcgcucgggaagcugcaggacguggucaaccagaacgcccaggcccugaacacgcucgugaagcagcuguccagcaacuucggcgccaucuccagcgugcugaacgacauccucucccgccuggacaaggucgaggccgaggugcagaucgaccggcugaucaccgggcgccuccagagccugcagaccuacgugacccagcagcugauccgggcggccgagauccgcgccagcgccaaccucgccgcgaccaagauguccgagugcguccugggccagagcaagcggguggacuucugcggcaagggguaccaccugauguccuucccccagagcgccccgcacggcguggucuuccuccacgugacguacguccccgcccaggagaagaacuucaccaccgcccccgcgaucugccacgacgggaaggcccacuucccccgcgagggcguguucguguccaacgggacccacugguucgucacgcagcggaacuucuacgagccgcagaucaucaccaccgacaacaccuucgugagcggcaacugcgacguggucaucggcaucgugaacaacacgguguacgacccccugcagcccgagcuggacuccuucaaggaggagcucgacaaguacuucaagaaccacaccagccccgacgucgaccugggggacaucuccggcaucaacgccagcguggugaacauccagaaggagaucgaccgccugaacgaggucgccaagaaccucaacgagucccugaucgaccugcaggagcucgggaaguacgagcaguacaucaaguggccgugguacaucuggcugggcuucaucgccggccugaucgcgaucgugauggugaccaucaugcucugcugcaugaccagcugcugcuccugccugaaggggugcugcagcugcggcuccugcugcaaguucgacgaggacgacagcgagcccguccugaagggggugaagcuccacuacacgugaggacuaguuauaagacugacuagcccgaugggccucccaacgggcccuccuccccuccuugcaccgagauuaaucaaaggcucuuuucagagccaccaaaaaaaaaaaaaaaaaaaaaaaaaaaaaaaaaaaaaaaaaaaaaaaaaaaaaaaaaaaaaaaaaaaaaaaaaaaaaaaaaaaaaaaaaaaaaaaaaaaaa

SEQ ID NO: 24070 - RNA, 4035 nt, Artificial Sequence
  SARS-CoV-2/Wuhan/WIV05/2019__EPI_ISL_402128 spike protein mRNA gc (1-1273)(D614G)
aggagaaagcuuaccauguucguguuccugguccuccugccccuggugagcucccagugcgugaaccucaccacccgcacgcagcugccgcccgccuacaccaacagcuucacccggggcgucuacuaccccgacaagguguuccgcuccagcgugcugcacuccacccaggaccucuuccugcccuucuucagcaacgucacgugguuccacgccauccacguguccgggaccaacggcaccaagcgguucgacaacccggugcugcccuucaacgacggggucuacuucgcgagcaccgagaaguccaacaucauccgcggcuggaucuucgggacgacccucgacagcaagacccagucccugcugaucgugaacaacgccaccaacguggucaucaaggugugcgaguuccaguucugcaacgaccccuuccucggcguguacuaccacaagaacaacaagagcuggauggaguccgaguuccgggucuacagcuccgccaacaacugcacguucgaguacgugagccagcccuuccugauggaccuggagggcaagcaggggaacuucaagaaccuccgcgaguucguguucaagaacaucgacggcuacuucaagaucuacuccaagcacaccccgaucaaccugguccgggaccugccccagggguucagcgcccucgagccccugguggaccugcccaucggcaucaacaucacccgcuuccagacccuccuggcccugcaccgguccuaccucacgccgggggacagcagcuccggcuggaccgcgggcgccgccgccuacuacgugggguaccugcagccccgcaccuuccugcucaaguacaacgagaacggcaccaucacggacgcggucgacugcgcccuggacccccugagcgagaccaagugcacccucaaguccuucaccguggagaaggggaucuaccagacgagcaacuuccgggugcagcccaccgaguccaucguccgcuucccgaacaucaccaaccugugccccuucggcgagguguucaacgccacccgguucgccagcgucuacgccuggaaccgcaagcggaucuccaacugcguggcggacuacagcgugcuguacaacuccgccagcuucuccacguucaagugcuacggcgucagccccaccaagcucaacgaccugugcuucaccaacguguacgccgacuccuucgugauccgcggggacgagguccggcagaucgcccccggccagaccgggaagaucgccgacuacaacuacaagcugccggacgacuucacgggcugcgugaucgcguggaacagcaacaaccucgacuccaaggucgggggcaacuacaacuaccuguaccgccuguuccgcaagagcaaccucaagcccuucgagcgggacaucuccaccgagaucuaccaggccggcagcacccccugcaacgggguggagggcuucaacugcuacuucccccugcaguccuacggguuccagccgaccaacggcgugggguaccagcccuaccggguggucgugcugagcuucgagcuccugcacgcccccgccacggugugcggccccaagaaguccaccaaccuggucaagaacaagugcgugaacuucaacuucaacggccucaccgggaccggcgugcugaccgagagcaacaagaaguuccugccguuccagcaguucgggcgcgacaucgccgacacgaccgacgcgguccgcgacccccagacccuggagauccucgacaucacccccugcagcuucggcgggguguccgugaucacgccgggcaccaacaccagcaaccaggucgccgugcuguaccagggcgugaacugcaccgagguccccguggccauccacgccgaccagcugacgcccaccuggcggguguacuccaccggcagcaacgucuuccagacccgcgccgggugccucaucggcgcggagcacgugaacaacuccuacgagugcgacauccccaucggggccggcaucugcgccagcuaccagacgcagaccaacuccccgcggcgcgcccggagcguggcgucccagagcaucaucgccuacaccaugucccugggcgccgagaacagcgucgccuacuccaacaacagcaucgccauccccaccaacuucacgaucuccgugaccaccgagauccugcccgugagcaugaccaagacgagcgucgacugcaccauguacaucugcggggacuccaccgagugcagcaaccuccugcugcaguacggcuccuucugcacccagcucaaccgcgcgcugacggggaucgccguggagcaggacaagaacacccaggagguguucgcccaggucaagcagaucuacaagacgcccccgaucaaggacuucggcggguucaacuucagccagauccugcccgaccccuccaagcccagcaagcgguccuucaucgaggaccuccuguucaacaaggugacccuggccgacgccggcuucaucaagcaguacggcgacugccucggggacaucgcggcccgcgaccugaucugcgcccagaaguucaacggccugaccgugcucccgccccugcugaccgacgagaugaucgcccaguacaccagcgcccuccuggcggggaccaucacguccggcuggaccuucggggccggcgccgcccugcagauccccuucgcgaugcagauggccuaccgguucaacggcaucggggucacccagaacgugcucuacgagaaccagaagcugaucgccaaccaguucaacagcgccaucggcaagauccaggacucccugagcuccaccgccagcgcgcucgggaagcugcaggacguggucaaccagaacgcccaggcccugaacacgcucgugaagcagcuguccagcaacuucggcgccaucuccagcgugcugaacgacauccucucccgccuggacaaggucgaggccgaggugcagaucgaccggcugaucaccgggcgccuccagagccugcagaccuacgugacccagcagcugauccgggcggccgagauccgcgccagcgccaaccucgccgcgaccaagauguccgagugcguccugggccagagcaagcggguggacuucugcggcaagggguaccaccugauguccuucccccagagcgccccgcacggcguggucuuccuccacgugacguacguccccgcccaggagaagaacuucaccaccgcccccgcgaucugccacgacgggaaggcccacuucccccgcgagggcguguucguguccaacgggacccacugguucgucacgcagcggaacuucuacgagccgcagaucaucaccaccgacaacaccuucgugagcggcaacugcgacguggucaucggcaucgugaacaacacgguguacgacccccugcagcccgagcuggacuccuucaaggaggagcucgacaaguacuucaagaaccacaccagccccgacgucgaccugggggacaucuccggcaucaacgccagcguggugaacauccagaaggagaucgaccgccugaacgaggucgccaagaaccucaacgagucccugaucgaccugcaggagcucgggaaguacgagcaguacaucaaguggccgugguacaucuggcugggcuucaucgccggccugaucgcgaucgugauggugaccaucaugcucugcugcaugaccagcugcugcuccugccugaaggggugcugcagcugcggcuccugcugcaaguucgacgaggacgacagcgagcccguccugaagggggugaagcuccacuacacgugaggacuaguuauaagacugacuagcccgaugggccucccaacgggcccuccuccccuccuugcaccgagauuaaucaaaggcucuuuucagagccaccaaaaaaaaaaaaaaaaaaaaaaaaaaaaaaaaaaaaaaaaaaaaaaaaaaaaaaaaaaaaaaaaaaaaaaaaaaaaaaaaaaaaaaaaaaaaaaaaaaaaa

SEQ ID NO: 24071 - RNA, 4035 nt, Artificial Sequence
  SARS-CoV-2/Wuhan/WIV05/2019__EPI_ISL_402128 spike protein mRNA gc (1-1273)(A222V_D614G)
aggagaaagcuuaccauguucguguuccugguccuccugccccuggugagcucccagugcgugaaccucaccacccgcacgcagcugccgcccgccuacaccaacagcuucacccggggcgucuacuaccccgacaagguguuccgcuccagcgugcugcacuccacccaggaccucuuccugcccuucuucagcaacgucacgugguuccacgccauccacguguccgggaccaacggcaccaagcgguucgacaacccggugcugcccuucaacgacggggucuacuucgcgagcaccgagaaguccaacaucauccgcggcuggaucuucgggacgacccucgacagcaagacccagucccugcugaucgugaacaacgccaccaacguggucaucaaggugugcgaguuccaguucugcaacgaccccuuccucggcguguacuaccacaagaacaacaagagcuggauggaguccgaguuccgggucuacagcuccgccaacaacugcacguucgaguacgugagccagcccuuccugauggaccuggagggcaagcaggggaacuucaagaaccuccgcgaguucguguucaagaacaucgacggcuacuucaagaucuacuccaagcacaccccgaucaaccugguccgggaccugccccagggguucagcguccucgagccccugguggaccugcccaucggcaucaacaucacccgcuuccagacccuccuggcccugcaccgguccuaccucacgccgggggacagcagcuccggcuggaccgcgggcgccgccgccuacuacgugggguaccugcagccccgcaccuuccugcucaaguacaacgagaacggcaccaucacggacgcggucgacugcgcccuggacccccugagcgagaccaagugcacccucaaguccuucaccguggagaaggggaucuaccagacgagcaacuuccgggugcagcccaccgaguccaucguccgcuucccgaacaucaccaaccugugccccuucggcgagguguucaacgccacccgguucgccagcgucuacgccuggaaccgcaagcggaucuccaacugcguggcggacuacagcgugcuguacaacuccgccagcuucuccacguucaagugcuacggcgucagccccaccaagcucaacgaccugugcuucaccaacguguacgccgacuccuucgugauccgcggggacgagguccggcagaucgcccccggccagaccgggaagaucgccgacuacaacuacaagcugccggacgacuucacgggcugcgugaucgcguggaacagcaacaaccucgacuccaaggucgggggcaacuacaacuaccuguaccgccuguuccgcaagagcaaccucaagcccuucgagcgggacaucuccaccgagaucuaccaggccggcagcacccccugcaacgggguggagggcuucaacugcuacuucccccugcaguccuacggguuccagccgaccaacggcgugggguaccagcccuaccggguggucgugcugagcuucgagcuccugcacgcccccgccacggugugcggccccaagaaguccaccaaccuggucaagaacaagugcgugaacuucaacuucaacggccucaccgggaccggcgugcugaccgagagcaacaagaaguuccugccguuccagcaguucgggcgcgacaucgccgacacgaccgacgcgguccgcgacccccagacccuggagauccucgacaucacccccugcagcuucggcgggguguccgugaucacgccgggcaccaacaccagcaaccaggucgccgugcuguaccagggcgugaacugcaccgagguccccguggccauccacgccgaccagcugacgcccaccuggcggguguacuccaccggcagcaacgucuuccagacccgcgccgggugccucaucggcgcggagcacgugaacaacuccuacgagugcgacauccccaucggggccggcaucugcgccagcuaccagacgcagaccaacuccccgcggcgcgcccggagcguggcgucccagagcaucaucgccuacaccaugucccugggcgccgagaacagcgucgccuacuccaacaacagcaucgccauccccaccaacuucacgaucuccgugaccaccgagauccugcccgugagcaugaccaagacgagcgucgacugcaccauguacaucugcggggacuccaccgagugcagcaaccuccugcugcaguacggcuccuucugcacccagcucaaccgcgcgcugacggggaucgccguggagcaggacaagaacacccaggagguguucgcccaggucaagcagaucuacaagacgcccccgaucaaggacuucggcggguucaacuucagccagauccugcccgaccccuccaagcccagcaagcgguccuucaucgaggaccuccuguucaacaaggugacccuggccgacgccggcuucaucaagcaguacggcgacugccucggggacaucgcggcccgcgaccugaucugcgcccagaaguucaacggccugaccgugcucccgccccugcugaccgacgagaugaucgcccaguacaccagcgcccuccuggcggggaccaucacguccggcuggaccuucggggccggcgccgcccugcagauccccuucgcgaugcagauggccuaccgguucaacggcaucggggucacccagaacgugcucuacgagaaccagaagcugaucgccaaccaguucaacagcgccaucggcaagauccaggacucccugagcuccaccgccagcgcgcucgggaagcugcaggacguggucaaccagaacgcccaggcccugaacacgcucgugaagcagcuguccagcaacuucggcgccaucuccagcgugcugaacgacauccucucccgccuggacaaggucgaggccgaggugcagaucgaccggcugaucaccgggcgccuccagagccugcagaccuacgugacccagcagcugauccgggcggccgagauccgcgccagcgccaaccucgccgcgaccaagauguccgagugcguccugggccagagcaagcggguggacuucugcggcaagggguaccaccugauguccuucccccagagcgccccgcacggcguggucuuccuccacgugacguacguccccgcccaggagaagaacuucaccaccgcccccgcgaucugccacgacgggaaggcccacuucccccgcgagggcguguucguguccaacgggacccacugguucgucacgcagcggaacuucuacgagccgcagaucaucaccaccgacaacaccuucgugagcggcaacugcgacguggucaucggcaucgugaacaacacgguguacgacccccugcagcccgagcuggacuccuucaaggaggagcucgacaaguacuucaagaaccacaccagccccgacgucgaccugggggacaucuccggcaucaacgccagcguggugaacauccagaaggagaucgaccgccugaacgaggucgccaagaaccucaacgagucccugaucgaccugcaggagcucgggaaguacgagcaguacaucaaguggccgugguacaucuggcugggcuucaucgccggccugaucgcgaucgugauggugaccaucaugcucugcugcaugaccagcugcugcuccugccugaaggggugcugcagcugcggcuccugcugcaaguucgacgaggacgacagcgagcccguccugaagggggugaagcuccacuacacgugaggacuaguuauaagacugacuagcccgaugggccucccaacgggcccuccuccccuccuugcaccgagauuaaucaaaggcucuuuucagagccaccaaaaaaaaaaaaaaaaaaaaaaaaaaaaaaaaaaaaaaaaaaaaaaaaaaaaaaaaaaaaaaaaaaaaaaaaaaaaaaaaaaaaaaaaaaaaaaaaaaaaa

SEQ ID NO: 24072 - RNA, 4035 nt, Artificial Sequence
  SARS-CoV-2/Wuhan/WIV05/2019__EPI_ISL_402128 spike protein mRNA gc (1-1273)(N439K_D614G)
aggagaaagcuuaccauguucguguuccugguccuccugccccuggugagcucccagugcgugaaccucaccacccgcacgcagcugccgcccgccuacaccaacagcuucacccggggcgucuacuaccccgacaagguguuccgcuccagcgugcugcacuccacccaggaccucuuccugcccuucuucagcaacgucacgugguuccacgccauccacguguccgggaccaacggcaccaagcgguucgacaacccggugcugcccuucaacgacggggucuacuucgcgagcaccgagaaguccaacaucauccgcggcuggaucuucgggacgacccucgacagcaagacccagucccugcugaucgugaacaacgccaccaacguggucaucaaggugugcgaguuccaguucugcaacgaccccuuccucggcguguacuaccacaagaacaacaagagcuggauggaguccgaguuccgggucuacagcuccgccaacaacugcacguucgaguacgugagccagcccuuccugauggaccuggagggcaagcaggggaacuucaagaaccuccgcgaguucguguucaagaacaucgacggcuacuucaagaucuacuccaagcacaccccgaucaaccugguccgggaccugccccagggguucagcgcccucgagccccugguggaccugcccaucggcaucaacaucacccgcuuccagacccuccuggcccugcaccgguccuaccucacgccgggggacagcagcuccggcuggaccgcgggcgccgccgccuacuacgugggguaccugcagccccgcaccuuccugcucaaguacaacgagaacggcaccaucacggacgcggucgacugcgcccuggacccccugagcgagaccaagugcacccucaaguccuucaccguggagaaggggaucuaccagacgagcaacuuccgggugcagcccaccgaguccaucguccgcuucccgaacaucaccaaccugugccccuucggcgagguguucaacgccacccgguucgccagcgucuacgccuggaaccgcaagcggaucuccaacugcguggcggacuacagcgugcuguacaacuccgccagcuucuccacguucaagugcuacggcgucagccccaccaagcucaacgaccugugcuucaccaacguguacgccgacuccuucgugauccgcggggacgagguccggcagaucgcccccggccagaccgggaagaucgccgacuacaacuacaagcugccggacgacuucacgggcugcgugaucgcguggaacagcaagaaccucgacuccaaggucgggggcaacuacaacuaccuguaccgccuguuccgcaagagcaaccucaagcccuucgagcgggacaucuccaccgagaucuaccaggccggcagcacccccugcaacgggguggagggcuucaacugcuacuucccccugcaguccuacggguuccagccgaccaacggcgugggguaccagcccuaccggguggucgugcugagcuucgagcuccugcacgcccccgccacggugugcggccccaagaaguccaccaaccuggucaagaacaagugcgugaacuucaacuucaacggccucaccgggaccggcgugcugaccgagagcaacaagaaguuccugccguuccagcaguucgggcgcgacaucgccgacacgaccgacgcgguccgcgacccccagacccuggagauccucgacaucacccccugcagcuucggcgggguguccgugaucacgccgggcaccaacaccagcaaccaggucgccgugcuguaccagggcgugaacugcaccgagguccccguggccauccacgccgaccagcugacgcccaccuggcggguguacuccaccggcagcaacgucuuccagacccgcgccgggugccucaucggcgcggagcacgugaacaacuccuacgagugcgacauccccaucggggccggcaucugcgccagcuaccagacgcagaccaacuccccgcggcgcgcccggagcguggcgucccagagcaucaucgccuacaccaugucccugggcgccgagaacagcgucgccuacuccaacaacagcaucgccauccccaccaacuucacgaucuccgugaccaccgagauccugcccgugagcaugaccaagacgagcgucgacugcaccauguacaucugcggggacuccaccgagugcagcaaccuccugcugcaguacggcuccuucugcacccagcucaaccgcgcgcugacggggaucgccguggagcaggacaagaacacccaggagguguucgcccaggucaagcagaucuacaagacgcccccgaucaaggacuucggcggguucaacuucagccagauccugcccgaccccuccaagcccagcaagcgguccuucaucgaggaccuccuguucaacaaggugacccuggccgacgccggcuucaucaagcaguacggcgacugccucggggacaucgcggcccgcgaccugaucugcgcccagaaguucaacggccugaccgugcucccgccccugcugaccgacgagaugaucgcccaguacaccagcgcccuccuggcggggaccaucacguccggcuggaccuucggggccggcgccgcccugcagauccccuucgcgaugcagauggccuaccgguucaacggcaucggggucacccagaacgugcucuacgagaaccagaagcugaucgccaaccaguucaacagcgccaucggcaagauccaggacucccugagcuccaccgccagcgcgcucgggaagcugcaggacguggucaaccagaacgcccaggcccugaacacgcucgugaagcagcuguccagcaacuucggcgccaucuccagcgugcugaacgacauccucucccgccuggacaaggucgaggccgaggugcagaucgaccggcugaucaccgggcgccuccagagccugcagaccuacgugacccagcagcugauccgggcggccgagauccgcgccagcgccaaccucgccgcgaccaagauguccgagugcguccugggccagagcaagcggguggacuucugcggcaagggguaccaccugauguccuucccccagagcgccccgcacggcguggucuuccuccacgugacguacguccccgcccaggagaagaacuucaccaccgcccccgcgaucugccacgacgggaaggcccacuucccccgcgagggcguguucguguccaacgggacccacugguucgucacgcagcggaacuucuacgagccgcagaucaucaccaccgacaacaccuucgugagcggcaacugcgacguggucaucggcaucgugaacaacacgguguacgacccccugcagcccgagcuggacuccuucaaggaggagcucgacaaguacuucaagaaccacaccagccccgacgucgaccugggggacaucuccggcaucaacgccagcguggugaacauccagaaggagaucgaccgccugaacgaggucgccaagaaccucaacgagucccugaucgaccugcaggagcucgggaaguacgagcaguacaucaaguggccgugguacaucuggcugggcuucaucgccggccugaucgcgaucgugauggugaccaucaugcucugcugcaugaccagcugcugcuccugccugaaggggugcugcagcugcggcuccugcugcaaguucgacgaggacgacagcgagcccguccugaagggggugaagcuccacuacacgugaggacuaguuauaagacugacuagcccgaugggccucccaacgggcccuccuccccuccuugcaccgagauuaaucaaaggcucuuuucagagccaccaaaaaaaaaaaaaaaaaaaaaaaaaaaaaaaaaaaaaaaaaaaaaaaaaaaaaaaaaaaaaaaaaaaaaaaaaaaaaaaaaaaaaaaaaaaaaaaaaaaaa

SEQ ID NO: 24073 - RNA, 4035 nt, Artificial Sequence
  SARS-CoV-2/Wuhan/WIV05/2019__EPI_ISL_402128 spike protein mRNA gc (1-1273)(S477N_D614G)
aggagaaagcuuaccauguucguguuccugguccuccugccccuggugagcucccagugcgugaaccucaccacccgcacgcagcugccgcccgccuacaccaacagcuucacccggggcgucuacuaccccgacaagguguuccgcuccagcgugcugcacuccacccaggaccucuuccugcccuucuucagcaacgucacgugguuccacgccauccacguguccgggaccaacggcaccaagcgguucgacaacccggugcugcccuucaacgacggggucuacuucgcgagcaccgagaaguccaacaucauccgcggcuggaucuucgggacgacccucgacagcaagacccagucccugcugaucgugaacaacgccaccaacguggucaucaaggugugcgaguuccaguucugcaacgaccccuuccucggcguguacuaccacaagaacaacaagagcuggauggaguccgaguuccgggucuacagcuccgccaacaacugcacguucgaguacgugagccagcccuuccugauggaccuggagggcaagcaggggaacuucaagaaccuccgcgaguucguguucaagaacaucgacggcuacuucaagaucuacuccaagcacaccccgaucaaccugguccgggaccugccccagggguucagcgcccucgagccccugguggaccugcccaucggcaucaacaucacccgcuuccagacccuccuggcccugcaccgguccuaccucacgccgggggacagcagcuccggcuggaccgcgggcgccgccgccuacuacgugggguaccugcagccccgcaccuuccugcucaaguacaacgagaacggcaccaucacggacgcggucgacugcgcccuggacccccugagcgagaccaagugcacccucaaguccuucaccguggagaaggggaucuaccagacgagcaacuuccgggugcagcccaccgaguccaucguccgcuucccgaacaucaccaaccugugccccuucggcgagguguucaacgccacccgguucgccagcgucuacgccuggaaccgcaagcggaucuccaacugcguggcggacuacagcgugcuguacaacuccgccagcuucuccacguucaagugcuacggcgucagccccaccaagcucaacgaccugugcuucaccaacguguacgccgacuccuucgugauccgcggggacgagguccggcagaucgcccccggccagaccgggaagaucgccgacuacaacuacaagcugccggacgacuucacgggcugcgugaucgcguggaacagcaacaaccucgacuccaaggucgggggcaacuacaacuaccuguaccgccuguuccgcaagagcaaccucaagcccuucgagcgggacaucuccaccgagaucuaccaggccggcaacacccccugcaacgggguggagggcuucaacugcuacuucccccugcaguccuacggguuccagccgaccaacggcgugggguaccagcccuaccggguggucgugcugagcuucgagcuccugcacgcccccgccacggugugcggccccaagaaguccaccaaccuggucaagaacaagugcgugaacuucaacuucaacggccucaccgggaccggcgugcugaccgagagcaacaagaaguuccugccguuccagcaguucgggcgcgacaucgccgacacgaccgacgcgguccgcgacccccagacccuggagauccucgacaucacccccugcagcuucggcgggguguccgugaucacgccgggcaccaacaccagcaaccaggucgccgugcuguaccagggcgugaacugcaccgagguccccguggccauccacgccgaccagcugacgcccaccuggcggguguacuccaccggcagcaacgucuuccagacccgcgccgggugccucaucggcgcggagcacgugaacaacuccuacgagugcgacauccccaucggggccggcaucugcgccagcuaccagacgcagaccaacuccccgcggcgcgcccggagcguggcgucccagagcaucaucgccuacaccaugucccugggcgccgagaacagcgucgccuacuccaacaacagcaucgccauccccaccaacuucacgaucuccgugaccaccgagauccugcccgugagcaugaccaagacgagcgucgacugcaccauguacaucugcggggacuccaccgagugcagcaaccuccugcugcaguacggcuccuucugcacccagcucaaccgcgcgcugacggggaucgccguggagcaggacaagaacacccaggagguguucgcccaggucaagcagaucuacaagacgcccccgaucaaggacuucggcggguucaacuucagccagauccugcccgaccccuccaagcccagcaagcgguccuucaucgaggaccuccuguucaacaaggugacccuggccgacgccggcuucaucaagcaguacggcgacugccucggggacaucgcggcccgcgaccugaucugcgcccagaaguucaacggccugaccgugcucccgccccugcugaccgacgagaugaucgcccaguacaccagcgcccuccuggcggggaccaucacguccggcuggaccuucggggccggcgccgcccugcagauccccuucgcgaugcagauggccuaccgguucaacggcaucggggucacccagaacgugcucuacgagaaccagaagcugaucgccaaccaguucaacagcgccaucggcaagauccaggacucccugagcuccaccgccagcgcgcucgggaagcugcaggacguggucaaccagaacgcccaggcccugaacacgcucgugaagcagcuguccagcaacuucggcgccaucuccagcgugcugaacgacauccucucccgccuggacaaggucgaggccgaggugcagaucgaccggcugaucaccgggcgccuccagagccugcagaccuacgugacccagcagcugauccgggcggccgagauccgcgccagcgccaaccucgccgcgaccaagauguccgagugcguccugggccagagcaagcggguggacuucugcggcaagggguaccaccugauguccuucccccagagcgccccgcacggcguggucuuccuccacgugacguacguccccgcccaggagaagaacuucaccaccgcccccgcgaucugccacgacgggaaggcccacuucccccgcgagggcguguucguguccaacgggacccacugguucgucacgcagcggaacuucuacgagccgcagaucaucaccaccgacaacaccuucgugagcggcaacugcgacguggucaucggcaucgugaacaacacgguguacgacccccugcagcccgagcuggacuccuucaaggaggagcucgacaaguacuucaagaaccacaccagccccgacgucgaccugggggacaucuccggcaucaacgccagcguggugaacauccagaaggagaucgaccgccugaacgaggucgccaagaaccucaacgagucccugaucgaccugcaggagcucgggaaguacgagcaguacaucaaguggccgugguacaucuggcugggcuucaucgccggccugaucgcgaucgugauggugaccaucaugcucugcugcaugaccagcugcugcuccugccugaaggggugcugcagcugcggcuccugcugcaaguucgacgaggacgacagcgagcccguccugaagggggugaagcuccacuacacgugaggacuaguuauaagacugacuagcccgaugggccucccaacgggcccuccuccccuccuugcaccgagauuaaucaaaggcucuuuucagagccaccaaaaaaaaaaaaaaaaaaaaaaaaaaaaaaaaaaaaaaaaaaaaaaaaaaaaaaaaaaaaaaaaaaaaaaaaaaaaaaaaaaaaaaaaaaaaaaaaaaaaa
